United States Patent Application Publication US 2023/0026259 A1 - sequence listing, part 25

SEQ ID NO: 107087 - DNA, 686 bp, Homo sapiens
  Payload ID: 1024
  Gene Symbol: ANAPC11
  Gene Name: anaphase promoting complex subunit 11
  Uniprot ID: Q9NYG5
  ENST ID: ENST00000572851
  CDS Start-End: 141-395
gtgcgagactcggcgggcgctgttgagggagtcgggccgcgactgtggtcgtttttataccttcccgcgcggacgccggcgctgccaacggaagggcgggtagggcggtgcgtgattaggttggcgaaggctctgctgccatgaaggtgaagattaagtgctggaacggcgtggccacttggctctgggtggccaacgatgagaactgtggcatctgcaggatggcatttaacggatgctgccctgactgcaaggtgcccggcgacgactgcccgctggtgtggggccagtgctcccactgcttccacatgcattgcatcctcaagtggctgcacgcacagcaggtgcagcagcactgccccatgtgccgccaggaatggaagttcaaggagtgaggcccgacctggctctcgctggaggggcatcctgagactccttcctcatgctggcgccgatggctgctggggacagcgcccctgagctgcaacaaggtggaaacaagggctggagctgcgtttgttttgccatcactatgttgacacttttatccaataagtgaaaactcattaaactactcaaatcttgctggaggcctctgggtgcctgtgttctcggcatatagatgtggtctcggtgtgttttgatatgaaaactctcatgaataaacatctccgtgaaacgccaag

SEQ ID NO: 107088 - DNA, 1361 bp, Homo sapiens
  Payload ID: 1024
  Gene Symbol: ANAPC11
  Gene Name: anaphase promoting complex subunit 11
  Uniprot ID: Q9NYG5
  ENST ID: ENST00000575195
  CDS Start-End: 181-435
cacgatgtttcccaggctgggttcggactcctgggccggtatgatcttcctgccttggccccctgagtagctgggactgcactgtggcaggcttatacctgtgttggtgcctaaacgttctagctctgcagactcaatttagccagtcgtcctgttccctccgccgcaggctctgctgccatgaaggtgaagattaagtgctggaacggcgtggccacttggctctgggtggccaacgatgagaactgtggcatctgcaggatggcatttaacggatgctgccctgactgcaaggtgcccggcgacgactgcccgctggtgtggggccagtgctcccactgcttccacatgcattgcatcctcaagtggctgcacgcacagcaggtgcagcagcactgccccatgtgccgccaggaatggaagttcaaggagtgaggcccgacctggctctcgctggaggggcatcctgagactccttcctcatgctggcgccgatggctgctggggacagcgcccctgagctgcaacaaggtggaaacaagggctggagctgcgtttgttttgccatcactatgttgacacttttatccaataagtgaaaactcattaaactactcaaatcttgctggaggcctctgggtgcctgtgttctcggcatatagatgtggtctcggtgtgttttgatatgaaaactctcatgaataaacatctccgtgaaacgccaaggccctcgtcaaaccctgagtcatgactgggaggagaaggagcaggatcagacggtagagcctggggcatgctcttcaggcatgctcttgcctgctggattgccggcggcggccctgggaccctccctcaggctggctctgagggaccctggctgtgcaaagctggcggccactgcttgtggcgcctccagactgaaggccaccatctctgagtgggcgtccattgttctcactgggactgtctgcagcggggctgggcctcccacagtgtagggatcagtgtcctgacactgggaagtgtgtccacacgtctgaggcttcccttcctagggaaaggtggccctgggaggctcctttgtgtgcctctgctccccacaatcgtggtgggaaggggccgctgggggagtggcagccccggcatctcaggctgcttctggacagagcacaggctgtgtctccagtaacctagggagcccttggcattcatggggccagtgacccgtgcccagtgtctcttgacccttcctcacagcaacctgaggagtagaccaggcctcacctgaaatctgtgtcagggttctctagagagacaggactctatatgaagagtatatatgaagagtttattgggagtat

SEQ ID NO: 107089 - DNA, 636 bp, Homo sapiens
  Payload ID: 1024
  Gene Symbol: ANAPC11
  Gene Name: anaphase promoting complex subunit 11
  Uniprot ID: Q9NYG5
  ENST ID: ENST00000571874
  CDS Start-End: 193-447
ggcgggcgctgttgagggagtcgggccgcgactgtggtcgtttttataccttcccgcgcggacgccggcgctgccaacggaagggcgggtagggcggtgcgtgattaggttggcgaagagacggagtttcgtcatgttggccaggcccatttgagatctttgaagatatcctcaacgtgaggctctgctgccatgaaggtgaagattaagtgctggaacggcgtggccacttggctctgggtggccaacgatgagaactgtggcatctgcaggatggcatttaacggatgctgccctgactgcaaggtgcccggcgacgactgcccgctggtgtggggccagtgctcccactgcttccacatgcattgcatcctcaagtggctgcacgcacagcaggtgcagcagcactgccccatgtgccgccaggaatggaagttcaaggagtgaggcccgacctggctctcgctggaggggcatcctgagactccttcctcatgctggcgccgatggctgctggggacagcgcccctgagctgcaacaaggtggaaacaagggctggagctgcgtttgttttgccatcactatgttgacacttttatccaataagtgaaaactcattaaactactcaaatctt

SEQ ID NO: 107090 - DNA, 722 bp, Homo sapiens
  Payload ID: 1024
  Gene Symbol: ANAPC11
  Gene Name: anaphase promoting complex subunit 11
  Uniprot ID: Q9NYG5
  ENST ID: ENST00000574924
  CDS Start-End: 177-431
ggcgtgcgagactcggcgggcgctgttgagggagtcgggccgcgactgtggtcgtttttataccttcccgcgcggacgccggcgctgccaacggaagggcggagacggagtttcgtcatgttggccaggcccatttgagatctttgaagatatcctcaacgtgaggctctgctgccatgaaggtgaagattaagtgctggaacggcgtggccacttggctctgggtggccaacgatgagaactgtggcatctgcaggatggcatttaacggatgctgccctgactgcaaggtgcccggcgacgactgcccgctggtgtggggccagtgctcccactgcttccacatgcattgcatcctcaagtggctgcacgcacagcaggtgcagcagcactgccccatgtgccgccaggaatggaagttcaaggagtgaggcccgacctggctctcgctggaggggcatcctgagactccttcctcatgctggcgccgatggctgctggggacagcgcccctgagctgcaacaaggtggaaacaagggctggagctgcgtttgttttgccatcactatgttgacacttttatccaataagtgaaaactcattaaactactcaaatcttgctggaggcctctgggtgcctgtgttctcggcatatagatgtggtctcggtgtgttttgatatgaaaactctcatgaataaacatctccgtgaaacgccaag

SEQ ID NO: 107091 - DNA, 578 bp, Homo sapiens
  Payload ID: 1024
  Gene Symbol: ANAPC11
  Gene Name: anaphase promoting complex subunit 11
  Uniprot ID: Q9NYG5
  ENST ID: ENST00000572639
  CDS Start-End: 134-388
cacggcctcggagcggctgctgattggccgctggcggacggctgcgcgcgcgggacgggagacggagtttcgtcatgttggccaggcccatttgagatctttgaagatatcctcaacgtgaggctctgctgccatgaaggtgaagattaagtgctggaacggcgtggccacttggctctgggtggccaacgatgagaactgtggcatctgcaggatggcatttaacggatgctgccctgactgcaaggtgcccggcgacgactgcccgctggtgtggggccagtgctcccactgcttccacatgcattgcatcctcaagtggctgcacgcacagcaggtgcagcagcactgccccatgtgccgccaggaatggaagttcaaggagtgaggcccgacctggctctcgctggaggggcatcctgagactccttcctcatgctggcgccgatggctgctggggacagcgcccctgagctgcaacaaggtggaaacaagggctggagctgcgtttgttttgccatcactatgttgacacttttatccaataagtgaaaactcattaaactactcaaatcttg

SEQ ID NO: 107092 - DNA, 668 bp, Homo sapiens
  Payload ID: 1024
  Gene Symbol: ANAPC11
  Gene Name: anaphase promoting complex subunit 11
  Uniprot ID: Q9NYG5
  ENST ID: ENST00000571024
  CDS Start-End: 123-377
gtgcgcactggcgtgcgagactcggcgggcgctgttgagggagtcgggccgcgactgtggtcgtttttataccttcccgcgcggacgccggcgctgccaacggaagggcgggctctgctgccatgaaggtgaagattaagtgctggaacggcgtggccacttggctctgggtggccaacgatgagaactgtggcatctgcaggatggcatttaacggatgctgccctgactgcaaggtgcccggcgacgactgcccgctggtgtggggccagtgctcccactgcttccacatgcattgcatcctcaagtggctgcacgcacagcaggtgcagcagcactgccccatgtgccgccaggaatggaagttcaaggagtgaggcccgacctggctctcgctggaggggcatcctgagactccttcctcatgctggcgccgatggctgctggggacagcgcccctgagctgcaacaaggtggaaacaagggctggagctgcgtttgttttgccatcactatgttgacacttttatccaataagtgaaaactcattaaactactcaaatcttgctggaggcctctgggtgcctgtgttctcggcatatagatgtggtctcggtgtgttttgatatgaaaactctcatgaataaacatctccgtgaaacgccaag

SEQ ID NO: 107093 - DNA, 559 bp, Homo sapiens
  Payload ID: 1024
  Gene Symbol: ANAPC11
  Gene Name: anaphase promoting complex subunit 11
  ENST ID: ENST00000584314
  CDS Start-End: 198-332
gactcggcgggcgctgttgagggagtcgggccgcgactgtggtcgtttttataccttcccgcgcggacgccggcgctgccaacggaagggcgggtagggcggtgcgtgattaggttggcgaagagacggagtttcgtcatgttggccaggcccatttgagatctttgaagatatcctcaacgtgaggctctgctgccatgaaggtgaagattaagtgctggaacggcgtggccacttggctctgggtggccaacgatgagaactgtggcatctgcaggatggcatttaacggatgctgccctgactgtgagtgtcccctccatgctgtctgagcggccccgactgtgagtgtcccctctgtgctgtctgctgcctgctggactagcctcagtagctcctgttaaatacctgcacgaaatacccagtttcattttctttttttttttttttttttgagaccgagtttcgatcttgtttcccaggctggagtgcaatggcgcgatctcggcttgccgcaacctctgcctcccgggttcaaacggttctcctgcctcagcct

SEQ ID NO: 107094 - DNA, 345 bp, Homo sapiens
  Payload ID: 1024
  Gene Symbol: ANAPC11
  Gene Name: anaphase promoting complex subunit 11
  ENST ID: ENST00000585259
  CDS Start-End: 13-345
ggctctgctgccatgaaggtgaagattaagtgctggaacggcgtggccacttggctctgggtggccaacgatgagaactgtggcatctgcaggatggcatttaacggatgctgccctgactgctggagtgcaatggcgcgatctcggcttgccgcaacctctgcctcccgggttcaaacggttctcctgcctcagccttccaagcagctgggattacaggcatgtgcccggcgacgactgcccgctggtgtggggccagtgctcccactgcttccacatgcattgcatcctcaagtggctgcacgcacagcaggtgcagcagcactgccccatgtgccgccagga

SEQ ID NO: 107095 - DNA, 603 bp, Homo sapiens
  Payload ID: 1024
  Gene Symbol: ANAPC11
  Gene Name: anaphase promoting complex subunit 11
  ENST ID: ENST00000577425
  CDS Start-End: 123-257
gtgcgcactggcgtgcgagactcggcgggcgctgttgagggagtcgggccgcgactgtggtcgtttttataccttcccgcgcggacgccggcgctgccaacggaagggcgggctctgctgccatgaaggtgaagattaagtgctggaacggcgtggccacttggctctgggtggccaacgatgagaactgtggcatctgcaggatggcatttaacggatgctgccctgactgtgagtgtcccctccatgctgtctgagcggccccgactgcaaggtgcccggcgacgactgcccgctggtgtggggccagtgctcccactgcttccacatgcattgcatcctcaagtggctgcacgcacagcaggtgcagcagcactgccccatgtgccgccaggaatggaagttcaaggagtgaggcccgacctggctctcgctggaggggcatcctgagactccttcctcatgctggcgccgatggctgctggggacagcgcccctgagctgcaacaaggtggaaacaagggctggagctgcgtttgttttgccatcactatgttgacacttttatccaataagtgaaaactcattaaactactcaaatct

SEQ ID NO: 107096 - DNA, 403 bp, Homo sapiens
  Payload ID: 1024
  Gene Symbol: ANAPC11
  Gene Name: anaphase promoting complex subunit 11
  ENST ID: ENST00000578544
  CDS Start-End: 72-206
cggagtttcgtcatgttggccaggcccatttgagatctttgaagatatcctcaacgtgaggctctgctgccatgaaggtgaagattaagtgctggaacggcgtggccacttggctctgggtggccaacgatgagaactgtggcatctgcaggatggcatttaacggatgctgccctgactgtgagtgtcccctccatgctgtctgagcggccccgactgcaaggtgcccggcgacgactgcccgctggtgtggggccagtgctcccactgcttccacatgcattgcatcctcaagtggctgcacgcacagcaggtgcagcagcactgccccatgtgccgccaggaatggaagttcaaggagtgaggcccgacctggctctcgctggaggggcatcctgagact

SEQ ID NO: 107097 - DNA, 672 bp, Homo sapiens
  Payload ID: 1024
  Gene Symbol: ANAPC11
  Gene Name: anaphase promoting complex subunit 11
  Uniprot ID: Q9NYG5
  ENST ID: ENST00000577747
  CDS Start-End: 229-483
agggagtcgggccgcgactgtggtcgtttttataccttcccgcgcggacgccggcgctgccaacggaagggtccaagtgattcctgtggctcagcttcccgaatagagctgggagctggcgtgatctcagctcgctgcaacctccgcctcccagagacggagtttcgtcatgttggccaggcccatttgagatctttgaagatatcctcaacgtgaggctctgctgccatgaaggtgaagattaagtgctggaacggcgtggccacttggctctgggtggccaacgatgagaactgtggcatctgcaggatggcatttaacggatgctgccctgactgcaaggtgcccggcgacgactgcccgctggtgtggggccagtgctcccactgcttccacatgcattgcatcctcaagtggctgcacgcacagcaggtgcagcagcactgccccatgtgccgccaggaatggaagttcaaggagtgaggcccgacctggctctcgctggaggggcatcctgagactccttcctcatgctggcgccgatggctgctggggacagcgcccctgagctgcaacaaggtggaaacaagggctggagctgcgtttgttttgccatcactatgttgacacttttatccaataagtgaaaactcattaaactactcaaatctt

SEQ ID NO: 107098 - DNA, 499 bp, Homo sapiens
  Payload ID: 1024
  Gene Symbol: ANAPC11
  Gene Name: anaphase promoting complex subunit 11
  Uniprot ID: Q9NYG5
  ENST ID: ENST00000583839
  CDS Start-End: 56-310
gggcgcggcttcggcgggcggcagccgctgcagacgagctgcgggctctgctgccatgaaggtgaagattaagtgctggaacggcgtggccacttggctctgggtggccaacgatgagaactgtggcatctgcaggatggcatttaacggatgctgccctgactgcaaggtgcccggcgacgactgcccgctggtgtggggccagtgctcccactgcttccacatgcattgcatcctcaagtggctgcacgcacagcaggtgcagcagcactgccccatgtgccgccaggaatggaagttcaaggagtgaggcccgacctggctctcgctggaggggcatcctgagactccttcctcatgctggcgccgatggctgctggggacagcgcccctgagctgcaacaaggtggaaacaagggctggagctgcgtttgttttgccatcactatgttgacacttttatccaataagtgaaaactcattaaactactcaaatctt

SEQ ID NO: 107099 - DNA, 575 bp, Homo sapiens
  Payload ID: 1024
  Gene Symbol: ANAPC11
  Gene Name: anaphase promoting complex subunit 11
  Uniprot ID: Q9NYG5
  ENST ID: ENST00000579978
  CDS Start-End: 134-388
cgcgtgcgcactggcgtgcgagactcggcgggcgctgttgagggagtcgggccgcgactgtggtcgtttttataccttcccgcgcggacgccggcgctgccaacggaagggcgggtagggcggctctgctgccatgaaggtgaagattaagtgctggaacggcgtggccacttggctctgggtggccaacgatgagaactgtggcatctgcaggatggcatttaacggatgctgccctgactgcaaggtgcccggcgacgactgcccgctggtgtggggccagtgctcccactgcttccacatgcattgcatcctcaagtggctgcacgcacagcaggtgcagcagcactgccccatgtgccgccaggaatggaagttcaaggagtgaggcccgacctggctctcgctggaggggcatcctgagactccttcctcatgctggcgccgatggctgctggggacagcgcccctgagctgcaacaaggtggaaacaagggctggagctgcgtttgttttgccatcactatgttgacacttttatccaataagtgaaaactcattaaactactcaaatc

SEQ ID NO: 107100 - DNA, 563 bp, Homo sapiens
  Payload ID: 1024
  Gene Symbol: ANAPC11
  Gene Name: anaphase promoting complex subunit 11
  ENST ID: ENST00000579133
  CDS Start-End: 82-216
cgcgactgtggtcgtttttataccttcccgcgcggacgccggcgctgccaacggaagggcgggtagggcggctctgctgccatgaaggtgaagattaagtgctggaacggcgtggccacttggctctgggtggccaacgatgagaactgtggcatctgcaggatggcatttaacggatgctgccctgactgtgagtgtcccctccatgctgtctgagcggccccgactgcaaggtgcccggcgacgactgcccgctggtgtggggccagtgctcccactgcttccacatgcattgcatcctcaagtggctgcacgcacagcaggtgcagcagcactgccccatgtgccgccaggaatggaagttcaaggagtgaggcccgacctggctctcgctggaggggcatcctgagactccttcctcatgctggcgccgatggctgctggggacagcgcccctgagctgcaacaaggtggaaacaagggctggagctgcgtttgttttgccatcactatgttgacacttttatccaataagtgaaaactcattaaactactcaaatctt

SEQ ID NO: 107101 - DNA, 523 bp, Homo sapiens
  Payload ID: 1024
  Gene Symbol: ANAPC11
  Gene Name: anaphase promoting complex subunit 11
  ENST ID: ENST00000582222
  CDS Start-End: 194-328
gtgcgcactggcgtgcgagactcggcgggcgctgttgagggagtcgggccgcgactgtggtcgtttttataccttcccgcgcggacgccggcgctgccaacggaagggcgggtagggcgagacggagtttcgtcatgttggccaggcccatttgagatctttgaagatatcctcaacgtgaggctctgctgccatgaaggtgaagattaagtgctggaacggcgtggccacttggctctgggtggccaacgatgagaactgtggcatctgcaggatggcatttaacggatgctgccctgactgtgagtgtcccctccatgctgtctgagcggccccgactgtgagtgtcccctctgtgctgtctgctgcctgctggactagcctcagtagctcctgttaaatacctgcacgaaatacccagtttcattttctttttttttttttttttttgagaccgagtttcgatcttgtttcccaggctggagtgcaatggcgcgatctcggcttgccgcaacctctgcct

SEQ ID NO: 107102 - DNA, 386 bp, Homo sapiens
  Payload ID: 1024
  Gene Symbol: ANAPC11
  Gene Name: anaphase promoting complex subunit 11
  ENST ID: ENST00000584197
  CDS Start-End: 171-386
ttgtttccgctcccgcccaggactgtgcgctcggctcgcggtggggtccggcgggcgcggcttcggcgggcggcagccgctgcagacgagctgcggagacggagtttcgtcatgttggccaggcccatttgagatctttgaagatatcctcaacgtgaggctctgctgccatgaaggtgaagattaagtgctggaacggcgtggccacttggctctgggtggccaacgatgagaactgtggcatctgcaggatggcatttaacggatgctgccctgactgtcctctccatggagaaagcatttctaggtgtttgggctggtgcccgcagcctgtgcctgtcctgggaggcagggcccatccacaggcaaggtgcccggcgacgact

SEQ ID NO: 107103 - DNA, 599 bp, Homo sapiens
  Payload ID: 1024
  Gene Symbol: ANAPC11
  Gene Name: anaphase promoting complex subunit 11
  Uniprot ID: Q9NYG5
  ENST ID: ENST00000578550
  CDS Start-End: 251-505
ggcgctgttgagggagtcgggccgcgactgtggtcgtttttataccttcccgcgcggacgccggcgctgccaacggaagggcgggtagggcggtccaagtgattcctgtggctcagcttcccgaatagagctgggagctggcgtgatctcagctcgctgcaacctccgcctcccagagacggagtttcgtcatgttggccaggcccatttgagatctttgaagatatcctcaacgtgaggctctgctgccatgaaggtgaagattaagtgctggaacggcgtggccacttggctctgggtggccaacgatgagaactgtggcatctgcaggatggcatttaacggatgctgccctgactgcaaggtgcccggcgacgactgcccgctggtgtggggccagtgctcccactgcttccacatgcattgcatcctcaagtggctgcacgcacagcaggtgcagcagcactgccccatgtgccgccaggaatggaagttcaaggagtgaggcccgacctggctctcgctggaggggcatcctgagactccttcctcatgctggcgccgatggctgctggggacagcgcccctgagctgcaaca

SEQ ID NO: 107104 - DNA, 964 bp, Homo sapiens
  Payload ID: 1024
  Gene Symbol: ANAPC11
  Gene Name: anaphase promoting complex subunit 11
  ENST ID: ENST00000612413
  CDS Start-End: 262-531
ggggaggcgcgtgcgcactggcgtgcgagactcggcgggcgctgttgagggagtcgggccgcgactgtggtcgtttttataccttcccgcgcggacgccggcgctgccaacggaagggcgggtagggcgagacggagtttcgtcatgttggccaggcccatttgagatctttgaagatatcctcaacgtgaggctctgctgccatgaaggtgaagattaagtgctggaacggcgtggccacttggctctgggtggccaacgatgagaactgtggcatctgcaggatggcatttaacggatgctgccctgactgtgagtgtcccctccatgctgtctgagcggccccgactgcaaggtgcccggcgacgactgcccgctggtgtggggccagtgctcccactgcttccacatgcattgcatcctcaagtggctgcacgcacagcaggtgcagcagcactgccccatgtgccgccaggaatggaagttcaaggagtgaggcccgacctggctctcgctggaggggcatcctgagactccttcctcatgctggcgccgatggctgctggggacagcgcccctgagctgcaacaaggtggaaacaagggctggagctgcgtttgttttgccatcactatgttgacacttttatccaataagtgaaaactcattaaactactcaaatcttgctggaggcctctgggtgcctgtgttctcggcatatagatgtggtctcggtgtgttttgatatgaaaactctcatgaataaacatctccgtgaaacgccaaggccctcgtcaaaccctgagtcatgactgggaggagaaggagcaggatcagacggtagagcctggggcatgctcttcaggcatgctcttgcctgctggattgccggcggcggccctgggaccctccctcaggctggctctgagggaccctggctgtgcaaagctggcggccactgctt

SEQ ID NO: 107105 - DNA, 1209 bp, Homo sapiens
  Payload ID: 1025
  Gene Symbol: ANAPC13
  Gene Name: anaphase promoting complex subunit 13
  Uniprot ID: Q9BS18
  ENST ID: ENST00000354910
  CDS Start-End: 103-327
agtgcagacacgtgatgcgggggagggggggggggcgtggcaggagcaagcgtctgccgcggtggccgggtgccgatttgacaagatcaaagctgcaggaaaatggacagtgaggttcagagagatggaaggatcttggatttgattgatgatgcttggcgagaagacaagctgccttatgaggatgtcgcaataccactgaatgagcttcctgaacctgaacaagacaatggtggcaccacagaatctgtcaaagaacaagaaatgaagtggacagacttagccttacagtacctccatgagaatgttccccccattggaaactgacgcttggctcctttcttgtggatggattttctcaaagtacacagataaagcatggtttgtttcagtctccaaattcaaacctttgagtaataaatcagcactcaaaaatgtacacccatttagtttgtggtagcaaagtgcaatgcgaaattgaatgagaaactgagatttctcagtaatggtgaatatttcgctctttaaacctaaaactcttcattgagtagcttatatttgaacatgattggttaaacatttgcctctacctctgattttgctttgctgtcaaagtttaacaccttccaactacttatgtgtgtcctgtaacacaggtgattgaacgtatgagagggaaaggcaaagaaaaaggaagccagacactaggagaattattaacttctcatacttccccacattgagaagcattcggagtgtatttagcctgtagatgttgtgatatgcaaatatcccattccctggttactggcattcctaagattcttcatggtattttcaaactttggataaatttacagattagaaagatatctgacagttaatctctgttctccttacaaattccttttgtgctgctggaaaggatctttggctaggtggatgactagttttattcaaagccttttctcaaagccctttcagttacaaccaccccactatggaatcagtatttagttatacatttgtataagaacctgtattttgaaaaacacattcatgtatatttattcctggaattatttgcctgttaaacagtgtctttcatgttctctccccagattgtaaactctgtaagaagctgcttgtatctgtatcccttgttgaaactctgaaaacactgaataactaaaatctcttctcatcctt

SEQ ID NO: 107106 - DNA, 896 bp, Homo sapiens
  Payload ID: 1025
  Gene Symbol: ANAPC13
  Gene Name: anaphase promoting complex subunit 13
  Uniprot ID: Q9BS18
  ENST ID: ENST00000511751
  CDS Start-End: 158-382
acactaaatgagcgggtccccttgtgccgtgaatgaagtagtcccaacagcgctagctagacagcagccctggcagggaggccgcactggggtctctccgctgaaaaggaaggtgggtccgccggggaagatttgacaagatcaaagctgcaggaaaatggacagtgaggttcagagagatggaaggatcttggatttgattgatgatgcttggcgagaagacaagctgccttatgaggatgtcgcaataccactgaatgagcttcctgaacctgaacaagacaatggtggcaccacagaatctgtcaaagaacaagaaatgaagtggacagacttagccttacagtacctccatgagaatgttccccccattggaaactgacgcttggctcctttcttgtggatggattttctcaaagtacacagataaagcatggtttgtttcagtctccaaattcaaacctttgagtaataaatcagcactcaaaaatgtacacccatttagtttgtggtagcaaagtgcaatgcgaaattgaatgagaaactgagatttctcagtaatggtgaatatttcgctctttaaacctaaaactcttcattgagtagcttatatttgaacatgattggttaaacatttgcctctacctctgattttgctttgctgtcaaagtttaacaccttccaactacttatgtgtgtcctgtaacacaggtgattgaacgtatgagagggaaaggcaaagaaaaaggaagccagacactaggagaattattaacttctcatacttccccacattgagaagcattcggagtgtatttagcctgtagatgttgtgatatgcaaatatcccattccctggttactggcattcctaagattcttcatggtattttcaa

SEQ ID NO: 107107 - DNA, 1840 bp, Homo sapiens
  Payload ID: 1025
  Gene Symbol: ANAPC13
  Gene Name: anaphase promoting complex subunit 13
  Uniprot ID: Q9BS18
  ENST ID: ENST00000510994
  CDS Start-End: 732-956
gcagacacgtgatgcgggggagggggggggggcgtggcaggagcaagcgtctgccgcggtggccgggtgccggtaagggtttccagcgcccccggcctaggttttggaggcgcgggaatgcgttcgttgctcagtgtcggacttccccctattcccatcggccgaggctgtcactttacgctcataaccgtttttctttactgcactcgtgtcgggaggaaagggacttgcgtggcacccccagacctccccgtctccgcttccacgtttggtacatcctgcctgaggcaggaagccgcagctgagggacggcctgtcgtacggtgcggatggtggtggcctgcgaggctcatttctagcaaggaacaaggctttcccgctttgattttataaatattatgtttacaaagctgtaatatatagaaattgataagacgtgtccctgtccctggaaacgcaggcaccgcgtgtttggaaagacattcatctgggctgtttgacagactccccagttggtgccatgctctgtgcttagggaactgtgagacccctggaggggtgggtaccgggaccgcactcagcctggggtttggaggcggcctcctataggaagcgacctgggacctaagatttttagactgactgtgggttcactggaataaaaaggaagaaacaaagagcattgcaggcatcgggactgtcacatttgacaagatcaaagctgcaggaaaatggacagtgaggttcagagagatggaaggatcttggatttgattgatgatgcttggcgagaagacaagctgccttatgaggatgtcgcaataccactgaatgagcttcctgaacctgaacaagacaatggtggcaccacagaatctgtcaaagaacaagaaatgaagtggacagacttagccttacagtacctccatgagaatgttccccccattggaaactgacgcttggctcctttcttgtggatggattttctcaaagtacacagataaagcatggtttgtttcagtctccaaattcaaacctttgagtaataaatcagcactcaaaaatgtacacccatttagtttgtggtagcaaagtgcaatgcgaaattgaatgagaaactgagatttctcagtaatggtgaatatttcgctctttaaacctaaaactcttcattgagtagcttatatttgaacatgattggttaaacatttgcctctacctctgattttgctttgctgtcaaagtttaacaccttccaactacttatgtgtgtcctgtaacacaggtgattgaacgtatgagagggaaaggcaaagaaaaaggaagccagacactaggagaattattaacttctcatacttccccacattgagaagcattcggagtgtatttagcctgtagatgttgtgatatgcaaatatcccattccctggttactggcattcctaagattcttcatggtattttcaaactttggataaatttacagattagaaagatatctgacagttaatctctgttctccttacaaattccttttgtgctgctggaaaggatctttggctaggtggatgactagttttattcaaagccttttctcaaagccctttcagttacaaccaccccactatggaatcagtatttagttatacatttgtataagaacctgtattttgaaaaacacattcatgtatatttattcctggaattatttgcctgttaaacagtgtctttcatgttctctccccagattgtaaactctgtaagaagctgcttgtatctgtatcccttgttgaaactctgaaaacactgaataactaaaatctcttctcatcctttt

SEQ ID NO: 107108 - DNA, 1420 bp, Homo sapiens
  Payload ID: 1025
  Gene Symbol: ANAPC13
  Gene Name: anaphase promoting complex subunit 13
  Uniprot ID: Q9BS18
  ENST ID: ENST00000514612
  CDS Start-End: 317-541
tggcaggagcaagcgtctgccgcggtggccgggtgccggtaagggtttccagcgcccccggcctaggttttggaggcgcgggaatgcgttcgttgctcagtgtcggacttccccctattcccatcggccgaggctgtcactttacgctcataaccgtttttctttactgcactcgtgtcgggaggaaagggacttgcgtggcacccccagacctccccgtctccgcttccacgtttggtacatcctgcctgaggcaggaagccgcagctgagggacggcctgtcgtacgatttgacaagatcaaagctgcaggaaaatggacagtgaggttcagagagatggaaggatcttggatttgattgatgatgcttggcgagaagacaagctgccttatgaggatgtcgcaataccactgaatgagcttcctgaacctgaacaagacaatggtggcaccacagaatctgtcaaagaacaagaaatgaagtggacagacttagccttacagtacctccatgagaatgttccccccattggaaactgacgcttggctcctttcttgtggatggattttctcaaagtacacagataaagcatggtttgtttcagtctccaaattcaaacctttgagtaataaatcagcactcaaaaatgtacacccatttagtttgtggtagcaaagtgcaatgcgaaattgaatgagaaactgagatttctcagtaatggtgaatatttcgctctttaaacctaaaactcttcattgagtagcttatatttgaacatgattggttaaacatttgcctctacctctgattttgctttgctgtcaaagtttaacaccttccaactacttatgtgtgtcctgtaacacaggtgattgaacgtatgagagggaaaggcaaagaaaaaggaagccagacactaggagaattattaacttctcatacttccccacattgagaagcattcggagtgtatttagcctgtagatgttgtgatatgcaaatatcccattccctggttactggcattcctaagattcttcatggtattttcaaactttggataaatttacagattagaaagatatctgacagttaatctctgttctccttacaaattccttttgtgctgctggaaaggatctttggctaggtggatgactagttttattcaaagccttttctcaaagccctttcagttacaaccaccccactatggaatcagtatttagttatacatttgtataagaacctgtattttgaaaaacacattcatgtatatttattcctggaattatttgcctgttaaacagtgtctttcatgttctctccccagattgtaaactctgtaagaagctgcttgtatctgtatcccttgttgaaactctgaaaacactgaataactaaaatctcttctcatc

SEQ ID NO: 107109 - DNA, 886 bp, Homo sapiens
  Payload ID: 1026
  Gene Symbol: ANAPC15
  Gene Name: anaphase promoting complex subunit 15
  Uniprot ID: P60006
  ENST ID: ENST00000227618
  CDS Start-End: 227-592
gggcgggagcggggaaaacaaaaggagacgaaggacgcatgcgtttggtgagtcccggattctggtgggttcttccgctcaggctgggtgaagcgcttccgggtcgccgccggcagcagcctcccggcgcgatgaagacactgaggctcagagaggttaagtgactcagccaaggtcaaacagctagtaagtggtggagccaggactcaaagccagtctaggagccatgtccactttgttcccctcactcttccctcgtgtgactgagactctgtggtttaatctggatcgaccctgtgtggaagagacagagctgcagcagcaggaacagcagcatcaggcctggctccaaagcatcgcggagaaagacaacaacctggttcctattggcaagccagcctcagagcactatgatgacgaggaagaagaggatgatgaagatgatgaggatagtgaagaggactcagaggatgatgaggatatgcaggacatggacgagatgaatgactacaatgagtcaccggatgatggagaggtcaatgaggtggacatggaaggcaacgaacaggatcaggaccagtggatgatctaggtagacaaggcagggtggcctcagggagattccaggccagcccaaactaccctgcatcccaacccccaacccctgcccacagaaccagctgatggccccagtgcctgaaagtgcccttgggcacctcctcagctgctgccaggatctggtctctttggcccctcccaggccatcagtctgcacttgaaatccccagggcctgaaacctactccaccttcctggccagtacctcaccccttgattgccaggtctggtctaagtttctttaataaagacaaaggagtgattttcca

SEQ ID NO: 107110 - DNA, 330 bp, Homo sapiens
  Payload ID: 1026
  Gene Symbol: ANAPC15
  Gene Name: anaphase promoting complex subunit 15
  ENST ID: ENST00000438939
  CDS Start-End: 53-330
ggctcagagaggttaagtgactcagccaaggtcaaacagctatctaggagccatgtccactttgttcccctcactcttccctcgtgtgactgagactctgtggtttaatctggatcgaccctgtgtggaagagacagagctgcagcagcaggaacagcagcatcaggcctggctccaaagcatcgcggagaaagacaacaacctggttcctattggcaagccagcctcagaggcctgtagggcttacaggctctgtcctgcccaccagcactatgatgacgaggaagaagaggatgatgaagatgatgaggatagtgaagaggactcaga

SEQ ID NO: 107111 - DNA, 807 bp, Homo sapiens
  Payload ID: 1026
  Gene Symbol: ANAPC15
  Gene Name: anaphase promoting complex subunit 15
  ENST ID: ENST00000543050
  CDS Start-End: 43-615
tagtaagtggtggagccaggactcaaagccagtctaggagccatgtccactttgttcccctcactcttccctcgtgtgactgagactctgtggtttaatctggatcgaccctgtgtggaagagacagagctgcagcagcaggaacagcagcatcaggcctggctccaaagcatcgcggagaaagacaacaacctggttcctattggcaagccagcctcagagcactatgatgacgaggaagaagaggatgatgaagatgatgaggatagtgaagaggactcagaggatgatgaggatatgcaggacatggacgagatgaatgactacaatgagtcaccggatgatggagaggtcaatgaggttcatctctcagtacttcccacctgtggcctgtatcacagccatcccaaacaactgtgcccagaatccatcaagctgtctcattccttcatgccacatgtgtatatgtggctggctttgcccttcccacccccatcgccatctgcctggccaactcagaacttccagattcagttcaaatgttgctctttctccatgaagtcccaggcagaaacaaccaccctatctttcagatttatgaaaggtctctgttagaatttgtagtttcattccccttttattgctcatcaaatgtatttctgatcttggaattggatgaacttttatttatttatttttgagaccaagtcttgctgtgttgcccaggctggagtgcagtagcatgatcacggctcactgcagccttgaccacccaggctcaggcaatcctcccacctcagcatttcc

SEQ ID NO: 107112 - DNA, 606 bp, Homo sapiens
  Payload ID: 1026
  Gene Symbol: ANAPC15
  Gene Name: anaphase promoting complex subunit 15
  ENST ID: ENST00000537644
  CDS Start-End: 236-606
ttctaagccccgacacactgtatgacctaaagccagtctctgcctgtcgctgggcctcagttcgcctgtcctaagtttaattcagattatctggcactcctggtcggctccctcagccgctcaaagctgattgtacccttataatatgaagacactgaggctcagagaggttaagtgactcagccaaggtcaaacagctagtaagtggtggagccaggactcaaagccaggagccatgtccactttgttcccctcactcttccctcgtgtgactgagactctgtggtttaatctggatcgaccctgtgtggaagagacagagctgcagcagcaggaacagcagcatcaggcctggctccaaagcatcgcggagaaagacaacaacctggttcctattggcaagccagcctcagaggcctgtagggcttacaggctctgtcctgcccaccagcactatgatgacgaggaagaagaggatgatgaagatgatgaggatagtgaagaggactcagaggatgatgaggatatgcaggacatggacgagatgaatgactacaatgagtcaccggatgatggagaggtcaatgaggtaggcaaggggtatgg

SEQ ID NO: 107113 - DNA, 468 bp, Homo sapiens
  Payload ID: 1026
  Gene Symbol: ANAPC15
  Gene Name: anaphase promoting complex subunit 15
  ENST ID: ENST00000545333
  CDS Start-End: 274-468
acttcctgtcacccagcatttctttcagttaattggtcctacccaggccccgcttttttcgcgtttagcaaccctataaggccaaatttctgtctgagacccgccctgctttctttctgttggtcaactgcatggtcattatcgtaatgagcaaagaaagggcggtggctttgcgacgatgaagacactgaggctcagagaggttaagtgactcagccaaggtcaaacagctagtaagtggtggagccaggactcaaagccagtctaggagccatgtccactttgttcccctcactcttccctcgtgtgactgagactctgtggtttaatctggatcgaccctgtgtggaagagacagagctgcagcagcaggaacagcagcatcaggcctggctccaaagcatcgcggagaaagacaacaacctggttcctattggcaagccagcctcagagcactatgatgacgag

SEQ ID NO: 107114 - DNA, 883 bp, Homo sapiens
  Payload ID: 1026
  Gene Symbol: ANAPC15
  Gene Name: anaphase promoting complex subunit 15
  Uniprot ID: P60006
  ENST ID: ENST00000543587
  CDS Start-End: 208-585
aaaacaaaaggagacgaaggacgcatgcgtttggtgagtcccggattctggtgggttcttccgctcaggctgggtgaagcgcttccgggtcgccgccggcagcagcctcccggcgcgatgaagacactgaggctcagagaggttaagtgactcagccaaggtcaaacagctagtaagtggtggagccaggactcaaagccaggagccatgtccactttgttcccctcactcttccctcgtgtgactgagactctgtggtttaatctggatcgaccctgtgtggaagagacagagctgcagcagcaggaacagcagcatcaggcctggctccaaagcatcgcggagaaagacaacaacctggttcctattggcaagccagcctcagagcactatgatgacgaggaagaagaggatgatgaagatgatgaggatagtgaagaggactcagaggatgatgaggatatgcaggacatggacgagatgaatgactacaatgagtcaccggatgatggagaggtcaatgagcctcctctccaggtggacatggaaggcaacgaacaggatcaggaccagtggatgatctaggtagacaaggcagggtggcctcagggagattccaggccagcccaaactaccctgcatcccaacccccaacccctgcccacagaaccagctgatggccccagtgcctgaaagtgcccttgggcacctcctcagctgctgccaggatctggtctctttggcccctcccaggccatcagtctgcacttgaaatccccagggcctgaaacctactccaccttcctggccagtacctcaccccttgattgccaggtctggtctaagtttctttaataaagacaaaggagtgattttccaccca

SEQ ID NO: 107115 - DNA, 867 bp, Homo sapiens
  Payload ID: 1026
  Gene Symbol: ANAPC15
  Gene Name: anaphase promoting complex subunit 15
  Uniprot ID: P60006
  ENST ID: ENST00000538393
  CDS Start-End: 211-576
gggaaaacaaaaggagacgaaggacgcatgcgtttggtgagtcccggattctggtgggttcttccgctcaggctgggtgaagcgcttccgggtcgccgccggcagcagcctcccggcgcgatgaagacactgaggctcagagaggttaagtgactcagccaaggtcaaacagctagtaagtggtggagccaggactcaaagccaggagccatgtccactttgttcccctcactcttccctcgtgtgactgagactctgtggtttaatctggatcgaccctgtgtggaagagacagagctgcagcagcaggaacagcagcatcaggcctggctccaaagcatcgcggagaaagacaacaacctggttcctattggcaagccagcctcagagcactatgatgacgaggaagaagaggatgatgaagatgatgaggatagtgaagaggactcagaggatgatgaggatatgcaggacatggacgagatgaatgactacaatgagtcaccggatgatggagaggtcaatgaggtggacatggaaggcaacgaacaggatcaggaccagtggatgatctaggtagacaaggcagggtggcctcagggagattccaggccagcccaaactaccctgcatcccaacccccaacccctgcccacagaaccagctgatggccccagtgcctgaaagtgcccttgggcacctcctcagctgctgccaggatctggtctctttggcccctcccaggccatcagtctgcacttgaaatccccagggcctgaaacctactccaccttcctggccagtacctcaccccttgattgccaggtctggtctaagtttctttaataaagacaaaggagtgatttt

SEQ ID NO: 107116 - DNA, 563 bp, Homo sapiens
  Payload ID: 1026
  Gene Symbol: ANAPC15
  Gene Name: anaphase promoting complex subunit 15
  ENST ID: ENST00000539395
  CDS Start-End: 430-563
tttcggagccgagatcgctggtctgtcagtacttcttggacatgagggtgtttaccgtcgtgcctaattacgcgggttgggaatctgagatacagggaagggcagcggctggccctgggtcggtcagataaattaagacaaaagcaggaccaggcatcgattattttctcctgctcatccctttcacggaggaattctaagccccgacacactgtatgacctaaagccagtctctgcctgtcgctgggcctcagttcgcctgtcctaagtttaattcagattatctggcactcctggtcggctccctcagccgctcaaagctgattgtacccttataatatgaagacactgaggctcagagaggttaagtgactcagccaaggtcaaacagctagtaagtggtggagccaggactcaaagccaggagccatgtccactttgttcccctcactcttccctcgtgtgactgagactctgtggtttaatctggatcgaccctgtgtggaagagacagagctgcagcagcaggaacagcagcatcaggcctggctccaaagcatcgc

SEQ ID NO: 107117 - DNA, 849 bp, Homo sapiens
  Payload ID: 1026
  Gene Symbol: ANAPC15
  Gene Name: anaphase promoting complex subunit 15
  Uniprot ID: P60006
  ENST ID: ENST00000538919
  CDS Start-End: 405-770
acttcttggacatgagggtgtttaccgtcgtgcctaattacgcgggttgggaatctgagatacagggaagggcagcggctggccctgggtcggtcagataaattaagacaaaagcaggaccaggcatcgattattttctcctgctcatccctttcacggaggaattctaagccccgacacactgtatgacctaaagccagtctctgcctgtcgctgggcctcagttcgcctgtcctaagtttaattcagattatctggcactcctggtcggctccctcagccgctcaaagctgattgtacccttataatatgaagacactgaggctcagagaggttaagtgactcagccaaggtcaaacagctagtaagtggtggagccaggactcaaagccagtctaggagccatgtccactttgttcccctcactcttccctcgtgtgactgagactctgtggtttaatctggatcgaccctgtgtggaagagacagagctgcagcagcaggaacagcagcatcaggcctggctccaaagcatcgcggagaaagacaacaacctggttcctattggcaagccagcctcagagcactatgatgacgaggaagaagaggatgatgaagatgatgaggatagtgaagaggactcagaggatgatgaggatatgcaggacatggacgagatgaatgactacaatgagtcaccggatgatggagaggtcaatgaggtggacatggaaggcaacgaacaggatcaggaccagtggatgatctaggtagacaaggcagggtggcctcagggagattccaggccagcccaaactaccctgcatcccaacccccaacccctgccca

SEQ ID NO: 107118 - DNA, 1481 bp, Homo sapiens
  Payload ID: 1026
  Gene Symbol: ANAPC15
  Gene Name: anaphase promoting complex subunit 15
  ENST ID: ENST00000502597
  CDS Start-End: 191-508
gctcaggctgggtgaagcgcttccgggtcgccgccggcagcagcctcccggcgcgctccaaagcatcgcggagaaagacaacaacctggttcctattggcaagccagcctcagagcactatgatgacgaggaagaagaggatgatgaagatgatgaggatagtgaagaggactcagaggatgatgaggatatgcaggacatggacgagatgaatgactacaatgagtcaccggatgatggagaggtcaatgaggttcatctctcagtacttcccacctgtggcctgtatcacagccatcccaaacaactgtgcccagaatccatcaagctgtctcattccttcatgccacatgtgtatatgtggctggctttgcccttcccacccccatcgccatctgcctggccaactcagaacttccagattcagttcaaatgttgctctttctccatgaagtcccaggcagaaacaaccaccctatctttcagatttatgaaaggtctctgttagaatttgtagtttcattccccttttattgctcatcaaatgtatttctgatcttggaattggatgaacttttatttatttatttttgagaccaagtcttgctgtgttgcccaggctggagtgcagtagcatgatcacggctcactgcagccttgaccacccaggctcaggcaatcctcccacctcagcatttccagtagctggaaccacagttactcaccaccacacccggctaatttttaaattttttgtagaaacgggggtcttgctttgttacccaggctagtctcgaactcctgggctcaagtgatcctcctgctttggcctcccaaagtgctgggattacaggcatgagccaccatgcccagccagtgaatttcttttcttttctttttctttttttttttttttttgagacaggttcttgctctgtcacccatgctggagtgcagtggcacaatcacagctcactgcagcctcagcctcctgggctcaagcaatcctcccacctcagcctcccaagtagctgggaccacaggcatgtgccaccatgcctgggtaatttttgtattttttgtagagatgggtttttgccatgttgcccaagccggtctcaaactcctgagctcaagcaatctgcccacctcggcctctcaaagtgctgggattacaggcaccagccaccacacagccgaatttcttaaataagaccctaaaagcacttatgctgggattgagataaatccaggcagacagctaccctaaatggtatgtggaagcctccatggtggagaggaaagatgtggagacagataattacaaagctatgggttatctgctgagatggttattccactgtgtattatggttcctttgaggccagcatttgtggctcattcatctctgtggcctctacccctctccctggcacctagcacattcctaatacaaaagaggtggcaataaatgtttgctg

SEQ ID NO: 107119 - DNA, 734 bp, Homo sapiens
  Payload ID: 1026
  Gene Symbol: ANAPC15
  Gene Name: anaphase promoting complex subunit 15
  Uniprot ID: P60006
  ENST ID: ENST00000535503
  CDS Start-End: 138-503
gggcgggagcggggaaaacaaaaggagacgaaggacgcatgcgtttgatgaagacactgaggctcagagaggttaagtgactcagccaaggtcaaacagctagtaagtggtggagccaggactcaaagccaggagccatgtccactttgttcccctcactcttccctcgtgtgactgagactctgtggtttaatctggatcgaccctgtgtggaagagacagagctgcagcagcaggaacagcagcatcaggcctggctccaaagcatcgcggagaaagacaacaacctggttcctattggcaagccagcctcagagcactatgatgacgaggaagaagaggatgatgaagatgatgaggatagtgaagaggactcagaggatgatgaggatatgcaggacatggacgagatgaatgactacaatgagtcaccggatgatggagaggtcaatgaggtggacatggaaggcaacgaacaggatcaggaccagtggatgatctaggtagacaaggcagggtggcctcagggagattccaggccagcccaaactaccctgcatcccaacccccaacccctgcccacagaaccagctgatggccccagtgcctgaaagtgcccttgggcacctcctcagctgctgccaggatctggtctctttggcccctcccaggccatcagtctgcacttgaaatccccagggcctgaaacctactccaccttcctggccagtacc

SEQ ID NO: 107120 - DNA, 872 bp, Homo sapiens
  Payload ID: 1026
  Gene Symbol: ANAPC15
  Gene Name: anaphase promoting complex subunit 15
  Uniprot ID: P60006
  ENST ID: ENST00000545680
  CDS Start-End: 201-578
gacgaaggacgcatgcgtttggtgagtcccggattctggtgggttcttccgctcaggctgggtgaagcgcttccgggtcgccgccggcagcagcctcccggcgcgatgaagacactgaggctcagagaggttaagtgactcagccaaggtcaaacagctagtaagtggtggagccaggactcaaagccagtctaggagccatgtccactttgttcccctcactcttccctcgtgtgactgagactctgtggtttaatctggatcgaccctgtgtggaagagacagagctgcagcagcaggaacagcagcatcaggcctggctccaaagcatcgcggagaaagacaacaacctggttcctattggcaagccagcctcagagcactatgatgacgaggaagaagaggatgatgaagatgatgaggatagtgaagaggactcagaggatgatgaggatatgcaggacatggacgagatgaatgactacaatgagtcaccggatgatggagaggtcaatgagcctcctctccaggtggacatggaaggcaacgaacaggatcaggaccagtggatgatctaggtagacaaggcagggtggcctcagggagattccaggccagcccaaactaccctgcatcccaacccccaacccctgcccacagaaccagctgatggccccagtgcctgaaagtgcccttgggcacctcctcagctgctgccaggatctggtctctttggcccctcccaggccatcagtctgcacttgaaatccccagggcctgaaacctactccaccttcctggccagtacctcaccccttgattgccaggtctggtctaagtttctttaataaagacaaaggagtgattttcca

SEQ ID NO: 107121 - DNA, 812 bp, Homo sapiens
  Payload ID: 1026
  Gene Symbol: ANAPC15
  Gene Name: anaphase promoting complex subunit 15
  Uniprot ID: P60006
  ENST ID: ENST00000542531
  CDS Start-End: 155-520
gcgacggtgggttgggctttcggagccgagatcgctggtctgtcagtacttcttggacatgaggatgaagacactgaggctcagagaggttaagtgactcagccaaggtcaaacagctagtaagtggtggagccaggactcaaagccaggagccatgtccactttgttcccctcactcttccctcgtgtgactgagactctgtggtttaatctggatcgaccctgtgtggaagagacagagctgcagcagcaggaacagcagcatcaggcctggctccaaagcatcgcggagaaagacaacaacctggttcctattggcaagccagcctcagagcactatgatgacgaggaagaagaggatgatgaagatgatgaggatagtgaagaggactcagaggatgatgaggatatgcaggacatggacgagatgaatgactacaatgagtcaccggatgatggagaggtcaatgaggtggacatggaaggcaacgaacaggatcaggaccagtggatgatctaggtagacaaggcagggtggcctcagggagattccaggccagcccaaactaccctgcatcccaacccccaacccctgcccacagaaccagctgatggccccagtgcctgaaagtgcccttgggcacctcctcagctgctgccaggatctggtctctttggcccctcccaggccatcagtctgcacttgaaatccccagggcctgaaacctactccaccttcctggccagtacctcaccccttgattgccaggtctggtctaagtttctttaataaagacaaaggagtgattttc

SEQ ID NO: 107122 - DNA, 580 bp, Homo sapiens
  Payload ID: 1026
  Gene Symbol: ANAPC15
  Gene Name: anaphase promoting complex subunit 15
  ENST ID: ENST00000538117
  CDS Start-End: 92-424
gatgaagacactgaggctcagagaggttaagtgactcagccaaggtcaaacagctagtaagtggtggagccaggactcaaagccaggagccatgtccactttgttcccctcactcttccctcgtgtgactgagactctgtggtttaatctggatcgaccctgtgtggaagagacagagctgcagcagcaggaacagcagcatcaggcctggctccaaagcatcgcggagaaagacaacaacctggttcctattggcaagccagcctcagagcactatgatgacgaggaagaagaggatgatgaagatgatgaggatagtgaagaggactcagaggatgatgaggatatgcaggacatggacgagatgaatgactacaatgagtcaccggatgatggagaggtcaatgagaatggcatgggctgaggatgggaggctttctgaggccgagaactgggaggcccctggagctctcccatccagcttccttcgtgttaagagagaagattaaatctcagagcaagggaagtctggaaggccagtgtggtggaggcggcagcggtagcggccacagctcttagc

SEQ ID NO: 107123 - DNA, 704 bp, Homo sapiens
  Payload ID: 1026
  Gene Symbol: ANAPC15
  Gene Name: anaphase promoting complex subunit 15
  Uniprot ID: P60006
  ENST ID: ENST00000545944
  CDS Start-End: 48-413
gcttccgggtcgccgccggcagcagcctcccggcgcgtctaggagccatgtccactttgttcccctcactcttccctcgtgtgactgagactctgtggtttaatctggatcgaccctgtgtggaagagacagagctgcagcagcaggaacagcagcatcaggcctggctccaaagcatcgcggagaaagacaacaacctggttcctattggcaagccagcctcagagcactatgatgacgaggaagaagaggatgatgaagatgatgaggatagtgaagaggactcagaggatgatgaggatatgcaggacatggacgagatgaatgactacaatgagtcaccggatgatggagaggtcaatgaggtggacatggaaggcaacgaacaggatcaggaccagtggatgatctaggtagacaaggcagggtggcctcagggagattccaggccagcccaaactaccctgcatcccaacccccaacccctgcccacagaaccagctgatggccccagtgcctgaaagtgcccttgggcacctcctcagctgctgccaggatctggtctctttggcccctcccaggccatcagtctgcacttgaaatccccagggcctgaaacctactccaccttcctggccagtacctcaccccttgattgccaggtctggtctaagtttctttaataaagacaaaggagtgatttt

SEQ ID NO: 107124 - DNA, 848 bp, Homo sapiens
  Payload ID: 1026
  Gene Symbol: ANAPC15
  Gene Name: anaphase promoting complex subunit 15
  Uniprot ID: P60006
  ENST ID: ENST00000535234
  CDS Start-End: 191-556
gagcggggaaaacaaaaggagacgaaggacgcatgcgtttggtgagtcccggattctggtgggttcttccgctcaggctgggtgaagcgcttccgggtcgccgccggcagcagcctcccggcgcgatgaagacactgaggctcagagaggttaagtgactcagccaaggtcaaacagctatctaggagccatgtccactttgttcccctcactcttccctcgtgtgactgagactctgtggtttaatctggatcgaccctgtgtggaagagacagagctgcagcagcaggaacagcagcatcaggcctggctccaaagcatcgcggagaaagacaacaacctggttcctattggcaagccagcctcagagcactatgatgacgaggaagaagaggatgatgaagatgatgaggatagtgaagaggactcagaggatgatgaggatatgcaggacatggacgagatgaatgactacaatgagtcaccggatgatggagaggtcaatgaggtggacatggaaggcaacgaacaggatcaggaccagtggatgatctaggtagacaaggcagggtggcctcagggagattccaggccagcccaaactaccctgcatcccaacccccaacccctgcccacagaaccagctgatggccccagtgcctgaaagtgcccttgggcacctcctcagctgctgccaggatctggtctctttggcccctcccaggccatcagtctgcacttgaaatccccagggcctgaaacctactccaccttcctggccagtacctcaccccttgattgccaggtctggtctaagtttctttaataaagacaaaggagtgattttc

SEQ ID NO: 107125 - DNA, 3195 bp, Homo sapiens
  Payload ID: 1027
  Gene Symbol: ANAPC16
  Gene Name: anaphase promoting complex subunit 16
  Uniprot ID: Q96DE5
  ENST ID: ENST00000299381
  CDS Start-End: 119-451
cgaacacgccgcggtcctcgtcgtggtgagcgcagccactcaggctggtcctgggggtggggctgtaggggaaagtgctaaagccgctgagtgaagtaagaactctgctagagaggaaatggctgcttcatcatcatcctcctcagctggtggggtcagtggaagttctgtcactggatctggtttcagtgtctcagaccttgccccaccacggaaagcccttttcacctaccccaaaggagctggagagatgttagaagatggctctgagagattcctctgcgaatctgtttttagctatcaagtggcatccacgcttaaacaggtgaaacatgatcagcaagttgctcggatggaaaaactagctggtttggtagaagagctggaggctgacgagtggcggtttaagcccatcgagcagctgctgggattcaccccctcttcaggttgatactgcctggatggtcacctctggtgcgcagcaagtgcaaagccagtgggggactttctcacagcttacatagccatccagagatccacagctacgtcactgaattgttaatgcacatttgtacttggtttctctgtatctattcacaggcaacaaatacttatatgtgtgatctttcagggaatgttttgtttatttgtttttaaaagtattgggaatcagattaagacaatcagtttcagagaaccaggaggtttggggttaagagatactcaaaaattttcacaagccaagtagggcatatatcagatttggccaactgaatggcgtctgtcctgtcatccatatggtgcctggaaatatttaccagtcaaggtcaaggtcagcatctgtggttaaaaatatagcattctgacctaaaaaagttattttgcagatgaatgtgttttcaactcaggacctatccaaatgaggaatttttaaatattcttttttttttcctatttttagacatcaattctatagattctgactttttctaacctcttatagacatgccaaatgctggcaaaaagaagtgctttttggatatggcagcacttgtaaaaataaagcagtaagcaaaatccttttaaacacagaaatcctgagttcttctcattggtggactcaagcaattctgtagcaaataaatcctttgaaagagctccaaattggtggcattatcctttcaaaatctcagggatttgggatgaagtgaagaggtcaaattactttttagaagaagggaatctaaaaaccatctctcctaaacaaatggtagactggctttacttaagggatatttgtctttataggagtacataaatttatcttaatgatatttaagtagtttttttttttttttgagacgaagttttgctcttgttgcccaggctgtatcgcaatggcgcgatctctgctcactgcaacatccacctcccaggttcaagcaattctcctgcctcagcctcccaagtagctgggattacaggcacccgccaccacacccagctaattttttgtatatttagtagagacggggtttcaccatgttgaccaggctagtctcgaacttctgacctcaggtgatccacctgcctcagcctcccaaattgctgggattacaggcgtgagccaccttgcccagccaatttttttttaaagagacatggtcttgctatgttgcccaggttggtcttgaactcctggcctcaagagatccccccaaccttggcctccaaagtgctgggattacaggcatgagccaccgcgcctggcctcaagtaagtttttataccatgataggggaaaacctggaaggctaagagatgtgctgttttccttcatgggaccccactttccacagtaaacaactggtataatcatttattacgttgtatgcaaattttgccttagacaacatttgtctggttccttattaataacttgcatctgatctgcttagagttgcttaattataagtaaatataatcccagtagcatttagccttaatctcaagagttcaaaatgtttaacacattctacctgacgggaggtggtgacctcattcagtcggttaagagcctgagccctgtgaagttaaacacctgctcatggtcacatagcccaggcagaagaaaatctcggacttggaatagatcccagttgcctgataattcatctcattattgcctctaaagcaaattggagactgggcacagtggctcccacctttaatcccagcacctggggaggctgaggtgagtggatcactagaggtcaggagttcaagaccagtctggccgacatggtgaaactcagtctctattgaaaatacaaaaattagctcagtgtggtggcacacacttgtaatcccagctactcaggaggctgaggcatgagaatcgcttaaacccaggaggcggaggttgcagtgagctgagatcacaccattgcactctagtctgggtgacagagcgagactctgtctcaaaaaaaaaaaaataaagccgggcgtggtggctcacgcctgtaatcccggcactttgggaggctgaggcaggcggattgcctgagatcgggagttcgagaccagcctggccaacatggtgaaaccttgtctctactaaaactacaaaaaaaattagccaggcgtggtggcgggcgcctgtaatcccagctactcaggaggctgaggcagcagaatcgtttgaacccgggaggcggaggttgcagtgagtggagatcgtgcctgtgtgctccagcctgagcaacaagagcgaaactgtctcaaaaaaaagaagaaaataaataaataaaaatcagagcacaagaagtaccagtccaccaactcacattttctatattaataattcttaactaaaagaagttccatattcgacagcattttagttttttaatagtacttattagcatcaaccatcttgataatcaccaagggaaaaattaaaaatacctagactgcaataaacctttaaattggattttcagtgagaatttagaagcaatcactacctttctcgtttcatttgtgtaaccatgcagcataggcactgtgttacatcatctttacgctttggtatttgaacttattacagaattttttctctaaattggatgtttctttatatgaccttggaaactgaagtgatcttagcattaaacaaaaatgctttttgaa

SEQ ID NO: 107126 - DNA, 3567 bp, Homo sapiens
  Payload ID: 1027
  Gene Symbol: ANAPC16
  Gene Name: anaphase promoting complex subunit 16
  Uniprot ID: Q96DE5
  ENST ID: ENST00000621663
  CDS Start-End: 493-825
acgggcgcgcgcacgccgccttcgccgctggctccgtctgttggggggcgaacacgccgcggtcctcgtcgtggtgagcgcagccactcaggctggtcctgggggtggggctgtaggggaaagtgctaaagccgctgaggtgcagtggctcacgcctgtaatcccagcactttgggaggccaaggcaggtggatcacctgaggtcgggagttcaagaccagcctgaccaacatggagaaaccccatctctactagaaatacaaaattagccaggcatggtggtgcatgcctgtaatcccagctactcgggaggctgaagcaggagaatcgcttaaatccgggaggcagaggttgctgtgagccgagatcgcgccatttccagcctgggcaacaagagggaaactccgtctcaaaaaaaaaaaaaaaaaagaagagaaaagaaaacataagtttcagccaggcatgtgaagtaagaactctgctagagaggaaatggctgcttcatcatcatcctcctcagctggtggggtcagtggaagttctgtcactggatctggtttcagtgtctcagaccttgccccaccacggaaagcccttttcacctaccccaaaggagctggagagatgttagaagatggctctgagagattcctctgcgaatctgtttttagctatcaagtggcatccacgcttaaacaggtgaaacatgatcagcaagttgctcggatggaaaaactagctggtttggtagaagagctggaggctgacgagtggcggtttaagcccatcgagcagctgctgggattcaccccctcttcaggttgatactgcctggatggtcacctctggtgcgcagcaagtgcaaagccagtgggggactttctcacagcttacatagccatccagagatccacagctacgtcactgaattgttaatgcacatttgtacttggtttctctgtatctattcacaggcaacaaatacttatatgtgtgatctttcagggaatgttttgtttatttgtttttaaaagtattgggaatcagattaagacaatcagtttcagagaaccaggaggtttggggttaagagatactcaaaaattttcacaagccaagtagggcatatatcagatttggccaactgaatggcgtctgtcctgtcatccatatggtgcctggaaatatttaccagtcaaggtcaaggtcagcatctgtggttaaaaatatagcattctgacctaaaaaagttattttgcagatgaatgtgttttcaactcaggacctatccaaatgaggaatttttaaatattcttttttttttcctatttttagacatcaattctatagattctgactttttctaacctcttatagacatgccaaatgctggcaaaaagaagtgctttttggatatggcagcacttgtaaaaataaagcagtaagcaaaatccttttaaacacagaaatcctgagttcttctcattggtggactcaagcaattctgtagcaaataaatcctttgaaagagctccaaattggtggcattatcctttcaaaatctcagggatttgggatgaagtgaagaggtcaaattactttttagaagaagggaatctaaaaaccatctctcctaaacaaatggtagactggctttacttaagggatatttgtctttataggagtacataaatttatcttaatgatatttaagtagtttttttttttttttgagacgaagttttgctcttgttgcccaggctgtatcgcaatggcgcgatctctgctcactgcaacatccacctcccaggttcaagcaattctcctgcctcagcctcccaagtagctgggattacaggcacccgccaccacacccagctaattttttgtatatttagtagagacggggtttcaccatgttgaccaggctagtctcgaacttctgacctcaggtgatccacctgcctcagcctcccaaattgctgggattacaggcgtgagccaccttgcccagccaatttttttttaaagagacatggtcttgctatgttgcccaggttggtcttgaactcctggcctcaagagatccccccaaccttggcctccaaagtgctgggattacaggcatgagccaccgcgcctggcctcaagtaagtttttataccatgataggggaaaacctggaaggctaagagatgtgctgttttccttcatgggaccccactttccacagtaaacaactggtataatcatttattacgttgtatgcaaattttgccttagacaacatttgtctggttccttattaataacttgcatctgatctgcttagagttgcttaattataagtaaatataatcccagtagcatttagccttaatctcaagagttcaaaatgtttaacacattctacctgacgggaggtggtgacctcattcagtcggttaagagcctgagccctgtgaagttaaacacctgctcatggtcacatagcccaggcagaagaaaatctcggacttggaatagatcccagttgcctgataattcatctcattattgcctctaaagcaaattggagactgggcacagtggctcccacctttaatcccagcacctggggaggctgaggtgagtggatcactagaggtcaggagttcaagaccagtctggccgacatggtgaaactcagtctctattgaaaatacaaaaattagctcagtgtggtggcacacacttgtaatcccagctactcaggaggctgaggcatgagaatcgcttaaacccaggaggcggaggttgcagtgagctgagatcacaccattgcactctagtctgggtgacagagcgagactctgtctcaaaaaaaaaaaaataaagccgggcgtggtggctcacgcctgtaatcccggcactttgggaggctgaggcaggcggattgcctgagatcgggagttcgagaccagcctggccaacatggtgaaaccttgtctctactaaaactacaaaaaaaattagccaggcgtggtggcgggcgcctgtaatcccagctactcaggaggctgaggcagcagaatcgtttgaacccgggaggcggaggttgcagtgagtggagatcgtgcctgtgtgctccagcctgagcaacaagagcgaaactgtctcaaaaaaaagaagaaaataaataaataaaaatcagagcacaagaagtaccagtccaccaactcacattttctatattaataattcttaactaaaagaagttccatattcgacagcattttagttttttaatagtacttattagcatcaaccatcttgataatcaccaagggaaaaattaaaaatacctagactgcaataaacctttaaattggattttcagtgagaatttagaagcaatcactacctttctcgtttcatttgtgtaaccatgcagcataggcactgtgttacatcatctttacgctttggtatttgaacttattacagaattttttctctaaattggatgtttctttatatgaccttggaaactgaagtgatcttagcattaaacaaaaatgctttttg

SEQ ID NO: 107127 - DNA, 3100 bp, Homo sapiens
  Payload ID: 1027
  Gene Symbol: ANAPC16
  Gene Name: anaphase promoting complex subunit 16
  ENST ID: ENST00000615507
  CDS Start-End: 101-358
acgggcgcgcgcacgccgccttcgccgctggctccgtctgttggggggcgaacacgccgcggtcctcgtcgtgtgaagtaagaactctgctagagaggaaatggctgcttcatcatcatcctcctcagctggtggggtcagtggaagttctgtcactggatctggtttcagtgtctcagaccttgccccaccacggaaagcccttttcacctaccccaaaggagctggagagatgttagaagatcagcaagttgctcggatggaaaaactagctggtttggtagaagagctggaggctgacgagtggcggtttaagcccatcgagcagctgctgggattcaccccctcttcaggttgatactgcctggatggtcacctctggtgcgcagcaagtgcaaagccagtgggggactttctcacagcttacatagccatccagagatccacagctacgtcactgaattgttaatgcacatttgtacttggtttctctgtatctattcacaggcaacaaatacttatatgtgtgatctttcagggaatgttttgtttatttgtttttaaaagtattgggaatcagattaagacaatcagtttcagagaaccaggaggtttggggttaagagatactcaaaaattttcacaagccaagtagggcatatatcagatttggccaactgaatggcgtctgtcctgtcatccatatggtgcctggaaatatttaccagtcaaggtcaaggtcagcatctgtggttaaaaatatagcattctgacctaaaaaagttattttgcagatgaatgtgttttcaactcaggacctatccaaatgaggaatttttaaatattcttttttttttcctatttttagacatcaattctatagattctgactttttctaacctcttatagacatgccaaatgctggcaaaaagaagtgctttttggatatggcagcacttgtaaaaataaagcagtaagcaaaatccttttaaacacagaaatcctgagttcttctcattggtggactcaagcaattctgtagcaaataaatcctttgaaagagctccaaattggtggcattatcctttcaaaatctcagggatttgggatgaagtgaagaggtcaaattactttttagaagaagggaatctaaaaaccatctctcctaaacaaatggtagactggctttacttaagggatatttgtctttataggagtacataaatttatcttaatgatatttaagtagtttttttttttttttgagacgaagttttgctcttgttgcccaggctgtatcgcaatggcgcgatctctgctcactgcaacatccacctcccaggttcaagcaattctcctgcctcagcctcccaagtagctgggattacaggcacccgccaccacacccagctaattttttgtatatttagtagagacggggtttcaccatgttgaccaggctagtctcgaacttctgacctcaggtgatccacctgcctcagcctcccaaattgctgggattacaggcgtgagccaccttgcccagccaatttttttttaaagagacatggtcttgctatgttgcccaggttggtcttgaactcctggcctcaagagatccccccaaccttggcctccaaagtgctgggattacaggcatgagccaccgcgcctggcctcaagtaagtttttataccatgataggggaaaacctggaaggctaagagatgtgctgttttccttcatgggaccccactttccacagtaaacaactggtataatcatttattacgttgtatgcaaattttgccttagacaacatttgtctggttccttattaataacttgcatctgatctgcttagagttgcttaattataagtaaatataatcccagtagcatttagccttaatctcaagagttcaaaatgtttaacacattctacctgacgggaggtggtgacctcattcagtcggttaagagcctgagccctgtgaagttaaacacctgctcatggtcacatagcccaggcagaagaaaatctcggacttggaatagatcccagttgcctgataattcatctcattattgcctctaaagcaaattggagactgggcacagtggctcccacctttaatcccagcacctggggaggctgaggtgagtggatcactagaggtcaggagttcaagaccagtctggccgacatggtgaaactcagtctctattgaaaatacaaaaattagctcagtgtggtggcacacacttgtaatcccagctactcaggaggctgaggcatgagaatcgcttaaacccaggaggcggaggttgcagtgagctgagatcacaccattgcactctagtctgggtgacagagcgagactctgtctcaaaaaaaaaaaaataaagccgggcgtggtggctcacgcctgtaatcccggcactttgggaggctgaggcaggcggattgcctgagatcgggagttcgagaccagcctggccaacatggtgaaaccttgtctctactaaaactacaaaaaaaattagccaggcgtggtggcgggcgcctgtaatcccagctactcaggaggctgaggcagcagaatcgtttgaacccgggaggcggaggttgcagtgagtggagatcgtgcctgtgtgctccagcctgagcaacaagagcgaaactgtctcaaaaaaaagaagaaaataaataaataaaaatcagagcacaagaagtaccagtccaccaactcacattttctatattaataattcttaactaaaagaagttccatattcgacagcattttagttttttaatagtacttattagcatcaaccatcttgataatcaccaagggaaaaattaaaaatacctagactgcaataaacctttaaattggattttcagtgagaatttagaagcaatcactacctttctcgtttcatttgtgtaaccatgcagcataggcactgtgttacatcatctttacgctttggtatttgaacttattacagaattttttctctaaattggatgtttctttatatgaccttggaaactgaagtgatcttagcattaaacaaaaatgctttttg

SEQ ID NO: 107128 - DNA, 2632 bp, Homo sapiens
  Payload ID: 1028
  Gene Symbol: ANAPC2
  Gene Name: anaphase promoting complex subunit 2
  Uniprot ID: Q9UJX6
  ENST ID: ENST00000323927
  CDS Start-End: 6-2474
tgcagatggcggcggcagttgtggtggcggagggggacagcgactcccggcccggacaggagttgttagtggcctggaacaccgtgagcaccggcctggtgccgccggctgcgctggggctggtgtcttcccggaccagcggtgcagtcccgccaaaggaagaggagctccgggcggcggtggaggttctgaggggccacgggctacactcggtcctggaggagtggttcgtggaggtgctgcagaacgatctgcaggccaacatctcccctgagttctggaatgccatctcccaatgcgagaactctgcggatgagccccagtgccttttgctactccttgacgcttttggcctgctggagagccgcctggatccctacctgcgtagcctagagctgctggagaaatggactcgcctgggcttgctgatgggcactggtgctcaggggctgcgagaagaagtccacactatgttgcgcggagtcttgttctttagcacccccagaaccttccaagagatgatccagcgtctgtatgggtgcttcttgagagtctatatgcagagtaagaggaagggggaagggggcacagacccggaactggaaggggagctggacagccggtatgcccgtcgccggtactaccggctcctgcagagcccgctgtgtgcagggtgcagcagtgacaagcaacagtgctggtgtcgccaggctctggagcagttccatcagctcagccaggtcttacacaggctcagtctgctggagcgggtcagtgccgaggctgtgaccaccaccctgcaccaggtgacccgggagaggatggaggaccgttgccggggcgagtacgagcgctccttcctgcgtgagttccacaagtggatcgagcgggtggtcggctggctcggcaaggtgttcctgcaggacggccccgccaggcccgcatctcccgaggccggcaacaccctgcgccgctggcgctgccacgtgcaaaggttcttctaccgcatctacgccagcctgcgcatcgaggagctcttcagcatcgtccgagacttcccagactcccggccagccatcgaggacctcaagtactgcctggagaggacggaccagaggcagcagctgctcgtgtccctcaaggctgccctggagactcggctcctgcatccaggcgtcaacacgtgtgacatcatcaccctctatatctctgccatcaaggcgctgcgcgtgctggacccttccatggtcatcctggaggtggcctgtgagcctatccgccgctacctgaggacgcgggaggacacagtgcggcagattgtggctgggctgacgggggactcggacgggacaggggacctggctgttgagctgtccaagaccgacccggcgagcctggagacaggccaggacagtgaggatgactcaggcgagccagaggactgggtcccggaccctgtggatgccgatccagggaagtcgagctccaagcggcgttcatcggacatcatcagcctgctggtcagcatctacggcagcaaggacctcttcatcaatgagtaccgctcgctgctggccgaccgcctgctgcaccagttcagcttcagccccgagcgggagatccgcaacgtggagctgctgaagctgcgctttggcgaggccccaatgcacttctgtgaagtcatgctgaaggacatggcggactcccgccgcatcaatgccaacatccgggaggaggatgagaagcggccagcagaggagcagccaccgttcggggtctacgctgtcatcctgtccagtgagttctggccgcccttcaaggacgagaagctggaggtccccgaggatatcagggcagccctggaggcttactgcaagaagtatgagcagctcaaggccatgcggaccctcagttggaagcacaccctgggcctggtgaccatggacgtggagctggccgaccgcacgctgtctgtggcggtcaccccagtacaggcggtgatcttgctgtattttcaggaccaagccagctggaccctggaggaactgagcaaggcggtgaagatgcccgtggcgctgctgcggcggcggatgtccgtgtggctgcagcagggtgtgctgcgtgaggagccccccggcaccttctctgtcattgaggaggagcggcctcaggaccgggacaacatggtgctcattgacagtgacgacgagagcgactccggcatggcctcccaggccgaccagaaggaggaggagctgctgctcttctggacgtacatccaggccatgctgaccaacctggagagcctctcactggatcgtatctacaacatgctccgcatgtttgtggtgactgggcctgcactggccgagattgacctgcaggagctgcagggctacctgcagaagaaggtgcgggaccagcagctcgtctactcggccggcgtctaccgcctgcccaagaactgcagctgacacatcgcccgcccgcccgcccgcccgccaggcgctgccctgcaggtgctctcgtcctcccgtgccagcccccgcccgcccgtgtcccagaatgcactgctgaggagcatgcccacccccacccccgcagtgtgcagattaaagcaagtcagatcatc

SEQ ID NO: 107129 - DNA, 2685 bp, Homo sapiens
  Payload ID: 1029
  Gene Symbol: ANAPC4
  Gene Name: anaphase promoting complex subunit 4
  Uniprot ID: Q9UJX5
  ENST ID: ENST00000315368
  CDS Start-End: 143-2569
cccgacgccggaagtgcctggagcgcgcgacagcggcggggcggggcggcctggaggctgtggcgcgcggccggcagagggaggggagaggccactggggccgtgttagtctgccggtggggactcttgcagggccgtccccatgttgcgttttccgacctgtttcccatccttccgggtggtgggagagaagcagctcccgcaggagattattttcctggtctggtcgcccaagcgggatctcattgctttggccaacacagctggcgaggttttacttcatcgactggcaagttttcatcgagtttggagttttccaccaaatgaaaatacaggaaaggaggtgacgtgtctggcatggagaccagatggcaaacttttggcctttgctcttgctgataccaagaaaattgttttgtgtgatgtagaaaaacctgagagcttacactctttttctgtggaggctccagtttcctgtatgcattggatggaagtgacagtagaaagcagtgttctcacatcattttataatgctgaggatgaatcaaatcttctcttacctaaactacctacactgccaaaaaactatagcaacacctcaaaaatatttagtgaagaaaattctgatgaaattattaagctcttgggagacgtcaggcttaatattctcgtccttggaggaagctctggatttattgagctttatgcttatggaatgtttaaaattgctcgagtcacagggattgctggtacttgtcttgcattatgtttatcaagtgatttgaaatcattatcagtggtcacagaagtctctaccaatggtgcttcagaagtttcatactttcagcttgaaactaatctgttgtactctttcttacctgaagtaactcggatggccagaaagtttactcatatttcagctctgttacagtatataaatttgtcactaacatgtatgtgtgaagcatgggaagaaatactaatgcagatggattctcgtctcaccaagtttgtgcaggaaaagaacacaaccacatcagtgcaagatgagttcatgcacttgctattatgggggaaagcaagtgctgaacttcagactctcttgatgaatcagttaacagtaaagggcttgaaaaagcttggccagtctatagagtcatcatactccagtatacaaaaattggtcataagtcatttacagagtggctcggagtctttattataccatttgagtgaattgaaaggaatggcttcatggaagcaaaaatatgaacctcttggactagatgctgcaggaatcgaagaagctataactgctgtgggttcttttatactcaaggcaaatgaacttcttcaagttatagatagtagtatgaaaaacttcaaagcattttttcggtggctttatgtggcaatgttgagaatgacagaagaccatgtgcttcccgagctgaataagatgactcagaaagatatcacatttgttgctgaatttcttactgaacatttcaatgaggctccagacctttataatcgaaaaggaaaatactttaacgttgaaagagttggtcagtacttgaaagatgaagatgatgatcttgtgtcaccccctaacacagaaggaaaccagtggtatgactttcttcaaaatagcagccaccttaaagaaagtcctttgctgtttccttattatcctcgaaaatcattgcattttgtgaaaaggcggatggagaatattattgatcagtgtttgcaaaagccagcagatgtaattggaaaatcgatgaatcaagcaatctgtattccattgtatagagataccagaagtgaggattctacacgtagattgttcaaatttccttttctgtggaataataaaacttcaaatctacattatcttctttttactattctagaagattcactttataaaatgtgcatcttaaggagacatactgatatttctcaatctgtgagtaatggactaattgctattaaatttgggagctttacatatgccacaacagaaaaagtcagaagaagcatctacagttgtttagatgcacagttttatgatgatgaaactgtaacagtagttcttaaagacactgtaggacgtgaaggaagagatagactcttggtccagctgcctttgtctttagtatataacagtgaagattctgcagaatatcagttcactgggacttattctacaaggctagatgaacagtgtagtgctattcccacccgtaccatgcattttgagaagcactggagattactggaaagtatgaaagcacagtatgttgctgggaatggttttcgaaaagtgtcctgtgtgttaagctcaaatcttcgtcatgtgagagtatttgaaatggacatagatgatgaatgggagctcgatgagtcttcagatgaagaggaggaggccagtaataagcctgtaaaaataaaggaagaagtgttgtcggagtcagaggcagagaaccaacaagctggtgctgccgctttagctccagagatagtcattaaagtggaaaaacttgaccctgagctagactcctaatctagcttgccattattgtgtgtgtaattatggccaaaaggacataggagatggactaagatgtcttggaccacctttgtgtaacaaagaaataaacagtaaattttattttttca

SEQ ID NO: 107130 - DNA, 595 bp, Homo sapiens
  Payload ID: 1029
  Gene Symbol: ANAPC4
  Gene Name: anaphase promoting complex subunit 4
  ENST ID: ENST00000505991
  CDS Start-End: 109-595
agtctgccggtggggactcttgcaggtacaggcgcggtcggggctcctcgtggagagccgggggctcctgccggcctctgactggggtgtcgttgcagggccgtccccatgttgcgttttccgacctgtttcccatccttccgggtggtgggagagaagcagctcccgcaggagattattttcctggtctggtcgcccaagcgggatctcattgctttggccaacacagctggcgaggttttacttcatcgactggcaagttttcatcgagtttggagttttccaccaaatgaaaatacaggaaaggaggtgacgtgtctggcatggagaccagatggcaaacttttggcctttgctcttgctgataccaagaaaattgttttgtgtgatgtagaaaaacctgagagcttacactctttttctgtggaggctccagtttcctgtatgcattggatggaagtgacagtagaaagcagtgttctcacatcattttataatgctgaggatgaatcaaatcttctcttacctaaactacctacactgccaaaaaactatagcaacacctcaaaaatatttagtgaagaaaattctgatg

SEQ ID NO: 107131 - DNA, 569 bp, Homo sapiens
  Payload ID: 1029
  Gene Symbol: ANAPC4
  Gene Name: anaphase promoting complex subunit 4
  ENST ID: ENST00000505080
  CDS Start-End: 41-292
gtgttagtctgccggtggggactcttgcagggccgtccccatgttgcgttttccgacctgtttcccatccttccgggtggtgggagagaagcagctcccgcaggagattattttcctggtctggtcgcccaagcgggatctcattgctttggccaacacagctggcgaggttttacttcatcgactggcaagttttcatcgagtttggagttttccaccaaatgaaaatacaggaaaggagttttggcctttgctcttgctgataccaagaaaattgttttgtgtgatgtagaaaaacctgagagcttacactctttttctgtggaggctccagtttcctgtatgcattggatggaagtgacagtagaaagcagtgttctcacatcattttataatgctgaggatgaatcaaatcttctcttacctaaactacctacactgccaaaaaactatagcaacacctcaaaaatatttagtgaagaaaattctgatgaaattattaagctcttgggagacgtcaggcttaatattctcgtccttggaggaagctctggatttattgagcttta

SEQ ID NO: 107132 - DNA, 2599 bp, Homo sapiens
  Payload ID: 1029
  Gene Symbol: ANAPC4
  Gene Name: anaphase promoting complex subunit 4
  Uniprot ID: Q9UJX5
  ENST ID: ENST00000510092
  CDS Start-End: 63-2492
gaggggagaggccactggggccgtgttagtctgccggtggggactcttgcagggccgtccccatgttgcgttttccgacctgtttcccatccttccgggtggtgggagagaagcagctcccgcaggagattattttcctggtctggtcgcccaagcgggatctcattgctttggccaacacagctggcgaggttttacttcatcgactggcaagttttcatcgagtttggagttttccaccaaatgaaaatacaggaaaggaggtgacgtgtctggcatggagaccagatggcaaacttttggcctttgctcttgctgataccaagaaaattgttttgtgtgatgtagaaaaacctgagagcttacactctttttctgtggaggctccagtttcctgtatgcattggatggaagtgacagtagaaagcagtgttctcacatcattttataatgctgaggatgaatcaaatcttctcttacctaaactacctacactgccaaaaaactatagcaacacctcaaaaatatttagtgaagaaaattctgatgaaattattaagctcttgggagacgtcaggcttaatattctcgtccttggaggaagctctggatttattgagctttatgcttatggaatgtttaaaattgctcgagtcacagggattgctggtacttgtcttgcattatgtttatcaagtgatttgaaatcattatcagtggtcacagaagtctctaccaatggtgcttcagaagtttcatactttcagcttgaaactaatctgttgtactctttcttacctgaagtaactcggatggccagaaagtttactcatatttcagctctgttacagtatataaatttgtcactaacatgtatgtgtgaagcatgggaagaaatactaatgcagatggattctcgtctcaccaagtttgtgcaggaaaagaacacaaccacatcagtgcaagatgagttcatgcacttgctattatgggggaaagcaagtgctgaacttcagactctcttgatgaatcagttaacagtaaagggcttgaaaaagcttggccagtctatagagtcatcatactccagtatacaaaaattggtcataagtcatttacagagtggctcggagtctttattataccatttgagtgaattgaaaggaatggcttcatggaagcaaaaatatgaacctcttggactagatgctgcaggaatcgaagaagctataactgctgtgggttcttttatactcaaggcaaatgaacttcttcaagttatagatagtagtatgaaaaacttcaaagcattttttcggtggctttatgtggcaatgttgagaatgacagaagaccatgtgcttcccgagctgaataaggtaatgactcagaaagatatcacatttgttgctgaatttcttactgaacatttcaatgaggctccagacctttataatcgaaaaggaaaatactttaacgttgaaagagttggtcagtacttgaaagatgaagatgatgatcttgtgtcaccccctaacacagaaggaaaccagtggtatgactttcttcaaaatagcagccaccttaaagaaagtcctttgctgtttccttattatcctcgaaaatcattgcattttgtgaaaaggcggatggagaatattattgatcagtgtttgcaaaagccagcagatgtaattggaaaatcgatgaatcaagcaatctgtattccattgtatagagataccagaagtgaggattctacacgtagattgttcaaatttccttttctgtggaataataaaacttcaaatctacattatcttctttttactattctagaagattcactttataaaatgtgcatcttaaggagacatactgatatttctcaatctgtgagtaatggactaattgctattaaatttgggagctttacatatgccacaacagaaaaagtcagaagaagcatctacagttgtttagatgcacagttttatgatgatgaaactgtaacagtagttcttaaagacactgtaggacgtgaaggaagagatagactcttggtccagctgcctttgtctttagtatataacagtgaagattctgcagaatatcagttcactgggacttattctacaaggctagatgaacagtgtagtgctattcccacccgtaccatgcattttgagaagcactggagattactggaaagtatgaaagcacagtatgttgctgggaatggttttcgaaaagtgtcctgtgtgttaagctcaaatcttcgtcatgtgagagtatttgaaatggacatagatgatgaatgggagctcgatgagtcttcagatgaagaggaggaggccagtaataagcctgtaaaaataaaggaagaagtgttgtcggagtcagaggcagagaaccaacaagctggtgctgccgctttagctccagagatagtcattaaagtggaaaaacttgaccctgagctagactcctaatctagcttgccattattgtgtgtgtaattatggccaaaaggacataggagatggactaagatgtcttggaccacctttgtgtaacaaagaaataaacagtaaatttt

SEQ ID NO: 107133 - DNA, 2513 bp, Homo sapiens
  Payload ID: 1030
  Gene Symbol: ANAPC5
  Gene Name: anaphase promoting complex subunit 5
  Uniprot ID: Q9UJX4
  ENST ID: ENST00000261819
  CDS Start-End: 123-2390
gcggatgtctgtttcctgggatattgtgagggcgggcggagatgtagacccggtagtgttgtgccttgtggtgacaactggcggcagcgcgccgcgggcccgagacttagtctcgggccgccatggccagcgtccacgagagcctctacttcaatcccatgatgaccaatggggttgtgcacgccaatgtgttcggcatcaaggactgggtgacgccgtacaagatcgcggtgctggtgctgctgaacgagatgagccgcacaggcgagggcgccgtcagcctcatggagcggcggaggctcaaccagctgctcctgcccctgctgcagggcccagatattacactgtcaaaactttacaagttaattgaagagtcttgtccacagctggcaaattcagtgcagatcagaatcaaactgatggctgaaggcgagttgaaggatatggaacagttttttgatgacctttcagattctttctctggaactgaaccagaggttcacaaaacaagtgtagtaggtttgtttctgcgtcacatgatcttggcctacagtaagctttctttcagccaagtgtttaaactgtacactgcccttcagcagtacttccagaatggtgagaaaaagacagtggaggatgctgatatggaactgaccagtagagatgagggtgaaagaaaaatggaaaaagaagaacttgatgtatctgtaagagaagaggaggtatcttgcagtgggcctctgtcccaaaaacaagcagaattttttctttctcaacaggcttctttgctaaagaatgatgagactaaggccctcactccagcttccttgcagaaggaattaaacaatttgttgaaatttaatcctgattttgctgaagcgcattatctcagctacttaaacaacctccgtgtccaagatgttttcagttcaacacacagtctcctccattattttgatcgtctgattcttaccggagccgaaagcaaaagtaatggggaagagggctatggccggagcttgagatacgccgctctgaatcttgccgccctgcactgccgcttcggtcactatcaacaggcagagctcgccctgcaggaggcaattaggattgcccaggagtccaacgatcacgtgtgtctccagcactgtttgagctggctttatgtgctggggcagaagagatccgatagctatgttctgctggagcattctgtgaagaaggcagtacattttgggttaccgtacctcgcctccctgggaatacagtcccttgttcaacagagagcttttgctgggaagacggcaaacaagctgatggatgccctaaaggactccgacctcctgcactggaaacacagcctgtcagagctcatcgatatcagcatcgcacagaaaacggccatctggaggctgtatggccgcagcaccatggcactgcaacaggcccagatgttgctgagcatgaacagcctggaggcggtgaatgcgggcgtgcagcagaacaacacagagtcctttgctgtcgcactctgccacctcgcagagctacacgcggagcagggctgttttgctgcagcttctgaagtgttaaagcacttgaaggaacgatttccgcctaatagtcagcacgcccagttatggatgctatgtgatcaaaaaatacagtttgacagagcaatgaatgatggcaaatatcatttggctgattcacttgttacaggaatcacagctctcaatagcatagagggtgtttataggaaagcggttgtattacaagctcagaaccaaatgtcagaggcacataagcttttacaaaaattgttggttcattgtcagaaactgaagaacacagaaatggtgatcagtgtcctactgtccgtggcagagctgtactggcgatcttcctcccctaccatcgcgctgcccatgctcctgcaggctctggccctctccaaggagtaccggttacagtacttggcctctgaaacagtgctgaacttggcttttgcgcagctcattcttggaatcccagaacaggccttaagtcttctccacatggccatcgagcccatcttggctgacggggctatcctggacaaaggtcgtgccatgttcttagtggccaagtgccaggtggcttcagcagcttcctacgatcagccgaagaaagcagaagctctggaggctgccatcgagaacctcaatgaagccaagaactattttgcaaaggttgactgcaaagagcgcatcagggacgtcgtttacttccaggccagactctaccataccctggggaagacccaggagaggaaccggtgtgcgatgctcttccggcagctgcatcaggagctgccctctcatggggtacccttgataaaccatctctagagaggacatccctgctgggctgctgtgcagagtataagattttggacttgttcatgtcccctctctccctataaatgatgtatttgtgacaccctatcttgtcaataaacagcattctgatta

SEQ ID NO: 107134 - DNA, 2147 bp, Homo sapiens
  Payload ID: 1030
  Gene Symbol: ANAPC5
  Gene Name: anaphase promoting complex subunit 5
  Uniprot ID: Q9UJX4
  ENST ID: ENST00000441917
  CDS Start-End: 93-2024
agggcccagatattacactgtcaaaactttacaagttaattgaagagtcttgtccacagctggcaaattcagtgcagatcagaatcaaactgatggctgaaggcgagttgaaggatatggaacagttttttgatgacctttcagattctttctctggaactgaaccagaggttcacaaaacaagtgtagtaggtttgtttctgcgtcacatgatcttggcctacagtaagctttctttcagccaagtgtttaaactgtacactgcccttcagcagtacttccagaatggtgagaaaaagacagtggaggatgctgatatggaactgaccagtagagatgagggtgaaagaaaaatggaaaaagaagaacttgatgtatctgtaagagaagaggaggtatcttgcagtgggcctctgtcccaaaaacaagcagaattttttctttctcaacaggcttctttgctaaagaatgatgagactaaggccctcactccagcttccttgcagaaggaattaaacaatttgttgaaatttaatcctgattttgctgaagcgcattatctcagctacttaaacaacctccgtgtccaagatgttttcagttcaacacacagtctcctccattattttgatcgtctgattcttaccggagccgaaagcaaaagtaatggggaagagggctatggccggagcttgagatacgccgctctgaatcttgccgccctgcactgccgcttcggtcactatcaacaggcagagctcgccctgcaggaggcaattaggattgcccaggagtccaacgatcacgtgtgtctccagcactgtttgagctggctttatgtgctggggcagaagagatccgatagctatgttctgctggagcattctgtgaagaaggcagtacattttgggttaccgagagcttttgctgggaagacggcaaacaagctgatggatgccctaaaggactccgacctcctgcactggaaacacagcctgtcagagctcatcgatatcagcatcgcacagaaaacggccatctggaggctgtatggccgcagcaccatggcactgcaacaggcccagatgttgctgagcatgaacagcctggaggcggtgaatgcgggcgtgcagcagaacaacacagagtcctttgctgtcgcactctgccacctcgcagagctacacgcggagcagggctgttttgctgcagcttctgaagtgttaaagcacttgaaggaacgatttccgcctaatagtcagcacgcccagttatggatgctatgtgatcaaaaaatacagtttgacagagcaatgaatgatggcaaatatcatttggctgattcacttgttacaggaatcacagctctcaatagcatagagggtgtttataggaaagcggttgtattacaagctcagaaccaaatgtcagaggcacataagcttttacaaaaattgttggttcattgtcagaaactgaagaacacagaaatggtgatcagtgtcctactgtccgtggcagagctgtactggcgatcttcctcccctaccatcgcgctgcccatgctcctgcaggctctggccctctccaaggagtaccggttacagtacttggcctctgaaacagtgctgaacttggcttttgcgcagctcattcttggaatcccagaacaggccttaagtcttctccacatggccatcgagcccatcttggctgacggggctatcctggacaaaggtcgtgccatgttcttagtggccaagtgccaggtggcttcagcagcttcctacgatcagccgaagaaagcagaagctctggaggctgccatcgagaacctcaatgaagccaagaactattttgcaaaggttgactgcaaagagcgcatcagggacgtcgtttacttccaggccagactctaccataccctggggaagacccaggagaggaaccggtgtgcgatgctcttccggcagctgcatcaggagctgccctctcatggggtacccttgataaaccatctctagagaggacatccctgctgggctgctgtgcagagtataagattttggacttgttcatgtcccctctctccctataaatgatgtatttgtgacaccctatcttgtcaataaacagcattctgatta

SEQ ID NO: 107135 - DNA, 1715 bp, Homo sapiens
  Payload ID: 1030
  Gene Symbol: ANAPC5
  Gene Name: anaphase promoting complex subunit 5
  ENST ID: ENST00000539079
  CDS Start-End: 1-1189
ggcttctttgctaaagaatgatgagactaaggccctcactccagcttccttgcagaaggaattaaacaatttgttgaaatttaatcctgattttgctgaagcgcattatctcagctacttaaacaacctccgtgtccaagatgttttcagttcaacacacagtctcctccattattttgatcgtctgattcttaccggagccgaaagcaaaagtaatggggaagagggctatggccggagcttgagatacgccgctctgaatcttgccgccctgcactgccgcttcggtcactatcaacaggcagagctcgccctgcaggaggcaattaggattgcccaggagtccaacgatcacgtgtgtctccagcactgtttgagctggctttatgtgctggggcagaagagatccgatagctatgttctgctggagcattctgtgaagaaggcagtacattttgggttaccgtacctcgcctccctgggaatacagtcccttgttcaacagagagcttttgctgggaagacggcaaacaagctgatggatgccctaaaggactccgacctcctgcactggaaacacagcctgtcagagctcatcgatatcagcatcgcacagaaaacggccatctggaggctgtatggccgcagcaccatggcactgcaacaggcccagatgttgctgagcatgaacagcctggaggcggtgaatgcgggcgtgcagcagaacaacacagagtcctttgctgtcgcactctgccacctcgcagagctacacgcggagcagggctgttttgctgcagcttctgaagtgttaaagcacttgaaggaacgatttccgcctaatagtcagcacgcccagttatggatgctatgtgatcaaaaaatacagtttgacagagcaatgaatgatggcaaatatcatttggctgattcacttgttacaggaatcacagctctcaatagcatagagggtgtttataggaaagcggttgtattacaagctcagaaccaaatgtcagaggcacataagcttttacaaaaattgttggttcattgtcagaaactgaagaacacagaaatggtgatcagagctgtactggcgatcttcctcccctaccatcgcgctgcccatgctcctgcaggctctggccctctccaaggagtaccggttacagtacttggcctctgaaacagtgctgaacttggcttttgcgcagctcattcttggaatcccagaacaggccttaagtcttctccacatggccatcgagcccatcttggctgacggggctatcctggacaaaggtcgtgccatgttcttagtggccaagtgccaggtggcttcagcagcttcctacgatcagccgaagaaagcagaagctctggaggctgccatcgagaacctcaatgaagccaagaactattttgcaaaggttgactgcaaagagcgcatcagggacgtcgtttacttccaggccagactctaccataccctggggaagacccaggagaggaaccggtgtgcgatgctcttccggcagctgcatcaggagctgccctctcatggggtacccttgataaaccatctctagagaggacatccctgctgggctgctgtgcagagtataagattttggacttgttcatgtcccctctctccctataaatgatgtatttgtgacaccctatcttgtcaataaacagcattctgatta

SEQ ID NO: 107136 - DNA, 2077 bp, Homo sapiens
  Payload ID: 1030
  Gene Symbol: ANAPC5
  Gene Name: anaphase promoting complex subunit 5
  ENST ID: ENST00000535482
  CDS Start-End: 690-1955
attgcccaggagtccaacgatcacgtgtgtctccagcactgtttggtgaggccatcctctggtcttgggagttttgttcacgggttgaattggccttcacaaggccccgttgaattgggttgttttgcagttggagcagagatcttcagcagcaaaaggaaacaagttaggtggtcatgggaattcagaaagggcaacttatctttacttacctttcttaattcatgacatctgttttgcttttggcatatatctgctctacaaagtttaatgcaacttgccatgaaagaagagaaacctttatcacatttagcactggcattaacaaaagatgtatactacacttagtaactgggtgagatgttgtcctgtaatagcaaaatcaccagggcagtggaacacagaagctacttgacaagcacctgagaatcttatttctcaattgaaggccatatgggagcttcatgctttttttctgaaacacctgccactcagtggctgtcaggtgaagcagaacaatgactcatttatttcagcctggttttaatgatgttgatatgtttgacaggtctcattgagattcttgatatttcttgaaagagtatttgagaggattcattttgtcccttttaaattctttcttatgaccacattgatatttcactagaacatcagccattgccactgttatgatatattttgatgatttctcttgccagagctggctttatgtgctggggcagaagagatccgatagctatgttctgctggagcattctgtgaagaaggcagtacattttgggttaccgtacctcgcctccctgggaatacagtcccttgttcaacagagagcttttgctgggaagacggcaaacaagctgatggatgccctaaaggactccgacctcctgcactggaaacacagcctgtcagagctcatcgatatcagcatcgcacagaaaacggccatctggaggctgtatggccgcagcaccatggcactgcaacaggcccagatgttgctgagcatgaacagcctggaggcggtgaatgcgggcgtgcagcagaacaacacagagtcctttgctgtcgcactctgccacctcgcagagctacacgcggagcagggctgttttgctgcagcttctgaagtgttaaagcacttgaaggaacgatttccgcctaatagtcagcacgcccagttatggatgctatgtgatcaaaaaatacagtttgacagagcaatgaatgatggcaaatatcatttggctgattcacttgttacaggaatcacagctctcaatagcatagagggtgtttataggaaagcggttgtattacaagctcagaaccaaatgtcagaggcacataagcttttacaaaaattgttggttcattgtcagaaactgaagaacacagaaatggtgatcagtgtcctactgtccgtggcagagctgtactggcgatcttcctcccctaccatcgcgctgcccatgctcctgcaggctctggccctctccaaggagtaccggttacagtacttggcctctgaaacagtgctgaacttggcttttgcgcagctcattcttggaatcccagaacaggccttaagtcttctccacatggccatcgagcccatcttggctgacggggctatcctggacaaaggtcgtgccatgttcttagtggccaagtgccaggtggcttcagcagcttcctacgatcagccgaagaaagcagaagctctggaggctgccatcgagaacctcaatgaagccaagaactattttgcaaaggttgactgcaaagagcgcatcagggacgtcgtttacttccaggccagactctaccataccctggggaagacccaggagaggaaccggtgtgcgatgctcttccggcagctgcatcaggagctgccctctcatggggtacccttgataaaccatctctagagaggacatccctgctgggctgctgtgcagagtataagattttggacttgttcatgtcccctctctccctataaatgatgtatttgtgacaccctatcttgtcaataaacagcattctgatt

SEQ ID NO: 107137 - DNA, 2400 bp, Homo sapiens
  Payload ID: 1030
  Gene Symbol: ANAPC5
  Gene Name: anaphase promoting complex subunit 5
  ENST ID: ENST00000541887
  CDS Start-End: 49-2277
caactggcggcagcgcgccgcgggcccgagacttagtctcgggccgccatggccagcgtccacgagagcctctacttcaatcccatgatgaccaatggggttgtgcacgccaatgtgttcggcatcaaggactgggtgacgccgtacaagatcgcggtgctggtgctgctgaacgagatgagccgcacaggcgagggcgccgtcagcctcatggagcggcggaggctcaaccagctgctcctgcccctgctgcagggcccagatattacactgtcaaaactttacaagttaattgaagagtcttgtccacagctggcaaattcagtgcagatcagaatcaaactgatggctgaaggcgagttgaaggatatggaacagttttttgatgacctttcagattctttctctggaactgaaccagaggttcacaaaacaagtgtagtaggtttgtttctgcgtcacatgatcttggcctacagtaagctttctttcagccaagtgtttaaactgtacactgcccttcagcagtacttccagaatggtgagaaaaagacagtggaggatgctgatatggaactgaccagtagagatgagggtgaaagaaaaatggaaaaagaagaacttgatgtatctgtaagagaagaggaggtatcttgcagtgggcctctgtcccaaaaacaagcagaattttttctttctcaacaggcttctttgctaaagaatgatgagactaaggccctcactccagcttccttgcagaaggaattaaacaatttgttgaaatttaatcctgattttgctgaagcgcattatctcagctacttaaacaacctccgtgtccaagatgttttcagttcaacacacagtctcctccattattttgatcgtctgattcttaccggagccgaaagcaaaagtaatggggaagagggctatggccggagcttgagatacgccgctctgaatcttgccgccctgcactgccgcttcggtcactatcaacaggcagagctcgccctgcaggaggcaattaggattgcccaggagtccaacgatcacgtgtgtctccagcactgtttgagctggctttatgtgctggggcagaagagatccgatagctatgttctgctggagcattctgtgaagaaggcagtacattttgggttaccgagagcttttgctgggaagacggcaaacaagctgatggatgccctaaaggactccgacctcctgcactggaaacacagcctgtcagagctcatcgatatcagcatcgcacagaaaacggccatctggaggctgtatggccgcagcaccatggcactgcaacaggcccagatgttgctgagcatgaacagcctggaggcggtgaatgcgggcgtgcagcagaacaacacagagtcctttgctgtcgcactctgccacctcgcagagctacacgcggagcagggctgttttgctgcagcttctgaagtgttaaagcacttgaaggaacgatttccgcctaatagtcagcacgcccagttatggatgctatgtgatcaaaaaatacagtttgacagagcaatgaatgatggcaaatatcatttggctgattcacttgttacaggaatcacagctctcaatagcatagagggtgtttataggaaagcggttgtattacaagctcagaaccaaatgtcagaggcacataagcttttacaaaaattgttggttcattgtcagaaactgaagaacacagaaatggtgatcagtgtcctactgtccgtggcagagctgtactggcgatcttcctcccctaccatcgcgctgcccatgctcctgcaggctctggccctctccaaggagtaccggttacagtacttggcctctgaaacagtgctgaacttggcttttgcgcagctcattcttggaatcccagaacaggccttaagtcttctccacatggccatcgagcccatcttggctgacggggctatcctggacaaaggtcgtgccatgttcttagtggccaagtgccaggtggcttcagcagcttcctacgatcagccgaagaaagcagaagctctggaggctgccatcgagaacctcaatgaagccaagaactattttgcaaaggttgactgcaaagagcgcatcagggacgtcgtttacttccaggccagactctaccataccctggggaagacccaggagaggaaccggtgtgcgatgctcttccggcagctgcatcaggagctgccctctcatggggtacccttgataaaccatctctagagaggacatccctgctgggctgctgtgcagagtataagattttggacttgttcatgtcccctctctccctataaatgatgtatttgtgacaccctatcttgtcaataaacagcattctgatta

SEQ ID NO: 107138 - DNA, 915 bp, Homo sapiens
  Payload ID: 1030
  Gene Symbol: ANAPC5
  Gene Name: anaphase promoting complex subunit 5
  ENST ID: ENST00000544442
  CDS Start-End: 263-915
ctggcggcagcgcgccgcgggcccgagacttagtctcgggccgccatggccagcgtccacgagagcctctacttcaatcccatgatgaccaatggggttgtgcacgccaatgtgttcggcatcaaggactgggtgacgccgtacaagatcgcggtgctggtgctgctgaacgagatgagccgcacaggcgagggcgccgtcagcctcatggagcggcggaggctcaaccagctgctcctgcccctgctgcagaatcaaactgatggctgaaggcgagttgaaggatatggaacagttttttgatgacctttcagattctttctctggaactgaaccagaggttcacaaaacaagtgtagtaggtttgtttctgcgtcacatgatcttggcctacagtaagctttctttcagccaagtgtttaaactgtacactgcccttcagcagtacttccagaatggtgagaaaaagacagtggaggatgctgatatggaactgaccagtagagatgagggtgaaagaaaaatggaaaaagaagaacttgatgtatctgtaagagaagaggaggtatcttgcagtgggcctctgtcccaaaaacaagcagaattttttctttctcaacaggcttctttgctaaagaatgatgagactaaggccctcactccagcttccttgcagaaggaattaaacaatttgttgaaatttaatcctgattttgctgaagcgcattatctcagctacttaaacaacctccgtgtccaagatgttttcagttcaacacacagtctcctccattattttgatcgtctgattcttaccggagccgaaagcaaaagtaatggggaagagggctatggccggagcttgagatacgccgctctgaatcttgccgccctgcactgccgcttcggtcacta

SEQ ID NO: 107139 - DNA, 509 bp, Homo sapiens
  Payload ID: 1030
  Gene Symbol: ANAPC5
  Gene Name: anaphase promoting complex subunit 5
  ENST ID: ENST00000536837
  CDS Start-End: 377-509
aagacctgcggacctgggcgtggcggaaggcgcgctgcggcgctgctttctcggttgggtgtttgaaatgggagatagcgtccctgaggaagctgctgcggctttctgggctaggtggtcaagtttccggggaggggagcgcgggaagggccgtggtgaatttgaacacgccggttggctcgaaggcctttgttatgaccgtcagagcagggcctcagatttccttcccagacgttcccgcgttcatgctcggtgatgacctcggggctcctcactcgtgggtccgggcccagatattacactgtcaaaactttacaagttaattgaagagtcttgtccacagctggcaaattcagtgcagatcagaatcaaactgatggctgaaggcgagttgaaggatatggaacagttttttgatgacctttcagattctttctctggaactgaaccagaggttcacaaaacaagtgtagtaggtttgtttctgcgtcacatgatcttggcctaca

SEQ ID NO: 107140 - DNA, 704 bp, Homo sapiens
  Payload ID: 1030
  Gene Symbol: ANAPC5
  Gene Name: anaphase promoting complex subunit 5
  ENST ID: ENST00000539871
  CDS Start-End: 56-704
gtggtgacaactggcggcagcgcgccgcgggcccgagacttagtctcgggccgccatggccagcgtccacgagagcctctacttcaatcccatgatgaccaatggggttgtgcacgccaatgtgttcggcatcaaggactgggtgacgccgtacaagatcgcggtgctggtgctgctgaacgagatgagccgcacaggcgagggcgccgtcagcctcatggagcggcggaggctcaaccagctgctcctgcccctgctgcagagacgggattttgccatgttacccaggctggccgggaactcctggactcaagcaatcctcccgtctggtctcccagagtattgggattacaggagtgagccactgcgcccggccgtcatgtgttatttcattttgcagacacagggcccagatattacactgtcaaaactttacaagttaattgaagagtcttgtccacagctggcaaattcagtgcagatcagaatcaaactgatggctgaaggcgagttgaaggatatggaacagttttttgatgacctttcagattctttctctggaactgaaccagaggttcacaaaacaagtgtagtaggtttgtttctgcgtcacatgatcttggcctacagtaagctttctttcagccaagtgtttaaactgtacactgcccttcagcagtacttccagaatggtgagaaaaaga

SEQ ID NO: 107141 - DNA, 3045 bp, Homo sapiens
  Payload ID: 1031
  Gene Symbol: ANAPC7
  Gene Name: anaphase promoting complex subunit 7
  Uniprot ID: Q9UJX3
  ENST ID: ENST00000455511
  CDS Start-End: 2-1801
gatggaccccggcgacgccgccattttggagtcttccctaaggatcctctaccggcttttcgagtcagtgctgccgccgctgcccgcggctttgcagagcaggatgaatgtgatagaccacgtgcgggacatggcggccgcggggctgcactccaacgtgcggctcctcagcagcttgttacttacaatgagtaataacaaccctgagttattctccccacctcagaagtaccagcttttggtgtatcatgcagattctctctttcatgataaggaatatcggaatgctgtgagtaagtataccatggctttacagcagaagaaagcgctaagtaaaacttcaaaagtgagaccttcaactggaaattctgcatctactccacaaagtcagtgtcttccatctgaaattgaagtgaaatacaaaatggctgaatgttatacaatgctaaaacaagataaagatgccattgctatacttgatgggatcccttcaagacaaagaactcccaaaataaacatgatgctggcaaacctgtacaagaaggctggtcaggagcgcccttcagtcaccagctataaggaggtgctgaggcagtgcccattagcccttgatgccattctaggcttgttgtccctttctgtaaaaggggcagaggtggcatccatgacaatgaatgtgatccaaaccgtgcctaacttggactggctctctgtgtggatcaaagcgtatgcttttgtgcacactggtgacaactcaagagcaatcagtaccatctgttcactagagaaaaaatccttattgcgagataacgtggacctattgggaagcttggcagatctgtacttcagagctggagacaataaaaactctgtcctcaagtttgaacaggcacagatgttggatccttatctgataaaaggaatggatgtatatggctacctactggcacgagaagggcggctagaggatgttgagaaccttggatgccgccttttcaatatctctgatcagcatgcagaaccgtgggtggtttctggctgtcacagcttctatagcaaacgctactcccgggccctctatttaggagccaaggccattcagctgaacagtaatagtgttcaagctctgctacttaagggagcagcacttaggaacatgggcagagtccaagaagcaataatccactttcgggaggccatacggctcgcaccttgtcgcttagattgttatgaaggtcttatcgaatgttacttagcctccaacagtattcgagaagcaatggtaatggctaacaacgtttacaaaactctgggagcaaatgcacagacccttacccttttagccaccgtttgtcttgaagacccagtgacacaggagaaagccaaaacattattagataaagccctgacccaaaggccagattacattaaggctgtggtgaaaaaagcagaactacttagcagagaacagaaatatgaagatggaattgctttgctgaggaacgcactggctaatcagagtgactgtgtcctgcatcggatcctaggagatttccttgtagctgtcaatgagtatcaggaggcaatggaccagtatagtatagcactaagtttggaccccaatgaccagaagtctctagaggggatgcagaagatggagaaggaggagagtcccacggatgccactcaggaggaggatgtggacgacatggaagggagtggggaagaaggggacctggagggcagcgacagtgaggcggcccagtgggctgaccaggagcagtggttcggcatgcagtgagggggcggcagctccatggccgcagtggcctgccctgctctgagcacttccgtggactgaaggaaccgtaggagcctgctctcagaaggacaatgattcagcatgtgattgcagcaggggtctctgccccctcgctcccaattcctagtcgtgacttcatttctaaaacagagcctgaccaaccttccatgtatctccatcctcccctgctccagccagggaggactgagggagtgccccgagacccacgcacatgttggggcttctgggccaagagtactttttatataactaatttctaaatccaaaagctcaaggaatagacagtgttctgtgacatggattggtttgaaggagttacccaccatcccagcacgataatgtcatctcccaagttggatggcagcacgatctggccctagggagcttcctgttcccagaagtcattgtcctgggctatccagatgtccctagtaaatcttgcttccttctgcaatgttagtaatgccttaagctgacagttgctattttgcagaacagttttcctctttgcttagctagtaacttgcctctgagcctgggctgatctgagaaacaggtgtgacaagagcatgaaccagaggtgcacctggggcagttccctaataaaactggtttgtacagtcatggtgttggggtgatcagaatggaagcccttttcaaaatagactcttagtatttttgtcttattcgcaatgcattgattcagccccagaattatttgccagaaatagactttcttcccctggtgttgggagccaggagggttggaaagctcaggaaccctgagctggttcatctgtttgcatattgggtaggttaatttccctggagcctgagagtctttggccagatttcagctgcgtctgcctggctcttttgctgcagctgtgagattggggtctggttccagcagtctgtcactggtcagcctgagtatcacaccctgagctctggggctgggagtttcttcccacaccctctcccttgtgccttaagttgcgatggctctgagtatacaattaatcggaggtgaggggtgggtgtcacagctaatcccaaattcaaaaattagtccaaggtgctgcaaaatataaatttgatgtcagtagaaagtcgtatcctaaaatgtaaaaactgtaagtgtacagtagttaatgagctcagaacatctgataactgcaatttaaaatgggcaaaaagtt

SEQ ID NO: 107142 - DNA, 2200 bp, Homo sapiens
  Payload ID: 1031
  Gene Symbol: ANAPC7
  Gene Name: anaphase promoting complex subunit 7
  Uniprot ID: Q9UJX3
  ENST ID: ENST00000450008
  CDS Start-End: 2-1615
gatggaccccggcgacgccgccattttggagtcttccctaaggatcctctaccggcttttcgagtcagtgctgccgccgctgcccgcggctttgcagagcaggatgaatgtgatagaccacgtgcgggacatggcggccgcggggctgcactccaacgtgcggctcctcagcagcttgttacttacaatgagtaataacaaccctgagttattctccccacctcagaagtaccagcttttggtgtatcatgcagattctctctttcatgataaggaatatcggaatgctgtgagtaagtataccatggctttacagcagaagaaagcgctaagtaaaacttcaaaagtgagaccttcaactggaaattctgcatctactccacaaagtcagtgtcttccatctgaaattgaagtgaaatacaaaatggctgaatgttatacaatgctaaaacaagataaagatgccattgctatacttgatgggatcccttcaagacaaagaactcccaaaataaacatgatgctggcaaacctgtacaagaaggctggtcaggagcgcccttcagtcaccagctataaggaggtgctgaggcagtgcccattagcccttgatgccattctaggcttgttgtccctttctgtaaaaggggcagaggtggcatccatgacaatgaatgtgatccaaaccgtgcctaacttggactggctctctgtgtggatcaaagcgtatgcttttgtgcacactggtgacaactcaagagcaatcagtaccatctgttcactagagaaaaaatccttattgcgagataacgtggacctattgggaagcttggcagatctgtacttcagagctggagacaataaaaactctgtcctcaagtttgaacaggcacagatgttggatccttatctgataaaaggaatggatgtatatggctacctactggcacgagaagggcggctagaggatgttgagaaccttggatgccgccttttcaatatctctgatcagcatgcagaaccgtgggtggtttctggctgtcacagcttctatagcaaacgctactcccgggccctctatttaggagccaaggccattcagctgaacagtaatagtgttcaagctctgctacttaagggagcagcacttaggaacatgggcagagtccaagaagcaataatccactttcgggaggccatacggctcgcaccttgtcgcttagattgttatgaaggtcttatcgaatgttacttagcctccaacagtattcgagaagcaatggtaatggctaacaacgtttacaaaactctgggagcaaatgcacagacccttacccttttagccaccgtttgtcttgaagacccagtgacacaggagaaagccaaaacattattagataaagccctgacccaaaggccagattacattaaggctgtggtgaaaaaagcagaactacttagcagagaacagaaatatgaagatggaattgctttgctgaggaacgcactggctaatcagagtgactgtgtcctgcatcggatcctaggagatttccttgtagctgtcaatgagtatcaggaggcaatggaccagtatagtatagcactaaggtaggcactagcctcccttgggggaaggccactgaggagggtagaggaggcagtgagctgtgtcacaggagttatggaaacacacacacactttgtgtccatggttgaaagcagaataataatagtaatggtagaagagttatttgtgaattcatgacttctaaaaattttttcttaaaatatattaacaacattagagaactgtttcactcataaccatcccacaccactataacatctgtgttcatttgtatagctcatcttctgtccttgcccacacacacatatttttatagggctgtacctagtatatattttatattcttctttttcaaatcaaagtattgtaagtactttcccatgtttctatctactgtagtcattaagaacttgaggtctgaagttttgaatactaccttcaccacctgtgatcttgggcaagttactaacacatttccttgtctatatctagctaccttattagatattaaatgatcgaatgagggttaaatgattatttcatgtaaagctcttagccctgtgcctggtacatagtaaatgctaaataaatagtggtattcttactgtt

SEQ ID NO: 107143 - DNA, 910 bp, Homo sapiens
  Payload ID: 1031
  Gene Symbol: ANAPC7
  Gene Name: anaphase promoting complex subunit 7
  ENST ID: ENST00000552087
  CDS Start-End: 1-448
gctacttaagggagcagcacttaggaacatgggcagagtccaagaagcaataatccactttcgggaggccatacggctcgcaccttgtcgcttagattgttatgaaggcagagaacagaaatatgaagatggaattgctttgctgaggaacgcactggctaatcagagtgactgtgtcctgcatcggatcctaggagatttccttgtagctgtcaatgagtatcaggaggcaatggaccagtatagtatagcactaagtttggaccccaatgaccagaagtctctagaggggatgcagaagatggagaaggaggagagtcccacggatgccactcaggaggaggatgtggacgacatggaagggagtggggaagaaggggacctggagggcagcgacagtgaggcggcccagtgggctgaccaggagcagtggttcggcatgcagtgagggggcggcagctccatggccgcagtggcctgccctgctctgagcacttccgtggactgaaggaaccgtaggagcctgctctcagaaggacaatgattcagcatgtgattgcagcaggggtctctgccccctcgctcccaattcctagtcgtgacttcatttctaaaacagagcctgaccaaccttccatgtatctccatcctcccctgctccagccagggaggactgagggagtgccccgagacccacgcacatgttggggcttctgggccaagagtactttttatataactaatttctaaatccaaaagctcaaggaatagacagtgttctgtgacatggattggtttgaaggagttacccaccatcccagcacgataatgtcatctcccaagttggatggcagcacgatctggccctagggagcttcctgttcccagaagtcattgtcctgggctatcc

SEQ ID NO: 107144 - DNA, 579 bp, Homo sapiens
  Payload ID: 1031
  Gene Symbol: ANAPC7
  Gene Name: anaphase promoting complex subunit 7
  ENST ID: ENST00000552170
  CDS Start-End: 1-163
agtgctgccgccgctgcccgcggctttgcagagcaggatgaatgtgatagaccacgtgcgggacatggcggccgcggggctgcactccaacgtgcggctcctcagcagcttgttacttacaatgagtaataacaaccctgtcttccatctgaaattgaagtgaaatacaaaatggctgaatgttatacaatgctaaaacaagataaagatgccattgctatacttgatgggatcccttcaagacaaagaactcccaaaataaacatgatgctggcaaacctgtacaagaaggctggtcaggagcgcccttcagtcaccagctataaggaggtgctgaggcagtgcccattagcccttgatgccattctaggcttgttgtccctttctgtaaaaggggcagaggtggcatccatgacaatgaatgtgatccaaaccgtgcctaacttggactggctctctgtgtggatcaaagcgtatgcttttgtgcacactggtgacaactcaagagcaatcagtaccatctgttcactagagaaaaaatccttattgcgagataacgtggacctattgggaagcttg

SEQ ID NO: 107145 - DNA, 6220 bp, Homo sapiens
  Payload ID: 1032
  Gene Symbol: ALK
  Gene Name: anaplastic lymphoma receptor tyrosine kinase
  Uniprot ID: Q9UM73
  ENST ID: ENST00000389048
  CDS Start-End: 908-5770
gggggcggcagcggtggtagcagctggtacctcccgccgcctctgttcggagggtcgcggggcaccgaggtgctttccggccgccctctggtcggccacccaaagccgcgggcgctgatgatgggtgaggagggggcggcaagatttcgggcgcccctgccctgaacgccctcagctgctgccgccggggccgctccagtgcctgcgaactctgaggagccgaggcgccggtgagagcaaggacgctgcaaacttgcgcagcgcgggggctgggattcacgcccagaagttcagcaggcagacagtccgaagccttcccgcagcggagagatagcttgagggtgcgcaagacggcagcctccgccctcggttcccgcccagaccgggcagaagagcttggaggagccaaaaggaacgcaaaaggcggccaggacagcgtgcagcagctgggagccgccgttctcagccttaaaagttgcagagattggaggctgccccgagaggggacagaccccagctccgactgcggggggcaggagaggacggtacccaactgccacctcccttcaaccatagtagttcctctgtaccgagcgcagcgagctacagacgggggcgcggcactcggcgcggagagcgggaggctcaaggtcccagccagtgagcccagtgtgcttgagtgtctctggactcgcccctgagcttccaggtctgtttcatttagactcctgctcgcctccgtgcagttgggggaaagcaagagacttgcgcgcacgcacagtcctctggagatcaggtggaaggagccgctgggtaccaaggactgttcagagcctcttcccatctcggggagagcgaagggtgaggctgggcccggagagcagtgtaaacggcctcctccggcgggatgggagccatcgggctcctgtggctcctgccgctgctgctttccacggcagctgtgggctccgggatggggaccggccagcgcgcgggctccccagctgcggggccgccgctgcagccccgggagccactcagctactcgcgcctgcagaggaagagtctggcagttgacttcgtggtgccctcgctcttccgtgtctacgcccgggacctactgctgccaccatcctcctcggagctgaaggctggcaggcccgaggcccgcggctcgctagctctggactgcgccccgctgctcaggttgctggggccggcgccgggggtctcctggaccgccggttcaccagccccggcagaggcccggacgctgtccagggtgctgaagggcggctccgtgcgcaagctccggcgtgccaagcagttggtgctggagctgggcgaggaggcgatcttggagggttgcgtcgggccccccggggaggcggctgtggggctgctccagttcaatctcagcgagctgttcagttggtggattcgccaaggcgaagggcgactgaggatccgcctgatgcccgagaagaaggcgtcggaagtgggcagagagggaaggctgtccgcggcaattcgcgcctcccagccccgccttctcttccagatcttcgggactggtcatagctccttggaatcaccaacaaacatgccttctccttctcctgattattttacatggaatctcacctggataatgaaagactccttccctttcctgtctcatcgcagccgatatggtctggagtgcagctttgacttcccctgtgagctggagtattcccctccactgcatgacctcaggaaccagagctggtcctggcgccgcatcccctccgaggaggcctcccagatggacttgctggatgggcctggggcagagcgttctaaggagatgcccagaggctcctttctccttctcaacacctcagctgactccaagcacaccatcctgagtccgtggatgaggagcagcagtgagcactgcacactggccgtctcggtgcacaggcacctgcagccctctggaaggtacattgcccagctgctgccccacaacgaggctgcaagagagatcctcctgatgcccactccagggaagcatggttggacagtgctccagggaagaatcgggcgtccagacaacccatttcgagtggccctggaatacatctccagtggaaaccgcagcttgtctgcagtggacttctttgccctgaagaactgcagtgaaggaacatccccaggctccaagatggccctgcagagctccttcacttgttggaatgggacagtcctccagcttgggcaggcctgtgacttccaccaggactgtgcccagggagaagatgagagccagatgtgccggaaactgcctgtgggtttttactgcaactttgaagatggcttctgtggctggacccaaggcacactgtcaccccacactcctcaatggcaggtcaggaccctaaaggatgcccggttccaggaccaccaagaccatgctctattgctcagtaccactgatgtccccgcttctgaaagtgctacagtgaccagtgctacgtttcctgcaccgatcaagagctctccatgtgagctccgaatgtcctggctcattcgtggagtcttgaggggaaacgtgtccttggtgctagtggagaacaaaaccgggaaggagcaaggcaggatggtctggcatgtcgccgcctatgaaggcttgagcctgtggcagtggatggtgttgcctctcctcgatgtgtctgacaggttctggctgcagatggtcgcatggtggggacaaggatccagagccatcgtggcttttgacaatatctccatcagcctggactgctacctcaccattagcggagaggacaagatcctgcagaatacagcacccaaatcaagaaacctgtttgagagaaacccaaacaaggagctgaaacccggggaaaattcaccaagacagacccccatctttgaccctacagttcattggctgttcaccacatgtggggccagcgggccccatggccccacccaggcacagtgcaacaacgcctaccagaactccaacctgagcgtggaggtggggagcgagggccccctgaaaggcatccagatctggaaggtgccagccaccgacacctacagcatctcgggctacggagctgctggcgggaaaggcgggaagaacaccatgatgcggtcccacggcgtgtctgtgctgggcatcttcaacctggagaaggatgacatgctgtacatcctggttgggcagcagggagaggacgcctgccccagtacaaaccagttaatccagaaagtctgcattggagagaacaatgtgatagaagaagaaatccgtgtgaacagaagcgtgcatgagtgggcaggaggcggaggaggagggggtggagccacctacgtatttaagatgaaggatggagtgccggtgcccctgatcattgcagccggaggtggtggcagggcctacggggccaagacagacacgttccacccagagagactggagaataactcctcggttctagggctaaacggcaattccggagccgcaggtggtggaggtggctggaatgataacacttccttgctctgggccggaaaatctttgcaggagggtgccaccggaggacattcctgcccccaggccatgaagaagtgggggtgggagacaagagggggtttcggagggggtggaggggggtgctcctcaggtggaggaggcggaggatatataggcggcaatgcagcctcaaacaatgaccccgaaatggatggggaagatggggtttccttcatcagtccactgggcatcctgtacaccccagctttaaaagtgatggaaggccacggggaagtgaatattaagcattatctaaactgcagtcactgtgaggtagacgaatgtcacatggaccctgaaagccacaaggtcatctgcttctgtgaccacgggacggtgctggctgaggatggcgtctcctgcattgtgtcacccaccccggagccacacctgccactctcgctgatcctctctgtggtgacctctgccctcgtggccgccctggtcctggctttctccggcatcatgattgtgtaccgccggaagcaccaggagctgcaagccatgcagatggagctgcagagccctgagtacaagctgagcaagctccgcacctcgaccatcatgaccgactacaaccccaactactgctttgctggcaagacctcctccatcagtgacctgaaggaggtgccgcggaaaaacatcaccctcattcggggtctgggccatggcgcctttggggaggtgtatgaaggccaggtgtccggaatgcccaacgacccaagccccctgcaagtggctgtgaagacgctgcctgaagtgtgctctgaacaggacgaactggatttcctcatggaagccctgatcatcagcaaattcaaccaccagaacattgttcgctgcattggggtgagcctgcaatccctgccccggttcatcctgctggagctcatggcggggggagacctcaagtccttcctccgagagacccgccctcgcccgagccagccctcctccctggccatgctggaccttctgcacgtggctcgggacattgcctgtggctgtcagtatttggaggaaaaccacttcatccaccgagacattgctgccagaaactgcctcttgacctgtccaggccctggaagagtggccaagattggagacttcgggatggcccgagacatctacagggcgagctactatagaaagggaggctgtgccatgctgccagttaagtggatgcccccagaggccttcatggaaggaatattcacttctaaaacagacacatggtcctttggagtgctgctatgggaaatcttttctcttggatatatgccataccccagcaaaagcaaccaggaagttctggagtttgtcaccagtggaggccggatggacccacccaagaactgccctgggcctgtataccggataatgactcagtgctggcaacatcagcctgaagacaggcccaactttgccatcattttggagaggattgaatactgcacccaggacccggatgtaatcaacaccgctttgccgatagaatatggtccacttgtggaagaggaagagaaagtgcctgtgaggcccaaggaccctgagggggttcctcctctcctggtctctcaacaggcaaaacgggaggaggagcgcagcccagctgccccaccacctctgcctaccacctcctctggcaaggctgcaaagaaacccacagctgcagagatctctgttcgagtccctagagggccggccgtggaagggggacacgtgaatatggcattctctcagtccaaccctccttcggagttgcacaaggtccacggatccagaaacaagcccaccagcttgtggaacccaacgtacggctcctggtttacagagaaacccaccaaaaagaataatcctatagcaaagaaggagccacacgacaggggtaacctggggctggagggaagctgtactgtcccacctaacgttgcaactgggagacttccgggggcctcactgctcctagagccctcttcgctgactgccaatatgaaggaggtacctctgttcaggctacgtcacttcccttgtgggaatgtcaattacggctaccagcaacagggcttgcccttagaagccgctactgcccctggagctggtcattacgaggataccattctgaaaagcaagaatagcatgaaccagcctgggccctgagctcggtcgcacactcacttctcttccttgggatccctaagaccgtggaggagagagaggcaatggctccttcacaaaccagagaccaaatgtcacgttttgttttgtgccaacctattttgaagtaccaccaaaaaagctgtattttgaaaatgctttagaaaggttttgagcatgggttcatcctattctttcgaaagaagaaaatatcataaaaatgagtgataaatacaaggcccagatgtggttgcataaggtttttatgcatgtttgttgtatacttccttatgcttctttcaaattgtgtgtgctctgcttcaatgtagtcagaattagctgcttctatgtttcatagttggggtcatagatgtttccttgccttgttgatgtggacatgagccatttgaggggagagggaacggaaataaaggagttatttgtaatgactaa

SEQ ID NO: 107146 - DNA, 577 bp, Homo sapiens
  Payload ID: 1032
  Gene Symbol: ALK
  Gene Name: anaplastic lymphoma receptor tyrosine kinase
  ENST ID: ENST00000453137
  CDS Start-End: 1-459
tcctccatcagtgacctgaaggaggtgccgcggaaaaacatcaccctcattcggggtctgggccatggcgcctttggggaggtgtatgaaggccaggtgtccggaatgcccaacgacccaagccccctgcaagtggctgtgaagacgctgcctgaagtgtgctctgaacaggacgaactggatttcctcatggaagccctgatcatcagtctctcttggaagcagttgttttgcttcaccttctgcctgaggccttcctgggagaaatcgaccatgaattctagcacccagtccacgcaccagtatctgagaaagacactctcctgccccctgagacacttcctcacccaagtgcctgagcaacatcctcacagctccagccactctcctgcaaatggaactcctgtggagcctgctgtggttcttcccacctgctcaccagcaagattctgggtttaggctcagcccgggacccctgctgcccatgtttacagaatgcctttatacattgtagctgctgaaaatgtaactttgtatcctgttcctcccagtttaagatttgcccagactcagctca

SEQ ID NO: 107147 - DNA, 2190 bp, Homo sapiens
  Payload ID: 1032
  Gene Symbol: ALK
  Gene Name: anaplastic lymphoma receptor tyrosine kinase
  ENST ID: ENST00000431873
  CDS Start-End: 1-1743
atggttactacgtgctcggcaatttacacatttcaattcattcgatcctcagtgtaccgccggaagcaccaggagctgcaagccatgcagatggagctgcagagccctgagtacaagctgagcaagctccgcacctcgaccatcatgaccgactacaaccccaactactgctttgctggcaagacctcctccatcagtgacctgaaggaggtgccgcggaaaaacatcaccctcattcggggtctgggccatggcgcctttggggaggtgtatgaaggccaggtgtccggaatgcccaacgacccaagccccctgcaagtggctgtgaagacgctgcctgaagtgtgctctgaacaggacgaactggatttcctcatggaagccctgatcatcagcaaattcaaccaccagaacattgttcgctgcattggggtgagcctgcaatccctgccccggttcatcctgctggagctcatggcggggggagacctcaagtccttcctccgagagacccgccctcgcccgagccagccctcctccctggccatgctggaccttctgcacgtggctcgggacattgcctgtggctgtcagtatttggaggaaaaccacttcatccaccgagacattgctgccagaaactgcctcttgacctgtccaggccctggaagagtggccaagattggagacttcgggatggcccgagacatctacagggcgagctactatagaaagggaggctgtgccatgctgccagttaagtggatgcccccagaggccttcatggaaggaatattcacttctaaaacagacacatggtcctttggagtgctgctatgggaaatcttttctcttggatatatgccataccccagcaaaagcaaccaggaagttctggagtttgtcaccagtggaggccggatggacccacccaagaactgccctgggcctgtataccggataatgactcagtgctggcaacatcagcctgaagacaggcccaactttgccatcattttggagaggattgaatactgcacccaggacccggatgtaatcaacaccgctttgccgatagaatatggtccacttgtggaagaggaagagaaagtgcctgtgaggcccaaggaccctgagggggttcctcctctcctggtctctcaacaggcaaaacgggaggaggagcgcagcccagctgccccaccacctctgcctaccacctcctctggcaaggctgcaaagaaacccacagctgcagagatctctgttcgagtccctagagggccggccgtggaagggggacacgtgaatatggcattctctcagtccaaccctccttcggagttgcacaaggtccacggatccagaaacaagcccaccagcttgtggaacccaacgtacggctcctggtttacagagaaacccaccaaaaagaataatcctatagcaaagaaggagccacacgacaggggtaacctggggctggagggaagctgtactgtcccacctaacgttgcaactgggagacttccgggggcctcactgctcctagagccctcttcgctgactgccaatatgaaggaggtacctctgttcaggctacgtcacttcccttgtgggaatgtcaattacggctaccagcaacagggcttgcccttagaagccgctactgcccctggagctggtcattacgaggataccattctgaaaagcaagaatagcatgaaccagcctgggccctgagctcggtcgcacactcacttctcttccttgggatccctaagaccgtggaggagagagaggcaatggctccttcacaaaccagagaccaaatgtcacgttttgttttgtgccaacctattttgaagtaccaccaaaaaagctgtattttgaaaatgctttagaaaggttttgagcatgggttcatcctattctttcgaaagaagaaaatatcataaaaatgagtgataaatacaaggcccagatgtggttgcataaggtttttatgcatgtttgttgtatacttccttatgcttctttcaaattgtgtgtgctctgcttcaatgtagtcagaattagctgcttctatgtttcatagttggggtcatagatgtttccttgccttgttgatgtggacatgagccatttgaggggagagggaacggaaataaaggagttatttgtaatgac

SEQ ID NO: 107148 - DNA, 4646 bp, Homo sapiens
  Payload ID: 1032
  Gene Symbol: ALK
  Gene Name: anaplastic lymphoma receptor tyrosine kinase
  ENST ID: ENST00000618119
  CDS Start-End: 468-4199
caggtcatagctccttggaatcaccaacaaacatgccttctccttctcctgattattttacatggaatctcacctggataatgaaagactccttccctttcctgtctcatcgcagccgatatggtctggagtgcagctttgacttcccctgtgagctggagtattcccctccactgcatgacctcaggaaccagagctggtcctggcgccgcatcccctccgaggaggcctcccagatggacttgctggatgggcctggggcagagcgttctaaggagatgcccagaggctcctttctccttctcaacacctcagctgactccaagcacaccatcctgagtccgtggatgaggagcagcagtgagcactgcacactggccgtctcggtgcacaggcacctgcagccctctggaaggtacattgcccagctgctgccccacaacgaggctgcaagagagatcctcctgatgcccactccagggaagcatggttggacagtgctccagggaagaatcgggcgtccagacaacccatttcgagtggccctggaatacatctccagtggaaaccgcagcttgtctgcagtggacttctttgccctgaagaactgcagtgaaggaacatccccaggctccaagatggccctgcagagctccttcacttgttggaatgggacagtcctccagcttgggcaggcctgtgacttccaccaggactgtgcccagggagaagatgagagccagatgtgccggaaactgcctgtgggtttttactgcaactttgaagatggcttctgtggctggacccaaggcacactgtcaccccacactcctcaatggcaggtcaggaccctaaaggatgcccggttccaggaccaccaagaccatgctctattgctcagtaccactgatgtccccgcttctgaaagtgctacagtgaccagtgctacgtttcctgcaccgatcaagagctctccatgtgagctccgaatgtcctggctcattcgtggagtcttgaggggaaacgtgtccttggtgctagtggagaacaaaaccgggaaggagcaaggcaggatggtctggcatgtcgccgcctatgaaggcttgagcctgtggcagtggatggtgttgcctctcctcgatgtgtctgacaggttctggctgcagatggtcgcatggtggggacaaggatccagagccatcgtggcttttgacaatatctccatcagcctggactgctacctcaccattagcggagaggacaagatcctgcagaatacagcacccaaatcaagaaacctgtttgagagaaacccaaacaaggagctgaaacccggggaaaattcaccaagacagacccccatctttgaccctacagttcattggctgttcaccacatgtggggccagcgggccccatggccccacccaggcacagtgcaacaacgcctaccagaactccaacctgagcgtggaggtggggagcgagggccccctgaaaggcatccagatctggaaggtgccagccaccgacacctacagcatctcgggctacggagctgctggcgggaaaggcgggaagaacaccatgatgcggtcccacggcgtgtctgtgctgggcatcttcaacctggagaaggatgacatgctgtacatcctggttgggcagcagggagaggacgcctgccccagtacaaaccagttaatccagaaagtctgcattggagagaacaatgtgatagaagaagaaatccgtgtgaacagaagcgtgcatgagtgggcaggaggcggaggaggagggggtggagccacctacgtatttaagatgaaggatggagtgccggtgcccctgatcattgcagccggaggtggtggcagggcctacggggccaagacagacacgttccacccagagagactggagaataactcctcggttctagggctaaacggcaattccggagccgcaggtggtggaggtggctggaatgataacacttccttgctctgggccggaaaatctttgcaggagggtgccaccggaggacattcctgcccccaggccatgaagaagtgggggtgggagacaagagggggtttcggagggggtggaggggggtgctcctcaggtggaggaggcggaggatatataggcggcaatgcagcctcaaacaatgaccccgaaatggatggggaagatggggtttccttcatcagtccactgggcatcctgtacaccccagctttaaaagtgatggaaggccacggggaagtgaatattaagcattatctaaactgcagtcactgtgaggtagacgaatgtcacatggaccctgaaagccacaaggtcatctgcttctgtgaccacgggacggtgctggctgaggatggcgtctcctgcattgtgtcacccaccccggagccacacctgccactctcgctgatcctctctgtggtgacctctgccctcgtggccgccctggtcctggctttctccggcatcatgattgtgtaccgccggaagcaccaggagctgcaagccatgcagatggagctgcagagccctgagtacaagctgagcaagctccgcacctcgaccatcatgaccgactacaaccccaactactgctttgctggcaagacctcctccatcagtgacctgaaggaggtgccgcggaaaaacatcaccctcattcggggtctgggccatggcgcctttggggaggtgtatgaaggccaggtgtccggaatgcccaacgacccaagccccctgcaagtggctgtgaagacgctgcctgaagtgtgctctgaacaggacgaactggatttcctcatggaagccctgatcatcagcaaattcaaccaccagaacattgttcgctgcattggggtgagcctgcaatccctgccccggttcatcctgctggagctcatggcggggggagacctcaagtccttcctccgagagacccgccctcgcccgagccagccctcctccctggccatgctggaccttctgcacgtggctcgggacattgcctgtggctgtcagtatttggaggaaaaccacttcatccaccgagacattgctgccagaaactgcctcttgacctgtccaggccctggaagagtggccaagattggagacttcgggatggcccgagacatctacagggcgagctactatagaaagggaggctgtgccatgctgccagttaagtggatgcccccagaggccttcatggaaggaatattcacttctaaaacagacacatggtcctttggagtgctgctatgggaaatcttttctcttggatatatgccataccccagcaaaagcaaccaggaagttctggagtttgtcaccagtggaggccggatggacccacccaagaactgccctgggcctgtataccggataatgactcagtgctggcaacatcagcctgaagacaggcccaactttgccatcattttggagaggattgaatactgcacccaggacccggatgtaatcaacaccgctttgccgatagaatatggtccacttgtggaagaggaagagaaagtgcctgtgaggcccaaggaccctgagggggttcctcctctcctggtctctcaacaggcaaaacgggaggaggagcgcagcccagctgccccaccacctctgcctaccacctcctctggcaaggctgcaaagaaacccacagctgcagagatctctgttcgagtccctagagggccggccgtggaagggggacacgtgaatatggcattctctcagtccaaccctccttcggagttgcacaaggtccacggatccagaaacaagcccaccagcttgtggaacccaacgtacggctcctggtttacagagaaacccaccaaaaagaataatcctatagcaaagaaggagccacacgacaggggtaacctggggctggagggaagctgtactgtcccacctaacgttgcaactgggagacttccgggggcctcactgctcctagagccctcttcgctgactgccaatatgaaggaggtacctctgttcaggctacgtcacttcccttgtgggaatgtcaattacggctaccagcaacagggcttgcccttagaagccgctactgcccctggagctggtcattacgaggataccattctgaaaagcaagaatagcatgaaccagcctgggccctgagctcggtcgcacactcacttctcttccttgggatccctaagaccgtggaggagagagaggcaatggctccttcacaaaccagagaccaaatgtcacgttttgttttgtgccaacctattttgaagtaccaccaaaaaagctgtattttgaaaatgctttagaaaggttttgagcatgggttcatcctattctttcgaaagaagaaaatatcataaaaatgagtgataaatacaaggcccagatgtggttgcataaggtttttatgcatgtttgttgtatacttccttatgcttctttcaaattgtgtgtgctctgcttcaatgtagtcagaattagctgcttctatgtttcatagttggggtcatagatgtttccttgccttgttgatgtggacatgagccatttgaggggagagggaacggaaataaaggagttatttgtaatgac

SEQ ID NO: 107149 - DNA, 1695 bp, Homo sapiens
  Payload ID: 1033
  Gene Symbol: AUP1
  Gene Name: ancient ubiquitous protein 1
  Uniprot ID: Q9Y679
  ENST ID: ENST00000377526
  CDS Start-End: 311-1543
acagtaggacgcggggcacgccggtacctgaagtccttcagaagtgcacgccgggaccaggattccgggaggccgactcctccctgccccacgaatgccgggaattgtggtctccgccggacgcgagttgtgagacggcccaaggggccgcggggtatgctgggaccgctagcccttccggcgcgcctcaggacttcgggtcccctcaccccgggcggatgcccaaagactccgccttcccaagagcccctgcggccgggcgcgaaaatggcggcggcggcgacggccgggcgctcctgaagcagcagttatggagcttccctcagggccggggccggagcggctctttgactcgcaccggcttccgggtgactgcttcctactgctcgtgctgctgctctacgcgccagtcgggttctgcctcctcgtcctgcgcctctttctcgggatccacgtcttcctggtcagctgcgcgctgccagacagcgtccttcgcagattcgtagtgcggaccatgtgtgcggtgctagggctcgtggcccggcaggaggactccggactccgggatcacagtgtcagggtcctcatttccaaccatgtgacacctttcgaccacaacatagtcaatttgcttaccacctgtagcacccctctactcaatagtccccccagctttgtgtgctggtctcggggcttcatggagatgaatgggcggggggagttggtggagtcactcaagagattctgtgcttccacgaggcttccccccactcctctgctgctattccctgaggaagaggccaccaatggccgggaggggctcctgcgcttcagttcctggccattttctatccaagatgtggtacaacctcttaccctgcaagttcagagacccctggtctctgtgacggtgtcagatgcctcctgggtctcagaactgctgtggtcacttttcgtccctttcacggtgtatcaagtaaggtggcttcgtcctgttcatcgccaactaggggaagcgaatgaggagtttgcactccgtgtacaacagctggtggccaaggaattgggccagacagggacacggctcactccagctgacaaagcagagcacatgaagcgacaaagacaccccagattgcgcccccagtcagcccagtcttctttccctccctcccctggtccttctcctgatgtgcaactggcaactctggctcagagagtcaaggaagttttgccccatgtgccattgggtgtcatccagagagacctggccaagactggctgtgtagacttgactatcactaatctgcttgagggggccgtagctttcatgcctgaagacatcaccaagggaactcagtccctacccacagcctctgcctccaagtttcccagctctggcccggtgacccctcagccaacagccctaacatttgccaagtcttcctgggcccggcaggagagcctgcaggagcgcaagcaagcactatatgaatacgcaagaaggagattcacagagagacgagcccaggaggctgactgagctcaaaggaacaggatggcacccagagccgcaggacggagactgggggcagccctcacccaactcacaacaggctggatgggtgggtggtaaaaagggaaggatgaggctcccccaatgtcacattaaattcatggttttcattcaaggca

SEQ ID NO: 107150 - DNA, 1581 bp, Homo sapiens
  Payload ID: 1033
  Gene Symbol: AUP1
  Gene Name: ancient ubiquitous protein 1
  Uniprot ID: Q9Y679
  ENST ID: ENST00000425118
  CDS Start-End: 132-1253
ggcgcgcctcaggacttcgggtcccctcaccccgggcggatgcccaaagactccgccttcccaagagcccctgcggccgggcgcgaaaatggcggcggcggcgacggccgggcgctcctgaagcagcagttatggagcttccctcagggccggggccggagcggctctttgactcgcaccggcttccgggtgactgcttcctactgctcgtgctgctgctctacgcgccagtcgggttctgcctcctcgtcctgcgcctctttctcgggatccacgtcttcctggtcagctgcgcgctgccagacagcgtccttcgcagattcgtagtgcggaccatgtgtgcggtgctagggctcgtggcccggcaggaggactccggactccgggatcacagtgtcagggtcctcatttccaaccatgtgacacctttcgaccacaacatagtcaatttgcttaccacctgtagcacccctctactcaatagtccccccagctttgtgtgctggtctcggggcttcatggagatgaatgggcggggggagttggtggagtcactcaagagattctgtgcttccacgaggcttccccccactcctctgctgctattccctgaggaagaggccaccaatggccgggaggggctcctgcgcttcagttcctggccattttctatccaagatgtggtacaacctcttaccctgcaagttcagagacccctggtctctgtgacggtgtcagatgcctcctgggtctcagaactgctgtggtcacttttcgtccctttcacggtgtatcaagtaaggtggcttcgtcctgttcatcgccaactaggggaagcgaatgaggagtttgcactccgtgtacaacagctggtggccaaggaattgggccagacagggacacggctcactccagctgacaaagcagagcacatgaagcgacaaagacaccccagattgcgcccccagtcagcccagtcttctttccctccctcccctggtccttctcctgatgtgcaactggcaactctggctcagagagtcaaggaagttttgccccatgtgccattgggtgtcatccagagagacctggccaagactggctgtgtagacttgactatcactaatctgcttgagggggccgtagctttcatgcctgaagacatcaccaagggaactcagtccctacccacagcctctgcctccaaggcattcgatgcgtgtttaatgatgatgactccgcaagccctctgacattgtgatcacctcagtttcccagctctggcccggtgacccctcagccaacagccctaacatttgccaagtcttcctgggcccggcaggagagcctgcaggagcgcaagcaagcactatatgaatacgcaagaaggagattcacagagagacgagcccaggaggctgactgagctcaaaggaacaggatggcacccagagccgcaggacggagactgggggcagccctcacccaactcacaacaggctggatgggtgggtggtaaaaagggaaggatgaggctcccccaatgtcacattaaattcatggttttcattcaaggcatct

SEQ ID NO: 107151 - DNA, 10065 bp, Homo sapiens
  Payload ID: 1034
  Gene Symbol: AR
  Gene Name: androgen receptor
  ENST ID: ENST00000374690
  CDS Start-End: 525-3287
gcggagagaaccctctgttttcccccactctctctccacctcctcctgccttccccaccccgagtgcggagccagagatcaaaagatgaaaaggcagtcaggtcttcagtagccaaaaaacaaaacaaacaaaaacaaaaaagccgaaataaaagaaaaagataataactcagttcttatttgcacctacttcagtggacactgaatttggaaggtggaggattttgtttttttcttttaagatctgggcatcttttgaatctacccttcaagtattaagagacagactgtgagcctagcagggcagatcttgtccaccgtgtgtcttcttctgcacgagactttgaggctgtcagagcgctttttgcgtggttgctcccgcaagtttccttctctggagcttcccgcaggtgggcagctagctgcagcgactaccgcatcatcacagcctgttgaactcttctgagcaagagaaggggaggcggggtaagggaagtaggtggaagattcagccaagctcaaggatggaagtgcagttagggctgggaagggtctaccctcggccgccgtccaagacctaccgaggagctttccagaatctgttccagagcgtgcgcgaagtgatccagaacccgggccccaggcacccagaggccgcgagcgcagcacctcccggcgccagtttgctgctgctgcagcagcagcagcagcagcagcagcagcagcagcagcagcagcagcagcagcagcagcagcagcagcaagagactagccccaggcagcagcagcagcagcagggtgaggatggttctccccaagcccatcgtagaggccccacaggctacctggtcctggatgaggaacagcaaccttcacagccgcagtcggccctggagtgccaccccgagagaggttgcgtcccagagcctggagccgccgtggccgccagcaaggggctgccgcagcagctgccagcacctccggacgaggatgactcagctgccccatccacgttgtccctgctgggccccactttccccggcttaagcagctgctccgctgaccttaaagacatcctgagcgaggccagcaccatgcaactccttcagcaacagcagcaggaagcagtatccgaaggcagcagcagcgggagagcgagggaggcctcgggggctcccacttcctccaaggacaattacttagggggcacttcgaccatttctgacaacgccaaggagttgtgtaaggcagtgtcggtgtccatgggcctgggtgtggaggcgttggagcatctgagtccaggggaacagcttcggggggattgcatgtacgccccacttttgggagttccacccgctgtgcgtcccactccttgtgccccattggccgaatgcaaaggttctctgctagacgacagcgcaggcaagagcactgaagatactgctgagtattcccctttcaagggaggttacaccaaagggctagaaggcgagagcctaggctgctctggcagcgctgcagcagggagctccgggacacttgaactgccgtctaccctgtctctctacaagtccggagcactggacgaggcagctgcgtaccagagtcgcgactactacaactttccactggctctggccggaccgccgccccctccgccgcctccccatccccacgctcgcatcaagctggagaacccgctggactacggcagcgcctgggcggctgcggcggcgcagtgccgctatggggacctggcgagcctgcatggcgcgggtgcagcgggacccggttctgggtcaccctcagccgccgcttcctcatcctggcacactctcttcacagccgaagaaggccagttgtatggaccgtgtggtggtggtgggggtggtggcggcggcggcggcggcggcggcggcggcggcggcggcggcggcggcggcgaggcgggagctgtagccccctacggctacactcggccccctcaggggctggcgggccaggaaagcgacttcaccgcacctgatgtgtggtaccctggcggcatggtgagcagagtgccctatcccagtcccacttgtgtcaaaagcgaaatgggcccctggatggatagctactccggaccttacggggacatgcgtttggagactgccagggaccatgttttgcccattgactattactttccaccccagaagacctgcctgatctgtggagatgaagcttctgggtgtcactatggagctctcacatgtggaagctgcaaggtcttcttcaaaagagccgctgaagggaaacagaagtacctgtgcgccagcagaaatgattgcactattgataaattccgaaggaaaaattgtccatcttgtcgtcttcggaaatgttatgaagcagggatgactctgggagcccggaagctgaagaaacttggtaatctgaaactacaggaggaaggagaggcttccagcaccaccagccccactgaggagacaacccagaagctgacagtgtcacacattgaaggctatgaatgtcagcccatctttctgaatgtcctggaagccattgagccaggtgtagtgtgtgctggacacgacaacaaccagcccgactcctttgcagccttgctctctagcctcaatgaactgggagagagacagcttgtacacgtggtcaagtgggccaaggccttgcctggcttccgcaacttacacgtggacgaccagatggctgtcattcagtactcctggatggggctcatggtgtttgccatgggctggcgatccttcaccaatgtcaactccaggatgctctacttcgcccctgatctggttttcaatgagtaccgcatgcacaagtcccggatgtacagccagtgtgtccgaatgaggcacctctctcaagagtttggatggctccaaatcaccccccaggaattcctgtgcatgaaagcactgctactcttcagcattattccagtggatgggctgaaaaatcaaaaattctttgatgaacttcgaatgaactacatcaaggaactcgatcgtatcattgcatgcaaaagaaaaaatcccacatcctgctcaagacgcttctaccagctcaccaagctcctggactccgtgcagcctattgcgagagagctgcatcagttcacttttgacctgctaatcaagtcacacatggtgagcgtggactttccggaaatgatggcagagatcatctctgtgcaagtgcccaagatcctttctgggaaagtcaagcccatctatttccacacccagtgaagcattggaaaccctatttccccaccccagctcatgccccctttcagatgtcttctgcctgttataactctgcactactcctctgcagtgccttggggaatttcctctattgatgtacagtctgtcatgaacatgttcctgaattctatttgctgggctttttttttctctttctctcctttctttttcttcttccctccctatctaaccctcccatggcaccttcagactttgcttcccattgtggctcctatctgtgttttgaatggtgttgtatgcctttaaatctgtgatgatcctcatatggcccagtgtcaagttgtgcttgtttacagcactactctgtgccagccacacaaacgtttacttatcttatgccacgggaagtttagagagctaagattatctggggaaatcaaaacaaaaacaagcaaacaaaaaaaaaaagcaaaaacaaaacaaaaaataagccaaaaaaccttgctagtgttttttcctcaaaaataaataaataaataaataaatacgtacatacatacacacatacatacaaacatatagaaatccccaaagaggccaatagtgacgagaaggtgaaaattgcaggcccatggggagttactgattttttcatctcctccctccacgggagactttattttctgccaatggctattgccattagagggcagagtgaccccagagctgagttgggcaggggggtggacagagaggagaggacaaggagggcaatggagcatcagtacctgcccacagccttggtccctgggggctagactgctcaactgtggagcaattcattatactgaaaatgtgcttgttgttgaaaatttgtctgcatgttaatgcctcacccccaaacccttttctctctcactctctgcctccaacttcagattgactttcaatagtttttctaagacctttgaactgaatgttctcttcagccaaaacttggcgacttccacagaaaagtctgaccactgagaagaaggagagcagagatttaaccctttgtaaggccccatttggatccaggtctgctttctcatgtgtgagtcagggaggagctggagccagaggagaagaaaatgatagcttggctgttctcctgcttaggacactgactgaatagttaaactctcactgccactaccttttccccacctttaaaagacctgaatgaagttttctgccaaactccgtgaagccacaagcaccttatgtcctcccttcagtgttttgtgggcctgaatttcatcacactgcatttcagccatggtcatcaagcctgtttgcttcttttgggcatgttcacagattctctgttaagagcccccaccaccaagaaggttagcaggccaacagctctgacatctatctgtagatgccagtagtcacaaagatttcttaccaactctcagatcgctggagcccttagacaaactggaaagaaggcatcaaagggatcaggcaagctgggcgtcttgcccttgtcccccagagatgataccctcccagcaagtggagaagttctcacttccttctttagagcagctaaaggggctacccagatcagggttgaagagaaaactcaattaccagggtgggaagaatgaaggcactagaaccagaaaccctgcaaatgctcttcttgtcacccagcatatccacctgcagaagtcatgagaagagagaaggaacaaagaggagactctgactactgaattaaaatcttcagcggcaaagcctaaagccagatggacaccatctggtgagtttactcatcatcctcctctgctgctgattctgggctctgacattgcccatactcactcagattccccacctttgttgctgcctcttagtcagagggaggccaaaccattgagactttctacagaaccatggcttctttcggaaaggtctggttggtgtggctccaatactttgccacccatgaactcagggtgtgccctgggacactggttttatatagtcttttggcacacctgtgttctgttgacttcgttcttcaagcccaagtgcaagggaaaatgtccacctactttctcatcttggcctctgcctccttacttagctcttaatctcatctgttgaactcaagaaatcaagggccagtcatcaagctgcccattttaattgattcactctgtttgttgagaggatagtttctgagtgacatgatatgatccacaagggtttccttccctgatttctgcattgatattaatagccaaacgaacttcaaaacagctttaaataacaagggagaggggaacctaagatgagtaatatgccaatccaagactgctggagaaaactaaagctgacaggttccctttttggggtgggatagacatgttctggttttctttattattacacaatctggctcatgtacaggatcacttttagctgttttaaacagaaaaaaatatccaccactcttttcagttacactaggttacattttaataggtcctttacatctgttttggaatgattttcatcttttgtgatacacagattgaattatatcattttcatatctctccttgtaaatactagaagctctcctttacatttctctatcaaatttttcatctttatgggtttcccaattgtgactcttgtcttcatgaatatatgtttttcatttgcaaaagccaaaaatcagtgaaacagcagtgtaattaaaagcaacaactggattactccaaatttccaaatgacaaaactagggaaaaatagcctacacaagcctttaggcctactctttctgtgcttgggtttgagtgaacaaaggagattttagcttggctctgttctcccatggatgaaaggaggaggattttttttttcttttggccattgatgttctagccaatgtaattgacagaagtctcattttgcatgcgctctgctctacaaacagagttggtatggttggtatactgtactcacctgtgagggactggccactcagacccacttagctggtgagctagaagatgaggatcactcactggaaaagtcacaaggaccatctccaaacaagttggcagtgctcgatgtggacgaagagtgaggaagagaaaaagaaggagcaccagggagaaggctccgtctgtgctgggcagcagacagctgccaggatcacgaactctgtagtcaaagaaaagagtcgtgtggcagtttcagctctcgttcattgggcagctcgcctaggcccagcctctgagctgacatgggagttgttggattctttgtttcatagctttttctatgccataggcaatattgttgttcttggaaagtttattatttttttaactcccttactctgagaaagggatattttgaaggactgtcatatatctttgaaaaaagaaaatctgtaatacatatatttttatgtatgttcactggcactaaaaaatatagagagcttcattctgtcctttgggtagttgctgaggtaattgtccaggttgaaaaataatgtgctgatgctagagtccctctctgtccatactctacttctaaatacatataggcatacatagcaagttttatttgacttgtactttaagagaaaatatgtccaccatccacatgatgcacaaatgagctaacattgagcttcaagtagcttctaagtgtttgtttcattaggcacagcacagatgtggcctttccccccttctctcccttgatatctggcagggcataaaggcccaggccacttcctctgccccttcccagccctgcaccaaagctgcatttcaggagactctctccagacagcccagtaactacccgagcatggcccctgcatagccctggaaaaataagaggctgactgtctacgaattatcttgtgccagttgcccaggtgagagggcactgggccaagggagtggttttcatgtttgacccactacaaggggtcatgggaatcaggaatgccaaagcaccagatcaaatccaaaacttaaagtcaaaataagccattcagcatgttcagtttcttggaaaaggaagtttctacccctgatgcctttgtaggcagatctgttctcaccattaatctttttgaaaatcttttaaagcagtttttaaaaagagagatgaaagcatcacattatataaccaaagattacattgtacctgctaagataccaaaattcataagggcagggggggagcaagcattagtgcctctttgataagctgtccaaagacagactaaaggactctgctggtgactgacttataagagctttgtgggtttttttttccctaataatatacatgtttagaagaattgaaaataatttcgggaaaatgggattatgggtccttcactaagtgattttataagcagaactggctttccttttctctagtagttgctgagcaaattgttgaagctccatcattgcatggttggaaatggagctgttcttagccactgtgtttgctagtgcccatgttagcttatctgaagatgtgaaacccttgctgataagggagcatttaaagtactagattttgcactagagggacagcaggcagaaatccttatttctgcccactttggatggcacaaaaagttatctgcagttgaaggcagaaagttgaaatacattgtaaatgaatatttgtatccatgtttcaaaattgaaatatatatatatatatatatatatatatatatatatatatagtgtgtgtgtgtgttctgatagctttaactttctctgcatctttatatttggttccagatcacacctgatgccatgtacttgtgagagaggatgcagttttgttttggaagctctctcagaacaaacaagacacctggattgatcagttaactaaaagttttctcccctattgggtttgacccacaggtcctgtgaaggagcagagggataaaaagagtagaggacatgatacattgtactttactagttcaagacagatgaatgtggaaagcataaaaactcaatggaactgactgagatttaccacagggaaggcccaaacttggggccaaaagcctacccaagtgattgaccagtggccccctaatgggacctgagctgttggaagaagagaactgttccttggtcttcaccatccttgtgagagaagggcagtttcctgcattggaacctggagcaagcgctctatctttcacacaaattccctcacctgagattgaggtgctcttgttactgggtgtctgtgtgctgtaattctggttttggatatgttctgtaaagattttgacaaatgaaaatgtgtttttctctgttaaaacttgtcagagtactagaagttgtatctctgtaggtgcaggtccatttctgcccacaggtagggtgtttttctttgattaagagattgacacttctgttgcctaggacctcccaactcaaccatttctaggtgaaggcagaaaaatccacattagttactcctcttcagacatttcagctgagataacaaatcttttggaattttttcacccatagaaagagtggtagatatttgaatttagcaggtggagtttcatagtaaaaacagcttttgactcagctttgatttatcctcatttgatttggccagaaagtaggtaatatgcattgattggcttctgattccaattcagtatagcaaggtgctaggttttttcctttccccacctgtctcttagcctggggaattaaatgagaagccttagaatgggtggcccttgtgacctgaaacacttcccacataagctacttaacaagattgtcatggagctgcagattccattgcccaccaaagactagaacacacacatatccatacaccaaaggaaagacaattctgaaatgctgtttctctggtggttccctctctggctgctgcctcacagtatgggaacctgtactctgcagaggtgacaggccagatttgcattatctcacaaccttagcccttggtgctaactgtcctacagtgaagtgcctggggggttgtcctatcccataagccacttggatgctgacagcagccaccatcagaatgacccacgcaaaaaaaagaaaaaaaaaattaaaaagtcccctcacaacccagtgacacctttctgctttcctctagactggaacattgattagggagtgcctcagacatgacattcttgtgctgtccttggaattaatctggcagcaggagggagcagactatgtaaacagagataaaaattaattttcaatattgaaggaaaaaagaaataagaagagagagagaaagaaagcatcacacaaagattttcttaaaagaaacaattttgcttgaaatctctttagatggggctcatttctcacggtggcacttggcctccactgggcagcaggaccagctccaagcgctagtgttctgttctctttttgtaatcttggaatcttttgttgctctaaatacaattaaaaatggcagaaacttgtttgttggactacatgtgtgactttgggtctgtctctgcctctgctttcagaaatgtcatccattgtgtaaaatattggcttactggtctgccagctaaaacttggccacatcccctgttatggctgcaggatcgagttattgttaacaaagagacccaagaaaagctgctaatgtcctcttatcattgttgttaatttgttaaaacataaagaaatctaaaatttca

SEQ ID NO: 107152 - DNA, 1728 bp, Homo sapiens
  Payload ID: 1034
  Gene Symbol: AR
  Gene Name: androgen receptor
  Uniprot ID: P10275
  ENST ID: ENST00000396043
  CDS Start-End: 115-1281
gcctatgcaaatgcctgcctgaagctgctggaggctggctttgtaccggactttgtacagggaaccagggaaacgaatgcagagtgctcctgacattgcctgtcactttttcccatgatactctggcttcacagtttggagactgccagggaccatgttttgcccattgactattactttccaccccagaagacctgcctgatctgtggagatgaagcttctgggtgtcactatggagctctcacatgtggaagctgcaaggtcttcttcaaaagagccgctgaagggaaacagaagtacctgtgcgccagcagaaatgattgcactattgataaattccgaaggaaaaattgtccatcttgtcgtcttcggaaatgttatgaagcagggatgactctgggagcccggaagctgaagaaacttggtaatctgaaactacaggaggaaggagaggcttccagcaccaccagccccactgaggagacaacccagaagctgacagtgtcacacattgaaggctatgaatgtcagcccatctttctgaatgtcctggaagccattgagccaggtgtagtgtgtgctggacacgacaacaaccagcccgactcctttgcagccttgctctctagcctcaatgaactgggagagagacagcttgtacacgtggtcaagtgggccaaggccttgcctggcttccgcaacttacacgtggacgaccagatggctgtcattcagtactcctggatggggctcatggtgtttgccatgggctggcgatccttcaccaatgtcaactccaggatgctctacttcgcccctgatctggttttcaatgagtaccgcatgcacaagtcccggatgtacagccagtgtgtccgaatgaggcacctctctcaagagtttggatggctccaaatcaccccccaggaattcctgtgcatgaaagcactgctactcttcagcattattccagtggatgggctgaaaaatcaaaaattctttgatgaacttcgaatgaactacatcaaggaactcgatcgtatcattgcatgcaaaagaaaaaatcccacatcctgctcaagacgcttctaccagctcaccaagctcctggactccgtgcagcctattgcgagagagctgcatcagttcacttttgacctgctaatcaagtcacacatggtgagcgtggactttccggaaatgatggcagagatcatctctgtgcaagtgcccaagatcctttctgggaaagtcaagcccatctatttccacacccagtgaagcattggaaaccctatttccccaccccagctcatgccccctttcagatgtcttctgcctgttataactctgcactactcctctgcagtgccttggggaatttcctctattgatgtacagtctgtcatgaacatgttcctgaattctatttgctgggctttttttttctctttctctcctttctttttcttcttccctccctatctaaccctcccatggcaccttcagactttgcttcccattgtggctcctatctgtgttttgaatggtgttgtatgcctttaaatctgtgatgatcctcatatggcccagtgtcaagttgtgcttgtttacagcactactctgtgccagccacacaaacgtttacttatcttatgccacgggaagtttagagagctaagattatctggggaaatcaaaacaaaaacaagcaaacaaaaaaaaaaa

SEQ ID NO: 107153 - DNA, 10221 bp, Homo sapiens
  Payload ID: 1034
  Gene Symbol: AR
  Gene Name: androgen receptor
  ENST ID: ENST00000396044
  CDS Start-End: 1116-3320
cgagatcccggggagccagcttgctgggagagcgggacggtccggagcaagcccagaggcagaggaggcgacagagggaaaaagggccgagctagccgctccagtgctgtacaggagccgaagggacgcaccacgccagccccagcccggctccagcgacagccaacgcctcttgcagcgcggcggcttcgaagccgccgcccggagctgccctttcctcttcggtgaagtttttaaaagctgctaaagactcggaggaagcaaggaaagtgcctggtaggactgacggctgcctttgtcctcctcctctccaccccgcctccccccaccctgccttccccccctcccccgtcttctctcccgcagctgcctcagtcggctactctcagccaacccccctcaccacccttctccccacccgcccccccgcccccgtcggcccagcgctgccagcccgagtttgcagagaggtaactccctttggctgcgagcgggcgagctagctgcacattgcaaagaaggctcttaggagccaggcgactggggagcggcttcagcactgcagccacgacccgcctggttaggctgcacgcggagagaaccctctgttttcccccactctctctccacctcctcctgccttccccaccccgagtgcggagccagagatcaaaagatgaaaaggcagtcaggtcttcagtagccaaaaaacaaaacaaacaaaaacaaaaaagccgaaataaaagaaaaagataataactcagttcttatttgcacctacttcagtggacactgaatttggaaggtggaggattttgtttttttcttttaagatctgggcatcttttgaatctacccttcaagtattaagagacagactgtgagcctagcagggcagatcttgtccaccgtgtgtcttcttctgcacgagactttgaggctgtcagagcgctttttgcgtggttgctcccgcaagtttccttctctggagcttcccgcaggtgggcagctagctgcagcgactaccgcatcatcacagcctgttgaactcttctgagcaagagaaggggaggcggggtaagggaagtaggtggaagattcagccaagctcaaggatggaagtgcagttagggctgggaagggtctaccctcggccgccgtccaagacctaccgaggagctttccagaatctgttccagagcgtgcgcgaagtgatccagaacccgggccccaggcacccagaggccgcgagcgcagcacctcccggcgccagtttgctgctgctgcagcagcagcagcagcagcagcagcagcagcagcagcagcagcagcagcagcagcagcagcagcagcaagagactagccccaggcagcagcagcagcagcagggtgaggatggttctccccaagcccatcgtagaggccccacaggctacctggtcctggatgaggaacagcaaccttcacagccgcagtcggccctggagtgccaccccgagagaggttgcgtcccagagcctggagccgccgtggccgccagcaaggggctgccgcagcagctgccagcacctccggacgaggatgactcagctgccccatccacgttgtccctgctgggccccactttccccggcttaagcagctgctccgctgaccttaaagacatcctgagcgaggccagcaccatgcaactccttcagcaacagcagcaggaagcagtatccgaaggcagcagcagcgggagagcgagggaggcctcgggggctcccacttcctccaaggacaattacttagggggcacttcgaccatttctgacaacgccaaggagttgtgtaaggcagtgtcggtgtccatgggcctgggtgtggaggcgttggagcatctgagtccaggggaacagcttcggggggattgcatgtacgccccacttttgggagttccacccgctgtgcgtcccactccttgtgccccattggccgaatgcaaaggttctctgctagacgacagcgcaggcaagagcactgaagatactgctgagtattcccctttcaagggaggttacaccaaagggctagaaggcgagagcctaggctgctctggcagcgctgcagcagggagctccgggacacttgaactgccgtctaccctgtctctctacaagtccggagcactggacgaggcagctgcgtaccagagtcgcgactactacaactttccactggctctggccggaccgccgccccctccgccgcctccccatccccacgctcgcatcaagctggagaacccgctggactacggcagcgcctgggcggctgcggcggcgcagtgccgctatggggacctggcgagcctgcatggcgcgggtgcagcgggacccggttctgggtcaccctcagccgccgcttcctcatcctggcacactctcttcacagccgaagaaggccagttgtatggaccgtgtggtggtggtgggggtggtggcggcggcggcggcggcggcggcggcggcggcggcggcggcggcggcggcgaggcgggagctgtagccccctacggctacactcggccccctcaggggctggcgggccaggaaagcgacttcaccgcacctgatgtgtggtaccctggcggcatggtgagcagagtgccctatcccagtcccacttgtgtcaaaagcgaaatgggcccctggatggatagctactccggaccttacggggacatgcgtttggagactgccagggaccatgttttgcccattgactattactttccaccccagaagacctgcctgatctgtggagatgaagcttctgggtgtcactatggagctctcacatgtggaagctgcaaggtcttcttcaaaagagccgctgaagggaaacagaagtacctgtgcgccagcagaaatgattgcactattgataaattccgaaggaaaaattgtccatcttgtcgtcttcggaaatgttatgaagcagggatgactctgggagcccggaagctgaagaaacttggtaatctgaaactacaggaggaaggagaggcttccagcaccaccagccccactgaggagacaacccagaagctgacagtgtcacacattgaaggctatgaatgtcagcccatctttctgaatgtcctggaagccattgagccaggtgtagtgtgtgctggacacgacaacaaccagcccgactcctttgcagccttgctctctagcctcaatgaactgggagagagacagcttgtacacgtggtcaagtgggccaaggccttgcctgattgcgagagagctgcatcagttcacttttgacctgctaatcaagtcacacatggtgagcgtggactttccggaaatgatggcagagatcatctctgtgcaagtgcccaagatcctttctgggaaagtcaagcccatctatttccacacccagtgaagcattggaaaccctatttccccaccccagctcatgccccctttcagatgtcttctgcctgttataactctgcactactcctctgcagtgccttggggaatttcctctattgatgtacagtctgtcatgaacatgttcctgaattctatttgctgggctttttttttctctttctctcctttctttttcttcttccctccctatctaaccctcccatggcaccttcagactttgcttcccattgtggctcctatctgtgttttgaatggtgttgtatgcctttaaatctgtgatgatcctcatatggcccagtgtcaagttgtgcttgtttacagcactactctgtgccagccacacaaacgtttacttatcttatgccacgggaagtttagagagctaagattatctggggaaatcaaaacaaaaacaagcaaacaaaaaaaaaaagcaaaaacaaaacaaaaaataagccaaaaaaccttgctagtgttttttcctcaaaaataaataaataaataaataaatacgtacatacatacacacatacatacaaacatatagaaatccccaaagaggccaatagtgacgagaaggtgaaaattgcaggcccatggggagttactgattttttcatctcctccctccacgggagactttattttctgccaatggctattgccattagagggcagagtgaccccagagctgagttgggcaggggggtggacagagaggagaggacaaggagggcaatggagcatcagtacctgcccacagccttggtccctgggggctagactgctcaactgtggagcaattcattatactgaaaatgtgcttgttgttgaaaatttgtctgcatgttaatgcctcacccccaaacccttttctctctcactctctgcctccaacttcagattgactttcaatagtttttctaagacctttgaactgaatgttctcttcagccaaaacttggcgacttccacagaaaagtctgaccactgagaagaaggagagcagagatttaaccctttgtaaggccccatttggatccaggtctgctttctcatgtgtgagtcagggaggagctggagccagaggagaagaaaatgatagcttggctgttctcctgcttaggacactgactgaatagttaaactctcactgccactaccttttccccacctttaaaagacctgaatgaagttttctgccaaactccgtgaagccacaagcaccttatgtcctcccttcagtgttttgtgggcctgaatttcatcacactgcatttcagccatggtcatcaagcctgtttgcttcttttgggcatgttcacagattctctgttaagagcccccaccaccaagaaggttagcaggccaacagctctgacatctatctgtagatgccagtagtcacaaagatttcttaccaactctcagatcgctggagcccttagacaaactggaaagaaggcatcaaagggatcaggcaagctgggcgtcttgcccttgtcccccagagatgataccctcccagcaagtggagaagttctcacttccttctttagagcagctaaaggggctacccagatcagggttgaagagaaaactcaattaccagggtgggaagaatgaaggcactagaaccagaaaccctgcaaatgctcttcttgtcacccagcatatccacctgcagaagtcatgagaagagagaaggaacaaagaggagactctgactactgaattaaaatcttcagcggcaaagcctaaagccagatggacaccatctggtgagtttactcatcatcctcctctgctgctgattctgggctctgacattgcccatactcactcagattccccacctttgttgctgcctcttagtcagagggaggccaaaccattgagactttctacagaaccatggcttctttcggaaaggtctggttggtgtggctccaatactttgccacccatgaactcagggtgtgccctgggacactggttttatatagtcttttggcacacctgtgttctgttgacttcgttcttcaagcccaagtgcaagggaaaatgtccacctactttctcatcttggcctctgcctccttacttagctcttaatctcatctgttgaactcaagaaatcaagggccagtcatcaagctgcccattttaattgattcactctgtttgttgagaggatagtttctgagtgacatgatatgatccacaagggtttccttccctgatttctgcattgatattaatagccaaacgaacttcaaaacagctttaaataacaagggagaggggaacctaagatgagtaatatgccaatccaagactgctggagaaaactaaagctgacaggttccctttttggggtgggatagacatgttctggttttctttattattacacaatctggctcatgtacaggatcacttttagctgttttaaacagaaaaaaatatccaccactcttttcagttacactaggttacattttaataggtcctttacatctgttttggaatgattttcatcttttgtgatacacagattgaattatatcattttcatatctctccttgtaaatactagaagctctcctttacatttctctatcaaatttttcatctttatgggtttcccaattgtgactcttgtcttcatgaatatatgtttttcatttgcaaaagccaaaaatcagtgaaacagcagtgtaattaaaagcaacaactggattactccaaatttccaaatgacaaaactagggaaaaatagcctacacaagcctttaggcctactctttctgtgcttgggtttgagtgaacaaaggagattttagcttggctctgttctcccatggatgaaaggaggaggattttttttttcttttggccattgatgttctagccaatgtaattgacagaagtctcattttgcatgcgctctgctctacaaacagagttggtatggttggtatactgtactcacctgtgagggactggccactcagacccacttagctggtgagctagaagatgaggatcactcactggaaaagtcacaaggaccatctccaaacaagttggcagtgctcgatgtggacgaagagtgaggaagagaaaaagaaggagcaccagggagaaggctccgtctgtgctgggcagcagacagctgccaggatcacgaactctgtagtcaaagaaaagagtcgtgtggcagtttcagctctcgttcattgggcagctcgcctaggcccagcctctgagctgacatgggagttgttggattctttgtttcatagctttttctatgccataggcaatattgttgttcttggaaagtttattatttttttaactcccttactctgagaaagggatattttgaaggactgtcatatatctttgaaaaaagaaaatctgtaatacatatatttttatgtatgttcactggcactaaaaaatatagagagcttcattctgtcctttgggtagttgctgaggtaattgtccaggttgaaaaataatgtgctgatgctagagtccctctctgtccatactctacttctaaatacatataggcatacatagcaagttttatttgacttgtactttaagagaaaatatgtccaccatccacatgatgcacaaatgagctaacattgagcttcaagtagcttctaagtgtttgtttcattaggcacagcacagatgtggcctttccccccttctctcccttgatatctggcagggcataaaggcccaggccacttcctctgccccttcccagccctgcaccaaagctgcatttcaggagactctctccagacagcccagtaactacccgagcatggcccctgcatagccctggaaaaataagaggctgactgtctacgaattatcttgtgccagttgcccaggtgagagggcactgggccaagggagtggttttcatgtttgacccactacaaggggtcatgggaatcaggaatgccaaagcaccagatcaaatccaaaacttaaagtcaaaataagccattcagcatgttcagtttcttggaaaaggaagtttctacccctgatgcctttgtaggcagatctgttctcaccattaatctttttgaaaatcttttaaagcagtttttaaaaagagagatgaaagcatcacattatataaccaaagattacattgtacctgctaagataccaaaattcataagggcagggggggagcaagcattagtgcctctttgataagctgtccaaagacagactaaaggactctgctggtgactgacttataagagctttgtgggtttttttttccctaataatatacatgtttagaagaattgaaaataatttcgggaaaatgggattatgggtccttcactaagtgattttataagcagaactggctttccttttctctagtagttgctgagcaaattgttgaagctccatcattgcatggttggaaatggagctgttcttagccactgtgtttgctagtgcccatgttagcttatctgaagatgtgaaacccttgctgataagggagcatttaaagtactagattttgcactagagggacagcaggcagaaatccttatttctgcccactttggatggcacaaaaagttatctgcagttgaaggcagaaagttgaaatacattgtaaatgaatatttgtatccatgtttcaaaattgaaatatatatatatatatatatatatatatatatatatatatagtgtgtgtgtgtgttctgatagctttaactttctctgcatctttatatttggttccagatcacacctgatgccatgtacttgtgagagaggatgcagttttgttttggaagctctctcagaacaaacaagacacctggattgatcagttaactaaaagttttctcccctattgggtttgacccacaggtcctgtgaaggagcagagggataaaaagagtagaggacatgatacattgtactttactagttcaagacagatgaatgtggaaagcataaaaactcaatggaactgactgagatttaccacagggaaggcccaaacttggggccaaaagcctacccaagtgattgaccagtggccccctaatgggacctgagctgttggaagaagagaactgttccttggtcttcaccatccttgtgagagaagggcagtttcctgcattggaacctggagcaagcgctctatctttcacacaaattccctcacctgagattgaggtgctcttgttactgggtgtctgtgtgctgtaattctggttttggatatgttctgtaaagattttgacaaatgaaaatgtgtttttctctgttaaaacttgtcagagtactagaagttgtatctctgtaggtgcaggtccatttctgcccacaggtagggtgtttttctttgattaagagattgacacttctgttgcctaggacctcccaactcaaccatttctaggtgaaggcagaaaaatccacattagttactcctcttcagacatttcagctgagataacaaatcttttggaattttttcacccatagaaagagtggtagatatttgaatttagcaggtggagtttcatagtaaaaacagcttttgactcagctttgatttatcctcatttgatttggccagaaagtaggtaatatgcattgattggcttctgattccaattcagtatagcaaggtgctaggttttttcctttccccacctgtctcttagcctggggaattaaatgagaagccttagaatgggtggcccttgtgacctgaaacacttcccacataagctacttaacaagattgtcatggagctgcagattccattgcccaccaaagactagaacacacacatatccatacaccaaaggaaagacaattctgaaatgctgtttctctggtggttccctctctggctgctgcctcacagtatgggaacctgtactctgcagaggtgacaggccagatttgcattatctcacaaccttagcccttggtgctaactgtcctacagtgaagtgcctggggggttgtcctatcccataagccacttggatgctgacagcagccaccatcagaatgacccacgcaaaaaaaagaaaaaaaaaattaaaaagtcccctcacaacccagtgacacctttctgctttcctctagactggaacattgattagggagtgcctcagacatgacattcttgtgctgtccttggaattaatctggcagcaggagggagcagactatgtaaacagagataaaaattaattttcaatattgaaggaaaaaagaaataagaagagagagagaaagaaagcatcacacaaagattttcttaaaagaaacaattttgcttgaaatctctttagatggggctcatttctcacggtggcacttggcctccactgggcagcaggaccagctccaagcgctagtgttctgttctctttttgtaatcttggaatcttttgttgctctaaatacaattaaaaatggcagaaacttgtttgttggactacatgtgtgactttgggtctgtctctgcctctgctttcagaaatgtcatccattgtgtaaaatattggcttactggtctgccagctaaaacttggccacatcccctgttatggctgcaggatcgagttattgttaacaaagagacccaagaaaagctgctaatgtcctcttatcattgttgttaatttgttaaaacataaagaaatctaaaatttc

SEQ ID NO: 107154 - DNA, 3615 bp, Homo sapiens
  Payload ID: 1034
  Gene Symbol: AR
  Gene Name: androgen receptor
  ENST ID: ENST00000504326
  CDS Start-End: 328-2262
gacactgaatttggaaggtggaggattttgtttttttcttttaagatctgggcatcttttgaatctacccttcaagtattaagagacagactgtgagcctagcagggcagatcttgtccaccgtgtgtcttcttctgcacgagactttgaggctgtcagagcgctttttgcgtggttgctcccgcaagtttccttctctggagcttcccgcaggtgggcagctagctgcagcgactaccgcatcatcacagcctgttgaactcttctgagcaagagaaggggaggcggggtaagggaagtaggtggaagattcagccaagctcaaggatggaagtgcagttagggctgggaagggtctaccctcggccgccgtccaagacctaccgaggagctttccagaatctgttccagagcgtgcgcgaagtgatccagaacccgggccccaggcacccagaggccgcgagcgcagcacctcccggcgccagtttgctgctgctgcagcagcagcagcagcagcagcagcagcagcagcagcagcagcagcagcagcagcagcagcagcagcaagagactagccccaggcagcagcagcagcagcagggtgaggatggttctccccaagcccatcgtagaggccccacaggctacctggtcctggatgaggaacagcaaccttcacagccgcagtcggccctggagtgccaccccgagagaggttgcgtcccagagcctggagccgccgtggccgccagcaaggggctgccgcagcagctgccagcacctccggacgaggatgactcagctgccccatccacgttgtccctgctgggccccactttccccggcttaagcagctgctccgctgaccttaaagacatcctgagcgaggccagcaccatgcaactccttcagcaacagcagcaggaagcagtatccgaaggcagcagcagcgggagagcgagggaggcctcgggggctcccacttcctccaaggacaattacttagggggcacttcgaccatttctgacaacgccaaggagttgtgtaaggcagtgtcggtgtccatgggcctgggtgtggaggcgttggagcatctgagtccaggggaacagcttcggggggattgcatgtacgccccacttttgggagttccacccgctgtgcgtcccactccttgtgccccattggccgaatgcaaaggttctctgctagacgacagcgcaggcaagagcactgaagatactgctgagtattcccctttcaagggaggttacaccaaagggctagaaggcgagagcctaggctgctctggcagcgctgcagcagggagctccgggacacttgaactgccgtctaccctgtctctctacaagtccggagcactggacgaggcagctgcgtaccagagtcgcgactactacaactttccactggctctggccggaccgccgccccctccgccgcctccccatccccacgctcgcatcaagctggagaacccgctggactacggcagcgcctgggcggctgcggcggcgcagtgccgctatggggacctggcgagcctgcatggcgcgggtgcagcgggacccggttctgggtcaccctcagccgccgcttcctcatcctggcacactctcttcacagccgaagaaggccagttgtatggaccgtgtggtggtggtgggggtggtggcggcggcggcggcggcggcggcggcggcggcggcggcggcggcggcggcgaggcgggagctgtagccccctacggctacactcggccccctcaggggctggcgggccaggaaagcgacttcaccgcacctgatgtgtggtaccctggcggcatggtgagcagagtgccctatcccagtcccacttgtgtcaaaagcgaaatgggcccctggatggatagctactccggaccttacggggacatgcgtttggagactgccagggaccatgttttgcccattgactattactttccaccccagaagacctgcctgatctgtggagatgaagcttctgggtgtcactatggagctctcacatgtggaagctgcaaggtcttcttcaaaagagccgctgaagggaaacagaagtacctgtgcgccagcagaaatgattgcactattgataaattccgaaggaaaaattgtccatcttgtcgtcttcggaaatgttatgaagcagggatgactctgggagaaaaattccgggttggcaattgcaagcatctcaaaatgaccagaccctgaagaaaggctgacttgcctcattcaaaatgagggctctagagggctctagtggatagtctggagaaacctggcgtctgaggcttaggagcttaggtttttgctcctcaacacagactttgacgttggggttgggggctactctcttgattgctgactccctccagcgggaccaatagtgttttcctacctcacagggatgttgtgaggacgggctgtagaagtaatagtggttaccattcatgtagttgtgagtatcatgattattgtttcctgtaatgtggcttggcattggcaaagtgctttttgattgttcttgatcacatatgatgggggccaggcactgactcaggcggatgcagtgaagctctggctcagtcgcttgcttttcgtggtgtgctgccaggaagaaactttgctgatgggactcaaggtgtcaccttggacaagaagcaactgtgtctgtctgaggttcctgtggccatctttatttgtgtattaggcaattcgtatttcccccttaggttctagccttctggatcccagccagtgacctagatcttagcctcaggccctgtcactgagctgaaggtagtagctgatccacagaagttcagtaaacaaggaccagatttctgcttctccaggagaagaagccagccaacccctctcttcaaacacactgagagactacagtccgactttccctcttacatctagccttactgtagccacactccttgattgctctctcacatcacatgcttctcttcatcagttgtaagcctctcattcttctcccaagccagactcaaatattgtattgatgtcaaagaagaatcacttagagtttggaatatcttgttctctctctgctccatagcttccatattgacaccagtttctttctagtggagaagtggagtctgtgaagccagggaaacacacatgtgagagtcagaaggactctccctgacttgcctggggcctgtctttcccaccttctccagtctgtctaaacacacacacacacacacacacacacacacacacgctctctctctctctccccccccaacacacacacactctctctctctctcacacacacacacatacacacacacttctttctctttcccctgactcagcaacattctggagaaaagccaaggaaggacttcaggaggggagtttcccccttctcagggcagaattttaatctccagaccaacaagaagttccctaatgtggattgaaaggctaatgaggtttatttttaactactttctatttgtttgaatgttgcatatttctactagtgaaattttcccttaataaagccattaatacacc

SEQ ID NO: 107155 - DNA, 3899 bp, Homo sapiens
  Payload ID: 1034
  Gene Symbol: AR
  Gene Name: androgen receptor
  ENST ID: ENST00000514029
  CDS Start-End: 328-2130
gacactgaatttggaaggtggaggattttgtttttttcttttaagatctgggcatcttttgaatctacccttcaagtattaagagacagactgtgagcctagcagggcagatcttgtccaccgtgtgtcttcttctgcacgagactttgaggctgtcagagcgctttttgcgtggttgctcccgcaagtttccttctctggagcttcccgcaggtgggcagctagctgcagcgactaccgcatcatcacagcctgttgaactcttctgagcaagagaaggggaggcggggtaagggaagtaggtggaagattcagccaagctcaaggatggaagtgcagttagggctgggaagggtctaccctcggccgccgtccaagacctaccgaggagctttccagaatctgttccagagcgtgcgcgaagtgatccagaacccgggccccaggcacccagaggccgcgagcgcagcacctcccggcgccagtttgctgctgctgcagcagcagcagcagcagcagcagcagcagcagcagcagcagcagcagcagcagcagcagcagcagcaagagactagccccaggcagcagcagcagcagcagggtgaggatggttctccccaagcccatcgtagaggccccacaggctacctggtcctggatgaggaacagcaaccttcacagccgcagtcggccctggagtgccaccccgagagaggttgcgtcccagagcctggagccgccgtggccgccagcaaggggctgccgcagcagctgccagcacctccggacgaggatgactcagctgccccatccacgttgtccctgctgggccccactttccccggcttaagcagctgctccgctgaccttaaagacatcctgagcgaggccagcaccatgcaactccttcagcaacagcagcaggaagcagtatccgaaggcagcagcagcgggagagcgagggaggcctcgggggctcccacttcctccaaggacaattacttagggggcacttcgaccatttctgacaacgccaaggagttgtgtaaggcagtgtcggtgtccatgggcctgggtgtggaggcgttggagcatctgagtccaggggaacagcttcggggggattgcatgtacgccccacttttgggagttccacccgctgtgcgtcccactccttgtgccccattggccgaatgcaaaggttctctgctagacgacagcgcaggcaagagcactgaagatactgctgagtattcccctttcaagggaggttacaccaaagggctagaaggcgagagcctaggctgctctggcagcgctgcagcagggagctccgggacacttgaactgccgtctaccctgtctctctacaagtccggagcactggacgaggcagctgcgtaccagagtcgcgactactacaactttccactggctctggccggaccgccgccccctccgccgcctccccatccccacgctcgcatcaagctggagaacccgctggactacggcagcgcctgggcggctgcggcggcgcagtgccgctatggggacctggcgagcctgcatggcgcgggtgcagcgggacccggttctgggtcaccctcagccgccgcttcctcatcctggcacactctcttcacagccgaagaaggccagttgtatggaccgtgtggtggtggtgggggtggtggcggcggcggcggcggcggcggcggcggcggcggcggcggcggcggcggcgaggcgggagctgtagccccctacggctacactcggccccctcaggggctggcgggccaggaaagcgacttcaccgcacctgatgtgtggtaccctggcggcatggtgagcagagtgccctatcccagtcccacttgtgtcaaaagcgaaatgggcccctggatggatagctactccggaccttacggggacatgcgtttggagactgccagggaccatgttttgcccattgactattactttccaccccagaagacctgcctgatctgtggagatgaagcttctgggtgtcactatggagctctcacatgtggaagctgcaaggtcttcttcaaaagagccgctgaaggatttttcagaatgaacaaattaaaagaatcataatcagacactaaccccaagccatactgcatggcagcaccaatgggactgacagaaaacaacagaaataggaagaaatcctacagagaaacaaacttgaaagctgtctcatggcctttgaatcatacttaagttttatgatggaaggatacgactatgaagaaagacacagagcaacatcagacagtcaagaatttcagagccagctggcatgcagtggacctcatgccagcccattttatgactatttagggaaacagaagtacctgtgcgccagcagaaatgattgcactattgataaattccgaaggaaaaattgtccatcttgtcgtcttcggaaatgttatgaagcagggatgactctgggagaaaaattccgggttggcaattgcaagcatctcaaaatgaccagaccctgaagaaaggctgacttgcctcattcaaaatgagggctctagagggctctagtggatagtctggagaaacctggcgtctgaggcttaggagcttaggtttttgctcctcaacacagactttgacgttggggttgggggctactctcttgattgctgactccctccagcgggaccaatagtgttttcctacctcacagggatgttgtgaggacgggctgtagaagtaatagtggttaccattcatgtagttgtgagtatcatgattattgtttcctgtaatgtggcttggcattggcaaagtgctttttgattgttcttgatcacatatgatgggggccaggcactgactcaggcggatgcagtgaagctctggctcagtcgcttgcttttcgtggtgtgctgccaggaagaaactttgctgatgggactcaaggtgtcaccttggacaagaagcaactgtgtctgtctgaggttcctgtggccatctttatttgtgtattaggcaattcgtatttcccccttaggttctagccttctggatcccagccagtgacctagatcttagcctcaggccctgtcactgagctgaaggtagtagctgatccacagaagttcagtaaacaaggaccagatttctgcttctccaggagaagaagccagccaacccctctcttcaaacacactgagagactacagtccgactttccctcttacatctagccttactgtagccacactccttgattgctctctcacatcacatgcttctcttcatcagttgtaagcctctcattcttctcccaagccagactcaaatattgtattgatgtcaaagaagaatcacttagagtttggaatatcttgttctctctctgctccatagcttccatattgacaccagtttctttctagtggagaagtggagtctgtgaagccagggaaacacacatgtgagagtcagaaggactctccctgacttgcctggggcctgtctttcccaccttctccagtctgtctaaacacacacacacacacacacacacacacacacacgctctctctctctctccccccccaacacacacacactctctctctctctcacacacacacacatacacacacacttctttctctttcccctgactcagcaacattctggagaaaagccaaggaaggacttcaggaggggagtttcccccttctcagggcagaattttaatctccagaccaacaagaagttccctaatgtggattgaaaggctaatgaggtttatttttaactactttctatttgtttgaatgttgcatatttctactagtgaaattttcccttaataaagccattaatacacc

SEQ ID NO: 107156 - DNA, 3532 bp, Homo sapiens
  Payload ID: 1034
  Gene Symbol: AR
  Gene Name: androgen receptor
  ENST ID: ENST00000613054
  CDS Start-End: 328-2046
gacactgaatttggaaggtggaggattttgtttttttcttttaagatctgggcatcttttgaatctacccttcaagtattaagagacagactgtgagcctagcagggcagatcttgtccaccgtgtgtcttcttctgcacgagactttgaggctgtcagagcgctttttgcgtggttgctcccgcaagtttccttctctggagcttcccgcaggtgggcagctagctgcagcgactaccgcatcatcacagcctgttgaactcttctgagcaagagaaggggaggcggggtaagggaagtaggtggaagattcagccaagctcaaggatggaagtgcagttagggctgggaagggtctaccctcggccgccgtccaagacctaccgaggagctttccagaatctgttccagagcgtgcgcgaagtgatccagaacccgggccccaggcacccagaggccgcgagcgcagcacctcccggcgccagtttgctgctgctgcagcagcagcagcagcagcagcagcagcagcagcagcagcagcagcagcagcagcagcagcagcagcaagagactagccccaggcagcagcagcagcagcagggtgaggatggttctccccaagcccatcgtagaggccccacaggctacctggtcctggatgaggaacagcaaccttcacagccgcagtcggccctggagtgccaccccgagagaggttgcgtcccagagcctggagccgccgtggccgccagcaaggggctgccgcagcagctgccagcacctccggacgaggatgactcagctgccccatccacgttgtccctgctgggccccactttccccggcttaagcagctgctccgctgaccttaaagacatcctgagcgaggccagcaccatgcaactccttcagcaacagcagcaggaagcagtatccgaaggcagcagcagcgggagagcgagggaggcctcgggggctcccacttcctccaaggacaattacttagggggcacttcgaccatttctgacaacgccaaggagttgtgtaaggcagtgtcggtgtccatgggcctgggtgtggaggcgttggagcatctgagtccaggggaacagcttcggggggattgcatgtacgccccacttttgggagttccacccgctgtgcgtcccactccttgtgccccattggccgaatgcaaaggttctctgctagacgacagcgcaggcaagagcactgaagatactgctgagtattcccctttcaagggaggttacaccaaagggctagaaggcgagagcctaggctgctctggcagcgctgcagcagggagctccgggacacttgaactgccgtctaccctgtctctctacaagtccggagcactggacgaggcagctgcgtaccagagtcgcgactactacaactttccactggctctggccggaccgccgccccctccgccgcctccccatccccacgctcgcatcaagctggagaacccgctggactacggcagcgcctgggcggctgcggcggcgcagtgccgctatggggacctggcgagcctgcatggcgcgggtgcagcgggacccggttctgggtcaccctcagccgccgcttcctcatcctggcacactctcttcacagccgaagaaggccagttgtatggaccgtgtggtggtggtgggggtggtggcggcggcggcggcggcggcggcggcggcggcggcggcggcggcggcggcgaggcgggagctgtagccccctacggctacactcggccccctcaggggctggcgggccaggaaagcgacttcaccgcacctgatgtgtggtaccctggcggcatggtgagcagagtgccctatcccagtcccacttgtgtcaaaagcgaaatgggcccctggatggatagctactccggaccttacggggacatgcgaaatacccgaagaaagagactctggaaactcattatcaggtctatcaactcttgtatttgttctcccagggaaacagaagtacctgtgcgccagcagaaatgattgcactattgataaattccgaaggaaaaattgtccatcttgtcgtcttcggaaatgttatgaagcagggatgactctgggagaaaaattccgggttggcaattgcaagcatctcaaaatgaccagaccctgaagaaaggctgacttgcctcattcaaaatgagggctctagagggctctagtggatagtctggagaaacctggcgtctgaggcttaggagcttaggtttttgctcctcaacacagactttgacgttggggttgggggctactctcttgattgctgactccctccagcgggaccaatagtgttttcctacctcacagggatgttgtgaggacgggctgtagaagtaatagtggttaccattcatgtagttgtgagtatcatgattattgtttcctgtaatgtggcttggcattggcaaagtgctttttgattgttcttgatcacatatgatgggggccaggcactgactcaggcggatgcagtgaagctctggctcagtcgcttgcttttcgtggtgtgctgccaggaagaaactttgctgatgggactcaaggtgtcaccttggacaagaagcaactgtgtctgtctgaggttcctgtggccatctttatttgtgtattaggcaattcgtatttcccccttaggttctagccttctggatcccagccagtgacctagatcttagcctcaggccctgtcactgagctgaaggtagtagctgatccacagaagttcagtaaacaaggaccagatttctgcttctccaggagaagaagccagccaacccctctcttcaaacacactgagagactacagtccgactttccctcttacatctagccttactgtagccacactccttgattgctctctcacatcacatgcttctcttcatcagttgtaagcctctcattcttctcccaagccagactcaaatattgtattgatgtcaaagaagaatcacttagagtttggaatatcttgttctctctctgctccatagcttccatattgacaccagtttctttctagtggagaagtggagtctgtgaagccagggaaacacacatgtgagagtcagaaggactctccctgacttgcctggggcctgtctttcccaccttctccagtctgtctaaacacacacacacacacacacacacacacacacacgctctctctctctctccccccccaacacacacacactctctctctctctcacacacacacacatacacacacacttctttctctttcccctgactcagcaacattctggagaaaagccaaggaaggacttcaggaggggagtttcccccttctcagggcagaattttaatctccagaccaacaagaagttccctaatgtggattgaaaggctaatgaggtttatttttaactactttctatttgtttgaatgttgcatatttctactagtgaaattttcccttaataaagccattaatacacc

SEQ ID NO: 107157 - DNA, 3896 bp, Homo sapiens
  Payload ID: 1034
  Gene Symbol: AR
  Gene Name: androgen receptor
  ENST ID: ENST00000612010
  CDS Start-End: 328-2256
gacactgaatttggaaggtggaggattttgtttttttcttttaagatctgggcatcttttgaatctacccttcaagtattaagagacagactgtgagcctagcagggcagatcttgtccaccgtgtgtcttcttctgcacgagactttgaggctgtcagagcgctttttgcgtggttgctcccgcaagtttccttctctggagcttcccgcaggtgggcagctagctgcagcgactaccgcatcatcacagcctgttgaactcttctgagcaagagaaggggaggcggggtaagggaagtaggtggaagattcagccaagctcaaggatggaagtgcagttagggctgggaagggtctaccctcggccgccgtccaagacctaccgaggagctttccagaatctgttccagagcgtgcgcgaagtgatccagaacccgggccccaggcacccagaggccgcgagcgcagcacctcccggcgccagtttgctgctgctgcagcagcagcagcagcagcagcagcagcagcagcagcagcagcagcagcagcagcagcagcagcagcaagagactagccccaggcagcagcagcagcagcagggtgaggatggttctccccaagcccatcgtagaggccccacaggctacctggtcctggatgaggaacagcaaccttcacagccgcagtcggccctggagtgccaccccgagagaggttgcgtcccagagcctggagccgccgtggccgccagcaaggggctgccgcagcagctgccagcacctccggacgaggatgactcagctgccccatccacgttgtccctgctgggccccactttccccggcttaagcagctgctccgctgaccttaaagacatcctgagcgaggccagcaccatgcaactccttcagcaacagcagcaggaagcagtatccgaaggcagcagcagcgggagagcgagggaggcctcgggggctcccacttcctccaaggacaattacttagggggcacttcgaccatttctgacaacgccaaggagttgtgtaaggcagtgtcggtgtccatgggcctgggtgtggaggcgttggagcatctgagtccaggggaacagcttcggggggattgcatgtacgccccacttttgggagttccacccgctgtgcgtcccactccttgtgccccattggccgaatgcaaaggttctctgctagacgacagcgcaggcaagagcactgaagatactgctgagtattcccctttcaagggaggttacaccaaagggctagaaggcgagagcctaggctgctctggcagcgctgcagcagggagctccgggacacttgaactgccgtctaccctgtctctctacaagtccggagcactggacgaggcagctgcgtaccagagtcgcgactactacaactttccactggctctggccggaccgccgccccctccgccgcctccccatccccacgctcgcatcaagctggagaacccgctggactacggcagcgcctgggcggctgcggcggcgcagtgccgctatggggacctggcgagcctgcatggcgcgggtgcagcgggacccggttctgggtcaccctcagccgccgcttcctcatcctggcacactctcttcacagccgaagaaggccagttgtatggaccgtgtggtggtggtgggggtggtggcggcggcggcggcggcggcggcggcggcggcggcggcggcggcggcggcgaggcgggagctgtagccccctacggctacactcggccccctcaggggctggcgggccaggaaagcgacttcaccgcacctgatgtgtggtaccctggcggcatggtgagcagagtgccctatcccagtcccacttgtgtcaaaagcgaaatgggcccctggatggatagctactccggaccttacggggacatgcgtttggagactgccagggaccatgttttgcccattgactattactttccaccccagaagacctgcctgatctgtggagatgaagcttctgggtgtcactatggagctctcacatgtggaagctgcaaggtcttcttcaaaagagccgctgaaggatttttcagaatgaacaaattaaaagaatcatcagacactaaccccaagccatactgcatggcagcaccaatgggactgacagaaaacaacagaaataggaagaaatcctacagagaaacaaacttgaaagctgtctcatggcctttgaatcatacttaagttttatgatggaaggatacgactatgaagaaagacacagagcaacatcagacagtcaagaatttcagagccagctggcatgcagtggacctcatgccagcccattttatgactatttagggaaacagaagtacctgtgcgccagcagaaatgattgcactattgataaattccgaaggaaaaattgtccatcttgtcgtcttcggaaatgttatgaagcagggatgactctgggagaaaaattccgggttggcaattgcaagcatctcaaaatgaccagaccctgaagaaaggctgacttgcctcattcaaaatgagggctctagagggctctagtggatagtctggagaaacctggcgtctgaggcttaggagcttaggtttttgctcctcaacacagactttgacgttggggttgggggctactctcttgattgctgactccctccagcgggaccaatagtgttttcctacctcacagggatgttgtgaggacgggctgtagaagtaatagtggttaccattcatgtagttgtgagtatcatgattattgtttcctgtaatgtggcttggcattggcaaagtgctttttgattgttcttgatcacatatgatgggggccaggcactgactcaggcggatgcagtgaagctctggctcagtcgcttgcttttcgtggtgtgctgccaggaagaaactttgctgatgggactcaaggtgtcaccttggacaagaagcaactgtgtctgtctgaggttcctgtggccatctttatttgtgtattaggcaattcgtatttcccccttaggttctagccttctggatcccagccagtgacctagatcttagcctcaggccctgtcactgagctgaaggtagtagctgatccacagaagttcagtaaacaaggaccagatttctgcttctccaggagaagaagccagccaacccctctcttcaaacacactgagagactacagtccgactttccctcttacatctagccttactgtagccacactccttgattgctctctcacatcacatgcttctcttcatcagttgtaagcctctcattcttctcccaagccagactcaaatattgtattgatgtcaaagaagaatcacttagagtttggaatatcttgttctctctctgctccatagcttccatattgacaccagtttctttctagtggagaagtggagtctgtgaagccagggaaacacacatgtgagagtcagaaggactctccctgacttgcctggggcctgtctttcccaccttctccagtctgtctaaacacacacacacacacacacacacacacacacacgctctctctctctctccccccccaacacacacacactctctctctctctcacacacacacacatacacacacacttctttctctttcccctgactcagcaacattctggagaaaagccaaggaaggacttcaggaggggagtttcccccttctcagggcagaattttaatctccagaccaacaagaagttccctaatgtggattgaaaggctaatgaggtttatttttaactactttctatttgtttgaatgttgcatatttctactagtgaaattttcccttaataaagccattaatacacc

SEQ ID NO: 107158 - DNA, 10676 bp, Homo sapiens
  Payload ID: 1034
  Gene Symbol: AR
  Gene Name: androgen receptor
  ENST ID: ENST00000612452
  CDS Start-End: 1686-3899
cgagatcccggggagccagcttgctgggagagcgggacggtccggagcaagcccagaggcagaggaggcgacagagggaaaaagggccgagctagccgctccagtgctgtacaggagccgaagggacgcaccacgccagccccagcccggctccagcgacagccaacgcctcttgcagcgcggcggcttcgaagccgccgcccggagctgccctttcctcttcggtgaagtttttaaaagctgctaaagactcggaggaagcaaggaaagtgcctggtaggactgacggctgcctttgtcctcctcctctccaccccgcctccccccaccctgccttccccccctcccccgtcttctctcccgcagctgcctcagtcggctactctcagccaacccccctcaccacccttctccccacccgcccccccgcccccgtcggcccagcgctgccagcccgagtttgcagagaggtaactccctttggctgcgagcgggcgagctagctgcacattgcaaagaaggctcttaggagccaggcgactggggagcggcttcagcactgcagccacgacccgcctggttaggctgcacgcggagagaaccctctgttttcccccactctctctccacctcctcctgccttccccaccccgagtgcggagccagagatcaaaagatgaaaaggcagtcaggtcttcagtagccaaaaaacaaaacaaacaaaaacaaaaaagccgaaataaaagaaaaagataataactcagttcttatttgcacctacttcagtggacactgaatttggaaggtggaggattttgtttttttcttttaagatctgggcatcttttgaatctacccttcaagtattaagagacagactgtgagcctagcagggcagatcttgtccaccgtgtgtcttcttctgcacgagactttgaggctgtcagagcgctttttgcgtggttgctcccgcaagtttccttctctggagcttcccgcaggtgggcagctagctgcagcgactaccgcatcatcacagcctgttgaactcttctgagcaagagaaggggaggcggggtaagggaagtaggtggaagattcagccaagctcaaggatggaagtgcagttagggctgggaagggtctaccctcggccgccgtccaagacctaccgaggagctttccagaatctgttccagagcgtgcgcgaagtgatccagaacccgggccccaggcacccagaggccgcgagcgcagcacctcccggcgccagtttgctgctgctgcagcagcagcagcagcagcagcagcagcagcagcagcagcagcagcagcagcagcagcagcagcagcaagagactagccccaggcagcagcagcagcagcagggtgaggatggttctccccaagcccatcgtagaggccccacaggctacctggtcctggatgaggaacagcaaccttcacagccgcagtcggccctggagtgccaccccgagagaggttgcgtcccagagcctggagccgccgtggccgccagcaaggggctgccgcagcagctgccagcacctccggacgaggatgactcagctgccccatccacgttgtccctgctgggccccactttccccggcttaagcagctgctccgctgaccttaaagacatcctgagcgaggccagcaccatgcaactccttcagcaacagcagcaggaagcagtatccgaaggcagcagcagcgggagagcgagggaggcctcgggggctcccacttcctccaaggacaattacttagggggcacttcgaccatttctgacaacgccaaggagttgtgtaaggcagtgtcggtgtccatgggcctgggtgtggaggcgttggagcatctgagtccaggggaacagcttcggggggattgcatgtacgccccacttttgggagttccacccgctgtgcgtcccactccttgtgccccattggccgaatgcaaaggttctctgctagacgacagcgcaggcaagagcactgaagatactgctgagtattcccctttcaagggaggttacaccaaagggctagaaggcgagagcctaggctgctctggcagcgctgcagcagggagctccgggacacttgaactgccgtctaccctgtctctctacaagtccggagcactggacgaggcagctgcgtaccagagtcgcgactactacaactttccactggctctggccggaccgccgccccctccgccgcctccccatccccacgctcgcatcaagctggagaacccgctggactacggcagcgcctgggcggctgcggcggcgcagtgccgctatggggacctggcgagcctgcatggcgcgggtgcagcgggacccggttctgggtcaccctcagccgccgcttcctcatcctggcacactctcttcacagccgaagaaggccagttgtatggaccgtgtggtggtggtgggggtggtggcggcggcggcggcggcggcggcggcggcggcggcggcggcggcggcggcgaggcgggagctgtagccccctacggctacactcggccccctcaggggctggcgggccaggaaagcgacttcaccgcacctgatgtgtggtaccctggcggcatggtgagcagagtgccctatcccagtcccacttgtgtcaaaagcgaaatgggcccctggatggatagctactccggaccttacggggacatgcgtttggagactgccagggaccatgttttgcccattgactattactttccaccccagaagacctgcctgatctgtggagatgaagcttctgggtgtcactatggagctctcacatgtggaagctgcaaggtcttcttcaaaagagccgctgaagggaaacagaagtacctgtgcgccagcagaaatgattgcactattgataaattccgaaggaaaaattgtccatcttgtcgtcttcggaaatgttatgaagcagggatgactctgggagcccggaagctgaagaaacttggtaatctgaaactacaggaggaaggagaggcttccagcaccaccagccccactgaggagacaacccagaagctgacagtgtcacacattgaaggctatgaatgtcagcccatctttctgaatgtcctggaagccattgagccaggtgtagtgtgtgctggacacgacaacaaccagcccgactcctttgcagccttgctctctagcctcaatgaactgggagagagacagcttgtacacgtggtcaagtgggccaaggccttgcctggcttccgcaacttacacgtggacgaccagatggctgtcattcagtactcctggatggggctcatggtgtttgccatgggctggcgatccttcaccaatgtcaactccaggatgctctacttcgcccctgatctggttttcaatgagtaccgcatgcacaagtcccggatgtacagccagtgtgtccgaatgaggcacctctctcaagagtttggatggctccaaatcaccccccaggaattcctgtgcatgaaagcactgctactcttcagcattaaagccaatttatttgctagaattccagtggatgggctgaaaaatcaaaaattctttgatgaacttcgaatgaactacatcaaggaactcgatcgtatcattgcatgcaaaagaaaaaatcccacatcctgctcaagacgcttctaccagctcaccaagctcctggactccgtgcagcctattgcgagagagctgcatcagttcacttttgacctgctaatcaagtcacacatggtgagcgtggactttccggaaatgatggcagagatcatctctgtgcaagtgcccaagatcctttctgggaaagtcaagcccatctatttccacacccagtgaagcattggaaaccctatttccccaccccagctcatgccccctttcagatgtcttctgcctgttataactctgcactactcctctgcagtgccttggggaatttcctctattgatgtacagtctgtcatgaacatgttcctgaattctatttgctgggctttttttttctctttctctcctttctttttcttcttccctccctatctaaccctcccatggcaccttcagactttgcttcccattgtggctcctatctgtgttttgaatggtgttgtatgcctttaaatctgtgatgatcctcatatggcccagtgtcaagttgtgcttgtttacagcactactctgtgccagccacacaaacgtttacttatcttatgccacgggaagtttagagagctaagattatctggggaaatcaaaacaaaaacaagcaaacaaaaaaaaaaagcaaaaacaaaacaaaaaataagccaaaaaaccttgctagtgttttttcctcaaaaataaataaataaataaataaatacgtacatacatacacacatacatacaaacatatagaaatccccaaagaggccaatagtgacgagaaggtgaaaattgcaggcccatggggagttactgattttttcatctcctccctccacgggagactttattttctgccaatggctattgccattagagggcagagtgaccccagagctgagttgggcaggggggtggacagagaggagaggacaaggagggcaatggagcatcagtacctgcccacagccttggtccctgggggctagactgctcaactgtggagcaattcattatactgaaaatgtgcttgttgttgaaaatttgtctgcatgttaatgcctcacccccaaacccttttctctctcactctctgcctccaacttcagattgactttcaatagtttttctaagacctttgaactgaatgttctcttcagccaaaacttggcgacttccacagaaaagtctgaccactgagaagaaggagagcagagatttaaccctttgtaaggccccatttggatccaggtctgctttctcatgtgtgagtcagggaggagctggagccagaggagaagaaaatgatagcttggctgttctcctgcttaggacactgactgaatagttaaactctcactgccactaccttttccccacctttaaaagacctgaatgaagttttctgccaaactccgtgaagccacaagcaccttatgtcctcccttcagtgttttgtgggcctgaatttcatcacactgcatttcagccatggtcatcaagcctgtttgcttcttttgggcatgttcacagattctctgttaagagcccccaccaccaagaaggttagcaggccaacagctctgacatctatctgtagatgccagtagtcacaaagatttcttaccaactctcagatcgctggagcccttagacaaactggaaagaaggcatcaaagggatcaggcaagctgggcgtcttgcccttgtcccccagagatgataccctcccagcaagtggagaagttctcacttccttctttagagcagctaaaggggctacccagatcagggttgaagagaaaactcaattaccagggtgggaagaatgaaggcactagaaccagaaaccctgcaaatgctcttcttgtcacccagcatatccacctgcagaagtcatgagaagagagaaggaacaaagaggagactctgactactgaattaaaatcttcagcggcaaagcctaaagccagatggacaccatctggtgagtttactcatcatcctcctctgctgctgattctgggctctgacattgcccatactcactcagattccccacctttgttgctgcctcttagtcagagggaggccaaaccattgagactttctacagaaccatggcttctttcggaaaggtctggttggtgtggctccaatactttgccacccatgaactcagggtgtgccctgggacactggttttatatagtcttttggcacacctgtgttctgttgacttcgttcttcaagcccaagtgcaagggaaaatgtccacctactttctcatcttggcctctgcctccttacttagctcttaatctcatctgttgaactcaagaaatcaagggccagtcatcaagctgcccattttaattgattcactctgtttgttgagaggatagtttctgagtgacatgatatgatccacaagggtttccttccctgatttctgcattgatattaatagccaaacgaacttcaaaacagctttaaataacaagggagaggggaacctaagatgagtaatatgccaatccaagactgctggagaaaactaaagctgacaggttccctttttggggtgggatagacatgttctggttttctttattattacacaatctggctcatgtacaggatcacttttagctgttttaaacagaaaaaaatatccaccactcttttcagttacactaggttacattttaataggtcctttacatctgttttggaatgattttcatcttttgtgatacacagattgaattatatcattttcatatctctccttgtaaatactagaagctctcctttacatttctctatcaaatttttcatctttatgggtttcccaattgtgactcttgtcttcatgaatatatgtttttcatttgcaaaagccaaaaatcagtgaaacagcagtgtaattaaaagcaacaactggattactccaaatttccaaatgacaaaactagggaaaaatagcctacacaagcctttaggcctactctttctgtgcttgggtttgagtgaacaaaggagattttagcttggctctgttctcccatggatgaaaggaggaggattttttttttcttttggccattgatgttctagccaatgtaattgacagaagtctcattttgcatgcgctctgctctacaaacagagttggtatggttggtatactgtactcacctgtgagggactggccactcagacccacttagctggtgagctagaagatgaggatcactcactggaaaagtcacaaggaccatctccaaacaagttggcagtgctcgatgtggacgaagagtgaggaagagaaaaagaaggagcaccagggagaaggctccgtctgtgctgggcagcagacagctgccaggatcacgaactctgtagtcaaagaaaagagtcgtgtggcagtttcagctctcgttcattgggcagctcgcctaggcccagcctctgagctgacatgggagttgttggattctttgtttcatagctttttctatgccataggcaatattgttgttcttggaaagtttattatttttttaactcccttactctgagaaagggatattttgaaggactgtcatatatctttgaaaaaagaaaatctgtaatacatatatttttatgtatgttcactggcactaaaaaatatagagagcttcattctgtcctttgggtagttgctgaggtaattgtccaggttgaaaaataatgtgctgatgctagagtccctctctgtccatactctacttctaaatacatataggcatacatagcaagttttatttgacttgtactttaagagaaaatatgtccaccatccacatgatgcacaaatgagctaacattgagcttcaagtagcttctaagtgtttgtttcattaggcacagcacagatgtggcctttccccccttctctcccttgatatctggcagggcataaaggcccaggccacttcctctgccccttcccagccctgcaccaaagctgcatttcaggagactctctccagacagcccagtaactacccgagcatggcccctgcatagccctggaaaaataagaggctgactgtctacgaattatcttgtgccagttgcccaggtgagagggcactgggccaagggagtggttttcatgtttgacccactacaaggggtcatgggaatcaggaatgccaaagcaccagatcaaatccaaaacttaaagtcaaaataagccattcagcatgttcagtttcttggaaaaggaagtttctacccctgatgcctttgtaggcagatctgttctcaccattaatctttttgaaaatcttttaaagcagtttttaaaaagagagatgaaagcatcacattatataaccaaagattacattgtacctgctaagataccaaaattcataagggcagggggggagcaagcattagtgcctctttgataagctgtccaaagacagactaaaggactctgctggtgactgacttataagagctttgtgggtttttttttccctaataatatacatgtttagaagaattgaaaataatttcgggaaaatgggattatgggtccttcactaagtgattttataagcagaactggctttccttttctctagtagttgctgagcaaattgttgaagctccatcattgcatggttggaaatggagctgttcttagccactgtgtttgctagtgcccatgttagcttatctgaagatgtgaaacccttgctgataagggagcatttaaagtactagattttgcactagagggacagcaggcagaaatccttatttctgcccactttggatggcacaaaaagttatctgcagttgaaggcagaaagttgaaatacattgtaaatgaatatttgtatccatgtttcaaaattgaaatatatatatatatatatatatatatatatatatatatatagtgtgtgtgtgtgttctgatagctttaactttctctgcatctttatatttggttccagatcacacctgatgccatgtacttgtgagagaggatgcagttttgttttggaagctctctcagaacaaacaagacacctggattgatcagttaactaaaagttttctcccctattgggtttgacccacaggtcctgtgaaggagcagagggataaaaagagtagaggacatgatacattgtactttactagttcaagacagatgaatgtggaaagcataaaaactcaatggaactgactgagatttaccacagggaaggcccaaacttggggccaaaagcctacccaagtgattgaccagtggccccctaatgggacctgagctgttggaagaagagaactgttccttggtcttcaccatccttgtgagagaagggcagtttcctgcattggaacctggagcaagcgctctatctttcacacaaattccctcacctgagattgaggtgctcttgttactgggtgtctgtgtgctgtaattctggttttggatatgttctgtaaagattttgacaaatgaaaatgtgtttttctctgttaaaacttgtcagagtactagaagttgtatctctgtaggtgcaggtccatttctgcccacaggtagggtgtttttctttgattaagagattgacacttctgttgcctaggacctcccaactcaaccatttctaggtgaaggcagaaaaatccacattagttactcctcttcagacatttcagctgagataacaaatcttttggaattttttcacccatagaaagagtggtagatatttgaatttagcaggtggagtttcatagtaaaaacagcttttgactcagctttgatttatcctcatttgatttggccagaaagtaggtaatatgcattgattggcttctgattccaattcagtatagcaaggtgctaggttttttcctttccccacctgtctcttagcctggggaattaaatgagaagccttagaatgggtggcccttgtgacctgaaacacttcccacataagctacttaacaagattgtcatggagctgcagattccattgcccaccaaagactagaacacacacatatccatacaccaaaggaaagacaattctgaaatgctgtttctctggtggttccctctctggctgctgcctcacagtatgggaacctgtactctgcagaggtgacaggccagatttgcattatctcacaaccttagcccttggtgctaactgtcctacagtgaagtgcctggggggttgtcctatcccataagccacttggatgctgacagcagccaccatcagaatgacccacgcaaaaaaaagaaaaaaaaaattaaaaagtcccctcacaacccagtgacacctttctgctttcctctagactggaacattgattagggagtgcctcagacatgacattcttgtgctgtccttggaattaatctggcagcaggagggagcagactatgtaaacagagataaaaattaattttcaatattgaaggaaaaaagaaataagaagagagagagaaagaaagcatcacacaaagattttcttaaaagaaacaattttgcttgaaatctctttagatggggctcatttctcacggtggcacttggcctccactgggcagcaggaccagctccaagcgctagtgttctgttctctttttgtaatcttggaatcttttgttgctctaaatacaattaaaaatggcagaaacttgtttgttggactacatgtgtgactttgggtctgtctctgcctctgctttcagaaatgtcatccattgtgtaaaatattggcttactggtctgccagctaaaacttggccacatcccctgttatggctgcaggatcgagttattgttaacaaagagacccaagaaaagctgctaatgtcctcttatcattgttgttaatttgttaaaacataaagaaatctaaaatttc

SEQ ID NO: 107159 - DNA, 891 bp, Homo sapiens
  Payload ID: 1035
  Gene Symbol: ADTRP
  Gene Name: androgen-dependent TFPI-regulating protein
  Uniprot ID: Q96IZ2
  ENST ID: ENST00000229583
  CDS Start-End: 45-791
agaaagtactcaagacattcacggtgccccggtcagcactcgccatgacgaagacttctacatgcatataccacttccttgttctgagctggtatactttcctcaattattacatctcacaggaaggaaaagacgaggtgaaacccaaaatcttggcaaatggtgcaaggtggaaatatatgacgctgcttaatctgctcaagaacaggactgctgggtttgacatctaccagccaggaagctttaggcagctcttgcagaccattttctacggggtcacctgcctggatgatgtgctgaaaagaaccaaagggggaaaagacattaagttcctaactgccttcagagacctgcttttcaccactctggcttttcctgtatccacgtttgtatttttggcattctggatcctctttctctacaatcgagatctcatttaccccaaggtcctagatactgtcatccccgtgtggctgaatcatgcaatgcacactttcatattccccatcacattggctgaagtcgtcctcaggcctcactcctatccatcaaagaagacaggactcaccttgctggctgctgccagcattgcttacatcagccgcatcctatggctctactttgagacgggtacctgggtgtatcctgtgtttgccaaactcagcctcttgggtctagcagctttcttctctctcagctacgtcttcatcgccagcatctacctacttggagagaagctcaaccactggaaatggggtgacatgaggcagccacggaagaagaggaagtaattgcacaccattttccaagaaccaagaaagaagaaaacacaagagatttttctcatcttttttttttttttctggtggagggaggtggtggaggaacata

SEQ ID NO: 107160 - DNA, 991 bp, Homo sapiens
  Payload ID: 1035
  Gene Symbol: ADTRP
  Gene Name: androgen-dependent TFPI-regulating protein
  ENST ID: ENST00000379415
  CDS Start-End: 486-991
agtctccaaaccagagccaccattcttgcgaagtgagttcccacccacccgagagggagatccttagctcctcatcatcgccagtcatgatgatgagatactctggaagacatccattctgtggaaaccccacaaggtgaggccacgtctaaatagcttacagagtcttgctctttcacccaggctggagtgctgtggtgttatctcagctcactgcagtttcaagctcctgggctcaagtgatcttacctcagccttctgagtagctgggactccaggcatctgaaaaccagcagtaatcctgcctctgaagtttatcaggaaaggagcttaaaagagaaccaaattcagcctgtgttggaactctcagtcccagaggggtgtggtttgtagctctccggcctgctgttggacttaggctgtgacccacagaaggacgccagaaagtactcaagacattcacggtgccccggtcagcactcgccatgacgaagacttctacatgcatataccacttccttgttctgagctggtatactttcctcaattattacatctcacaggaaggaaaagacgaggtgaaacccaaaatcttggcaaatggtgcaaggtggaaatatatgacgctgcttaatctgctcttgcagaccattttctacggggtcacctgcctggatgatgtgctgaaaagaaccaaagggggaaaagacattaagttcctaactgccttcagagacctgcttttcaccactctggcttttcctgtatccacgtttgtatttttggcattctggatcctctttctctacaatcgagatctcatttaccccaaggtcctagatactgtcatccccgtgtggctgaatcatgcaatgcacactttcatattccccatcacattggctgaagtcgtcctcaggcctcactcctatccatcaaagaagacaggactcaccttgctggctgctgccagcattgcttacatcagccg

SEQ ID NO: 107161 - DNA, 2058 bp, Homo sapiens
  Payload ID: 1035
  Gene Symbol: ADTRP
  Gene Name: androgen-dependent TFPI-regulating protein
  Uniprot ID: Q96IZ2
  ENST ID: ENST00000414691
  CDS Start-End: 412-1104
gaaaagaaaagagactacagccatggaagtatttcgctagattttcctagtatttcatgcttacttcatttaaccatgcccctgccccagtgccctagtgaaacagtacaatgtacagctcttgcattgctacctgcccttctcaaagcccacatgttgtattttatgcaaatctacagattatctatcattatctaaatgcaggcatctgaaaaccagcagtaatcctgcctctgaagtttatcaggaaaggagcttaaaagagaaccaaattcagcctgtgttggaactctcagtcccagaggggtgtggtttgtagctctccggcctgctgttggacttaggctgtgacccacagaaggacgccagaaagtactcaagacattcacggtgccccggtcagcactcgccatgacgaagacttctacatgcatataccacttccttgttctgagctggtatactttcctcaattattacatctcacaggaaggaaaagacgaggtgaaacccaaaatcttggcaaatggtgcaaggtggaaatatatgacgctgcttaatctgctcttgcagaccattttctacggggtcacctgcctggatgatgtgctgaaaagaaccaaagggggaaaagacattaagttcctaactgccttcagagacctgcttttcaccactctggcttttcctgtatccacgtttgtatttttggcattctggatcctctttctctacaatcgagatctcatttaccccaaggtcctagatactgtcatccccgtgtggctgaatcatgcaatgcacactttcatattccccatcacattggctgaagtcgtcctcaggcctcactcctatccatcaaagaagacaggactcaccttgctggctgctgccagcattgcttacatcagccgcatcctatggctctactttgagacgggtacctgggtgtatcctgtgtttgccaaactcagcctcttgggtctagcagctttcttctctctcagctacgtcttcatcgccagcatctacctacttggagagaagctcaaccactggaaatggggtgacatgaggcagccacggaagaagaggaagtaattgcacaccattttccaagaaccaagaaagaagaaaacacaagagatttttctcatcttttttttttttttctggtggagggaggtggtggaggaacatagcaaagtaggagggacagagagtgatacttaaatttaataagaggttcgtgaaggtagcttaacttgagaactcttggttttttgaaaggttgactgcacatgccaaaaacaactcctgctatctcagaattaattatctttgaccttcgtggaggatggtctctggttaaaatctggccaaagaaactcacataaacttggtgttagagaacatctagagagagagagaggaacttagagtcatttaaactcttcagtttacagagaaggatgctgaggacctagatgagaagttacctgcaaaaggcaaaagggttacttagtgtcagaaccaaggcaatgacttctctctcccagatctcctagctactggtcctgggccatttttttttttttaaataatcccaactttctttaaaagacaagcatttcagtaagctagttattttcatgggttgctcatccatttttttcagtgatctaaaaatgtagggagatggctactactgaagttgtctgtctacttgggataatagcaaattaattgaagacaatgggaaagtaagttataaaaaatactgggaaatctgtttctcttctgagcaagcattcagggcaggtataaacatcaaacatagtgacattgtcaaaacctcttccatttgaacattgattaattcatcaaataaatggtatagtaataaattttgcttgcagaagaatctggatgggaagtgatagaattataagggctgttgagattgctttgctacaaagcacttttctgaattagtgtgtggtttaacaaagctgatttccagatgcttaacaaggattcatgatccctgctgtg

SEQ ID NO: 107162 - DNA, 539 bp, Homo sapiens
  Payload ID: 1035
  Gene Symbol: ADTRP
  Gene Name: androgen-dependent TFPI-regulating protein
  ENST ID: ENST00000485323
  CDS Start-End: 1-261
atgacgaagacttctacatgcatataccacttccttgttctgagctggtatactttcctcaattattacatctcacaggaaggaaaagacgaggtgaaacccaaaatcttggcaaatggtgcaaggtggaaatatatgacgctgcttaatctgtctagctcaagaacaggactgctgggtttgacatctaccagccaggaagctttaggcagctcttgcagaccattttctacggggtcacctgcctggatgatgtgctgaaaagaaccaaagggggaaaagacattaagttcctaactgccttcagagacctgcttttcaccactctggcttttcctgtatccacgtttgtatttttggcattctggatcctctttctctacaatcgagatctcatttaccccaaggtcctagatactgtcatccccgtgtggctgaatcatgcaatggaattctgttccaaatgatcgttaatgtagaggacgggagctgctgattgtgggcagggttaataaaattcatcagatcaatggccagta

SEQ ID NO: 107163 - DNA, 817 bp, Homo sapiens
  Payload ID: 1035
  Gene Symbol: ADTRP
  Gene Name: androgen-dependent TFPI-regulating protein
  ENST ID: ENST00000506810
  CDS Start-End: 314-817
acctgagtcagagcctagtccggcatgctgcctagcccagccacgtctcatcctattcatggcagagcggggactctcaccctctcccagcaatgtctaaagtcaggcatctgaaaaccagcagtaatcctgcctctgaagtttatcaggaaaggagcttaaaagagaaccaaattcagcctgtgttggaactctcagtcccagaggggtgtggtttgtagctctccggcctgctgttggacttaggctgtgacccacagaaggacgccagaaagtactcaagacattcacggtgccccggtcagcactcgccatgacgaagacttctacatgcatataccacttccttgttctgagctggtatactttcctcaattattacatctcacaggaaggaaaagacgaggtgaaacccaaaatcttggcaaatggtgcaaggtggaaatatatgacgctgcttaatctgctcttgcagaccattttctacggggtcacctgcctggatgatgtgctgaaaagaaccaaagggggaaaagacattaagttcctaactgccttcagagacctgcttttcaccactctggcttttcctgtatccacgtttgtatttttggcattctggatcctctttctctacaatcgagatctcatttaccccaaggtcctagatactgtcatccccgtgtggctgaatcatgcaatgcacactttcatattccccatcacattggctgaagtcgtcctcaggcctcactcctatccatcaaagaagacaggactcaccttgctggctgctgccagcattgcttacatcagc

SEQ ID NO: 107164 - DNA, 687 bp, Homo sapiens
  Payload ID: 1035
  Gene Symbol: ADTRP
  Gene Name: androgen-dependent TFPI-regulating protein
  ENST ID: ENST00000505099
  CDS Start-End: 1-362
atctcatttaccccaaggtcctagatactgtcatccccgtgtggctgaatcatgcaatgcacactttcatattccccatcacattggctgaagtcgtcctcaggcctcactcctatccatcaaagaagacaggactcaccttgctggctgctgccagcattgcttacatcagccgcatcctatggctctactttgagacgggtacctgggtgtatcctgtgtttgccaaactcagcctcttgggtctagcagctttcttctctctcagctacgtcttcatcgccagcatctacctacttggagagaagctcaaccactggaaatggggtgacatgaggcagccacggaagaagaggaagtaattgcacaccattttccaagaaccaagaaagaagaaaacacaagagatttttctcatcttttttttttttttctggtggagggaggtggtggaggaacatagcaaagtaggagggacagagagtgatacttaaatttaataagagagcaaagcagtaccgggtcatccaaaaactttatttaaaaaacaaaacagaaatgtgtccacatcttgcagagctggacaaaagaaggtggtcaagagatcccaaattggtggaaactgtccccgttacaggaggaggaaggacgctgccaccactaccccagggactggcctatactcat

SEQ ID NO: 107165 - DNA, 526 bp, Homo sapiens
  Payload ID: 1035
  Gene Symbol: ADTRP
  Gene Name: androgen-dependent TFPI-regulating protein
  ENST ID: ENST00000503285
  CDS Start-End: 1-351
gctgaagtcgtcctcaggcctcactcctatccatcaaagaagacaggactcaccttgctggctgctgccagcattgcttacatcagccgcatcctatggctctactttgagacgggtacctgggtgtatcctgtgtttgccaaactcagcctcttgggtctagcagctttcttctctctcagctacgtcttcatcgccagcatctacctacttggagagaagctcaaccactggaaatgggtttctgttcagatcttgcaaagatggaggctagaatctgttggaatctgcttccagtggcccgattggaagtcaccagccaagcaccaactggtcaagaatatcaggtgaaatatcagggctataaaaatatttctagcccttgctactatctgacagcagttaaaggaataaaacaagtcggggtgaatctaacttcctatctgccaactaggatactttctactgggaaaaatgcttctcaatcaagaaaatatttataataaacataattttccaattacaa

SEQ ID NO: 107166 - DNA, 1202 bp, Homo sapiens
  Payload ID: 1036
  Gene Symbol: AIG1
  Gene Name: androgen-induced 1
  Uniprot ID: Q9NVV5
  ENST ID: ENST00000275235
  CDS Start-End: 26-763
cagccggtccaggcctctggcgaacatggcgcttgtcccctgccaggtgctgcggatggcaatcctgctgtcttactgctctatcctgtgtaactacaaggccatcgaaatgccctcacaccagacctacggagggagctggaaattcctgacgttcattgatctggttatccaggctgtcttttttggcatctgtgtgctgactgatctttccagtcttctgactcgaggaagtgggaaccaggagcaagagaggcagctcaagaagctcatctctctccgggactggatgttagctgtgttggcctttcctgttggggtttttgttgtagcagtgttctggatcatttatgcctatgacagagagatgatatacccgaagctgctggataattttatcccagggtggctgaatcacggaatgcacacgacggttctgccctttatattaatcgagatgaggacatcgcaccatcagtatcccagcaggagcagcggacttaccgccatatgtaccttctctgttggctatatattatgggtgtgctgggtgcatcatgtaactggcatgtgggtgtaccctttcctggaacacattggcccaggagccagaatcatcttctttgggtctacaaccatcttaatgaacttcctgtacctgctgggagaagttctgaacaactatatctgggatacacagaaaaagcctccatcttggcaagatatgaaaattaagtttatgtacctaggaccatctagttagttccacaaagacagatgttttgtgccaagtaagtatcatcctcatttacaagaggggtcacaaactgctggcctcccccaacttctacctatcaagttctgttaggcctacatcgtggaatttttgtttttgaatcagtattttaaaattgggtgattttggctgggcgcagtggctcatgcctgtaatcccggcactttgggagactgaggcaggtggatcacgaggtcaagagatggagaccatcctggccaacatggtgaaatcccatctctactaaaaatacaaaaattagccaggcatggtggcgtgtgcctgtagtcccaggtactcgggaggctgaggcaggagaactgcttgaacccaggaggcagaggttgcagtgagctgagatcatgccactgcaccccagcctggcaacagaacaagactccatctc

SEQ ID NO: 107167 - DNA, 1321 bp, Homo sapiens
  Payload ID: 1036
  Gene Symbol: AIG1
  Gene Name: androgen-induced 1
  ENST ID: ENST00000344492
  CDS Start-End: 12-683
aggtgctgcggatggcaatcctgctgtcttactgctctatcctgtgtaactacaaggccatcgaaatgccctcacaccagacctacggagggagctggaaattcctgacgttcattgatctggttatccaggctgtcttttttggcatctgtgtgctgactgatctttccagtcttctgactcgaggaagtgggaaccaggagcaagagaggcagctcaagaagctcatctctctccgggactggatgttagctgtgttggcctttcctgttggggtttttgttgtagcagtgttctggatcatttatgcctatgacagagagatgatatacccgaagctgctggataattttatcccagggtggctgaatcacggaatgcacacgacggttctgccctttatattaatcgagatgaggacatcgcaccatcagtatcccagcaggagcagcggacttaccgccatatgtaccttctctgttggctatatattatgggtgtgctgggtgcatcatgtaactggcatgggtgtaccctttcctggaacaattggcccaggagccagaatcatcttctttgggtctacaaccatcttaatgaacttcctgtacctgctgggagaagttctgaacaactatatctgggatacagaaaagtatggaagaagagaaagaaaagcctaaattggaatgagatccaagtctaaacgcaagagctagattgagccgccattgaagactccttcccctcgggcattggcagtgggggagaaaaggcttcaaaggaacttggtggcatcagcacccccctcccccaatgaggacaccttttatatataaatatgtataaacatagaatacagttgtttccaaaagaactcaccctcactgtgtgttaaagaattcttcccaaagtcattactgataataacattttttccttttctagttttaaaaccagaattggaccttggatttttattttggcaattgtaactccatctaatcaagaaagaataaaagtttattgcacttctttttgagaaatatgttaaagtcaaaggggcatatatagagtaaggcttttgtgtatttaatcctaaaggtggctgtaatcatgaacctaggccaccatggggacctgagagggaaggggacagatgtttctcattgcataatgtcacagttgcctcaaatgagcaccatttgtaataatgatgtcaatttcatgaaaagcctgagtgtattgcatctcttgatttaatcatgtgaaacttttcctagatgcaaatgctgactaataaagacaaagccaccctgaa

SEQ ID NO: 107168 - DNA, 1395 bp, Homo sapiens
  Payload ID: 1036
  Gene Symbol: AIG1
  Gene Name: androgen-induced 1
  Uniprot ID: Q9NVV5
  ENST ID: ENST00000357847
  CDS Start-End: 51-767
cctcacgcccgccctccttgccgcccagccggtccaggcctctggcgaacatggcgcttgtcccctgccaggtgctgcggatggcaatcctgctgtcttactgctctatcctgtgtaactacaaggccatcgaaatgccctcacaccagacctacggagggagctggaaattcctgacgttcattgatctggttatccaggctgtcttttttggcatctgtgtgctgactgatctttccagtcttctgactcgaggaagtgggaaccaggagcaagagaggcagctcaagaagctcatctctctccgggactggatgttagctgtgttggcctttcctgttggggtttttgttgtagcagtgttctggatcatttatgcctatgacagagagatgatatacccgaagctgctggataattttatcccagggtggctgaatcacggaatgcacacgacggttctgccctttatattaatcgagatgaggacatcgcaccatcagtatcccagcaggagcagcggacttaccgccatatgtaccttctctgttggctatatattatgggtgtgctgggtgcatcatgtaactggcatgtgggtgtaccctttcctggaacacattggcccaggagccagaatcatcttctttgggtctacaaccatcttaatgaacttcctgtacctgctgggagaagttctgaacaactatatctgggatacacagaaaagtatggaagaagagaaagaaaagcctaaattggaatgagatccaagtctaaacgcaagagctagattgagccgccattgaagactccttcccctcgggcattggcagtgggggagaaaaggcttcaaaggaacttggtggcatcagcacccccctcccccaatgaggacaccttttatatataaatatgtataaacatagaatacagttgtttccaaaagaactcaccctcactgtgtgttaaagaattcttcccaaagtcattactgataataacattttttccttttctagttttaaaaccagaattggaccttggatttttattttggcaattgtaactccatctaatcaagaaagaataaaagtttattgcacttctttttgagaaatatgttaaagtcaaaggggcatatatagagtaaggcttttgtgtatttaatcctaaaggtggctgtaatcatgaacctaggccaccatggggacctgagagggaaggggacagatgtttctcattgcataatgtcacagttgcctcaaatgagcaccatttgtaataatgatgtcaatttcatgaaaagcctgagtgtattgcatctcttgatttaatcatgtgaaacttttcctagatgcaaatgctgactaataaagacaaagccaccctgaa

SEQ ID NO: 107169 - DNA, 559 bp, Homo sapiens
  Payload ID: 1036
  Gene Symbol: AIG1
  Gene Name: androgen-induced 1
  ENST ID: ENST00000367596
  CDS Start-End: 26-169
cagccggtccaggcctctggcgaacatggcgcttgtcccctgccaggtgctgcggatggcaatcctgctgtcttactgctctatcctgtgtaactacaaggccatcgaaatgccctcacaccagacctacggagggagctggaaattcctgacgttcattgatctgtgattgcgtgtgaaggcctggctgcccccgcagcggcaccttctgaaccactcaccgttacctggtagctgggtacccttacctggcaactgggggacaaatggaggtggggcgcagccaggtggtgggctctttggagggggacaccgaactgcttctaagaggtgacacgggaagaatcttcaacaaaagcatcggacctgatcctgaatggcctgagacccattcgccctcaaggtgcttttcagagcacccaccgtgggatgaacttgttgcaactgaaggaaactgggtattgtctagtgatttggaacttcacctgaaagaaccaaatccttctcataagggagagaaagcacctaataaagttgtcttctttgcatctgttttttt

SEQ ID NO: 107170 - DNA, 727 bp, Homo sapiens
  Payload ID: 1036
  Gene Symbol: AIG1
  Gene Name: androgen-induced 1
  ENST ID: ENST00000367601
  CDS Start-End: 150-727
cgcccactagccacagggcccgcttccccctggagatcagcgcgcacttcccgagccctcgtagcactcagaggtcgcatccacacctgggatgcctagggggcgcctcctggccgggtgtcccgggaccctgcgaacgcaggagcagaatgacgaaggtgctgcggatggcaatcctgctgtcttactgctctatcctgtgtaactacaaggccatcgaaatgccctcacaccagacctacggagggagctggaaattcctgacgttcattgatctggttatccaggctgtcttttttggcatctgtgtgctgactgatctttccagtcttctgactcgaggaagtgggaaccaggagcaagagaggcagctcaagaagctcatctctctccgggactggatgttagctgtgttggcctttcctgttggggtttttgttgtagcagtgttctggatcatttatgcctatgacagagagatgatatacccgaagctgctggataattttatcccagggtggctgaatcacggaatgcacacgacggttctgccctttatattaatcgagatgaggacatcgcaccatcagtatcccagcaggagcagcggacttaccgccatatgtaccttctctgttggctatatattatgggtgtgctgggtgcatcatgtaactggcatgtgggtgtaccctttcctggaacacattggcccaggagccagaat

SEQ ID NO: 107171 - DNA, 444 bp, Homo sapiens
  Payload ID: 1036
  Gene Symbol: AIG1
  Gene Name: androgen-induced 1
  ENST ID: ENST00000447498
  CDS Start-End: 74-444
cgcccccgcgcgcccggcgcctccctcacgcccgccctccttgccgcccagccggtccaggcctctggcgaacatggcgcttgtcccctgccaggtgctgcggatggcaatcctgctgtcttactgctctatcctgtgtaactacaaggccatcgaaatgccctcacaccagacctacggagggagctggaaattcctgacgttcattgatctgtttgttgtagcagtgttctggatcatttatgcctatgacagagagatgatatacccgaagctgctggataattttatcccagggtggctgaatcacggaatgcacacgacggttctgccctttatattaatcgagatgaggacatcgcaccatcagtatcccagcaggagcagcggacttaccgccatatgtaccttctctgttggctatatattatgggtgtgctgggt

SEQ ID NO: 107172 - DNA, 593 bp, Homo sapiens
  Payload ID: 1036
  Gene Symbol: AIG1
  Gene Name: androgen-induced 1
  ENST ID: ENST00000458219
  CDS Start-End: 179-593
gcattgatttctctacggagtagcattcaaatatgtaactgatcatggactccaggttatccaggctgtcttttttggcatctgtgtgctgactgatctttccagtcttctgactcgaggaagtgggaaccaggagcaagagaggcagctcaagaagctcatctctctccgggactggatgttagctgtgttggcctttcctgttggggtttttgttgtagcagtgttctggatcatttatgcctatgacagagagatgatatacccgaagctgctggataattttatcccagggtggctgaatcacggaatgcacacgacggttctgccctttatattaatcgagatgaggacatcgcaccatcagtatcccagcaggagcagcggacttaccgccatatgtaccttctctgttggctatatattatgggtgtgctgggtgcatcatgtaactggcatgtgggtgtaccctttcctggaacacattggcccaggagccagaatcatcttctttgggtctacaaccatcttaatgaacttcctgtacctgctgggagaagttctgaacaactatatctgggatacacagaaaa

SEQ ID NO: 107173 - DNA, 3393 bp, Homo sapiens
  Payload ID: 1036
  Gene Symbol: AIG1
  Gene Name: androgen-induced 1
  Uniprot ID: Q9NVV5
  ENST ID: ENST00000494282
  CDS Start-End: 26-439
cagccggtccaggcctctggcgaacatggcgcttgtcccctgccaggtgctgcggatggcaatcctgctgtcttactgctctatcctgtgtaactacaaggccatcgaaatgccctcacaccagacctacggagggagctggaaattcctgacgttcattgatctggttatccaggctgtcttttttggcatctgtgtgctgactgatctttccagtcttctgactcgaggaagtgggaaccaggagcaagagaggcagctcaagaagctcatctctctccgggactggatgttagctgtgttggcctttcctgttggggtttttgttgtagcagtgttctggatcatttatgcctatgacagagagatgatatacccgaagctgctggataattttatcccagggtggctgaatcacggaatgcatttcaaagcttaaagttttcttggcacgcttttcaaacgcccatctgactttgaagcaggctgcctctccacagaaagcttgctccagcaatgactaaaggattgacctggtgccatgcatgctgctctgcacaagaaggacatttggaaatgaccttgaagcgaagttttgccaagttgatgaaatacgggccttcaagaagtgccatttctcaagcgatgtacagaagggtatccgcagcattgtcaaaaattaccccttaatttggtgttggatgaacatgaatttttaacctccataaggaatgatacttgctcttgattttattagttgcattttgtaacaggttggaaaaattaggtaatggagaactttggcataccacttttgtttcttttaggtgatttttaaaaaacatttgctgaaggagaggttgatgctcaaagggtacagtgataaatggagagacgggagtttaaaatgaaggataagccgcaaatgaggatgaagttaatggatagagaaaagatgggaggaagaggtatctctctttactcgtaagctgcccatcgatatgatttagactctaggagaggggcgtttctttcctcagtaggcacactcatagagtaaactgttgccgctgtttaaacatgttaattgatgttgacaccagttgttgctatacagttttccattttactgagcgatgtatttatgttgctgcataatgtcgcctgattgcacttctcatgctggtgaagttggctgacatttcaggctctggataacatgaagctgtgctttaaccttatttggaagtcagggttagagtggcactggaaggtctccttcagcttcccttcctgtgacctgcctactataaccctggcaaggctgagacagtccaagtttggggcagtcaaggtgggacagcagaagatttcagggtacaagtcatctattctcttatgccagctctcagatttgtatataaaatctgattctacacttcttttaacaaataataaataaataaataggaccatccaacccctctagagctctctaaggagactgtagaagacttgtggccactctcattttaaagattctaataatctccacaaagtaatcctgggaaacatacatctgtaagaccagggaaacatactggcaatagcaacttcccagaacattcctttttacactgcctgggatttttcaataagaaatttggcatttctgtaaatttaaagtgtattcagtaaaattaatgcgtttttttcttaaaagctcaagccttccagactcatcattttgtagttaaaaaagtaagccatgcaactgagataaaagtcaaagttatagattataactgtttgcacaactgttcacatttttaactttttttattttttggagactttttaagagtctcactgtgtcatccaggctggaatacacagtggcactatcatggctcaccacacccttaaactgcagggctcaagcaatcctcctgcctcagccccccaagtagctgggaccacagatgtggaccaccacccctggctacttttttaaaaatttttttgtagagacaatgggctcactatgtttcccaagctagagacaatggcctcattatgtttcccaggctggtctcgaactcctggcctcaagcgatcctcctgcctcagccttcctgaagtcctaggattacatgcatgagctaccacacccagcccctgctcacattttatatagtaacttattttaagaatagtaaagtatttgcaaaatagttttttaatacagtaatttattatatattgaaatcaagcttgatgatatttcattaggttttgctgagtgtcatatgctaagttatttgcttatgaatttttctccaattgcctgtatttggtaagtttgcatggaaagttctgacaggaaactcagaaatatttcattgttttaccctactatcttttttgatgtgtcttaaagttgatttgctttaaattgcagtatcatcctttttttctgtacctaaatgtttttaactgaagaacacaatttccctcaaaaccctcatccctaatttagagccctcttatattaatatgagtcattttaaatgtatttcctgaaacacttctcaacttcgtaaataaaaaagagatatatcttagtccattcaggctactataacaaaatagcacaattgggtggcttataaacaacataaatttatttatcatagttctagagcctgggaagtccaagagctgggtgccagcatggttgggttctgatgaggatcctcttccagattacagacttccagcttcttgctgtgtcctcacatggtggaaggaacaagtaatctctctggagcctcttttaaaagcccaccaatcccattcattgaggattccaccccagtgacctaatcacttcccaaagggccatctcctaatgctataaccttagaggttagggtttcaacatatgaattttgaggggacagaaacattcagcccatagcaggatgagaaaaagaaaggaaagtacaacaaagaacatcaaccataaggaacaccatgacttctgatatttaatatcatggatcacagattgtaggagtcgagaaacagaataaaaagacaaggcccaggcccagtgagcttttgatgcttgaggctcctcatgcccttgctctcccactgacctcagtgctcagcactggctttcttctcctggtgatattttccatttatcttttggtgtaaacattttagagatgagagaagtagggagcttatcattatttagtctgatcagacaatatcttcacttttaagttatgttcagaatttcattgtcctgttctttttaagaatcatatgagattatttttgtgtatgtgaataaactatgaagcattttcttacaaaaaa

SEQ ID NO: 107174 - DNA, 3636 bp, Homo sapiens
  Payload ID: 1036
  Gene Symbol: AIG1
  Gene Name: androgen-induced 1
  Uniprot ID: Q9NVV5
  ENST ID: ENST00000629020
  CDS Start-End: 28-432
cccagccggtccaggcctctggcgaacatggcgcttgtcccctgccaggtgctgcggatggcaatcctgctgtcttactgctctatcctgtgtaactacaaggccatcgaaatgccctcacaccagacctacggagggagctggaaattcctgacgttcattgatctggttatccaggctgtcttttttggcatctgtgtgctgactgatctttccagtcttctgactcgaggaagtgggaaccaggagcaagagaggcagctcaagaagctcatctctctccgggactggatgttagctgtgttggcctttcctgttggggtttttgttgtagcagtgttctggatcatttatgcctatgacagagagatgatatacccgaagctgctggataattttatcccagggtggctgaatcacggaatgctatagcaactagattccaccactttgggcttttacacagaactacagtatgatcagcttggttgaagtttggcactcgacactctgctcaattgaagacatatgcacaaaatcacttaccacattttttaacctgtttttcacactgggtaggcctgtaatatttgcataaaaatatgaaaagcaaccttctgcagggagagaaggcaattaaaagatgttgcgacctttctttctgcagcatttcaaagcttaaagttttcttggcacgcttttcaaacgcccatctgactttgaagcaggctgcctctccacagaaagcttgctccagcaatgactaaaggattgacctggtgccatgcatgctgctctgcacaagaaggacatttggaaatgaccttgaagcgaagttttgccaagttgatgaaatacgggccttcaagaagtgccatttctcaagcgatgtacagaagggtatccgcagcattgtcaaaaattaccccttaatttggtgttggatgaacatgaatttttaacctccataaggaatgatacttgctcttgattttattagttgcattttgtaacaggttggaaaaattaggtaatggagaactttggcataccacttttgtttcttttaggtgatttttaaaaaacatttgctgaaggagaggttgatgctcaaagggtacagtgataaatggagagacgggagtttaaaatgaaggataagccgcaaatgaggatgaagttaatggatagagaaaagatgggaggaagaggtatctctctttactcgtaagctgcccatcgatatgatttagactctaggagaggggcgtttctttcctcagtaggcacactcatagagtaaactgttgccgctgtttaaacatgttaattgatgttgacaccagttgttgctatacagttttccattttactgagcgatgtatttatgttgctgcataatgtcgcctgattgcacttctcatgctggtgaagttggctgacatttcaggctctggataacatgaagctgtgctttaaccttatttggaagtcagggttagagtggcactggaaggtctccttcagcttcccttcctgtgacctgcctactataaccctggcaaggctgagacagtccaagtttggggcagtcaaggtgggacagcagaagatttcagggtacaagtcatctattctcttatgccagctctcagatttgtatataaaatctgattctacacttcttttaacaaataataaataaataaataggaccatccaacccctctagagctctctaaggagactgtagaagacttgtggccactctcattttaaagattctaataatctccacaaagtaatcctgggaaacatacatctgtaagaccagggaaacatactggcaatagcaacttcccagaacattcctttttacactgcctgggatttttcaataagaaatttggcatttctgtaaatttaaagtgtattcagtaaaattaatgcgtttttttcttaaaagctcaagccttccagactcatcattttgtagttaaaaaagtaagccatgcaactgagataaaagtcaaagttatagattataactgtttgcacaactgttcacatttttaactttttttattttttggagactttttaagagtctcactgtgtcatccaggctggaatacacagtggcactatcatggctcaccacacccttaaactgcagggctcaagcaatcctcctgcctcagccccccaagtagctgggaccacagatgtggaccaccacccctggctacttttttaaaaatttttttgtagagacaatgggctcactatgtttcccaagctagagacaatggcctcattatgtttcccaggctggtctcgaactcctggcctcaagcgatcctcctgcctcagccttcctgaagtcctaggattacatgcatgagctaccacacccagcccctgctcacattttatatagtaacttattttaagaatagtaaagtatttgcaaaatagttttttaatacagtaatttattatatattgaaatcaagcttgatgatatttcattaggttttgctgagtgtcatatgctaagttatttgcttatgaatttttctccaattgcctgtatttggtaagtttgcatggaaagttctgacaggaaactcagaaatatttcattgttttaccctactatcttttttgatgtgtcttaaagttgatttgctttaaattgcagtatcatcctttttttctgtacctaaatgtttttaactgaagaacacaatttccctcaaaaccctcatccctaatttagagccctcttatattaatatgagtcattttaaatgtatttcctgaaacacttctcaacttcgtaaataaaaaagagatatatcttagtccattcaggctactataacaaaatagcacaattgggtggcttataaacaacataaatttatttatcatagttctagagcctgggaagtccaagagctgggtgccagcatggttgggttctgatgaggatcctcttccagattacagacttccagcttcttgctgtgtcctcacatggtggaaggaacaagtaatctctctggagcctcttttaaaagcccaccaatcccattcattgaggattccaccccagtgacctaatcacttcccaaagggccatctcctaatgctataaccttagaggttagggtttcaacatatgaattttgaggggacagaaacattcagcccatagcaggatgagaaaaagaaaggaaagtacaacaaagaacatcaaccataaggaacaccatgacttctgatatttaatatcatggatcacagattgtaggagtcgagaaacagaataaaaagacaaggcccaggcccagtgagcttttgatgcttgaggctcctcatgcccttgctctcccactgacctcagtgctcagcactggctttcttctcctggtgatattttccatttatcttttggtgtaaacattttagagatgagagaagtagggagcttatcattatttagtctgatcagacaatatcttcacttttaagttatgttcagaatttcattgtcctgttctttttaagaatcatatgagattatttttgtgtatgtgaataaactatgaagcattttcttacaaaaaa

SEQ ID NO: 107175 - DNA, 918 bp, Homo sapiens
  Payload ID: 1037
  Gene Symbol: ADGB
  Gene Name: androglobin
  ENST ID: ENST00000326916
  CDS Start-End: 141-918
actgccgaaattccaacggcatcgcactgtgcggcctcttctgaggttcctctctcattgggcagggatgtgttcttcctcggtctcatcattgcatctctagcactagtgggagatgtcaataagtgtttaatgaatgaatgcatgaacatgccacaccagtgacctcagcttatggtgaaagacacgaggagttaattaacttaggaagcccagactcccacactattagtgagggacaaaaatcttcagtaacttccaaaacaacaaggaaaggcaaagaaaagtcttctgagaaagaaaagacagccaaagaaaaacaagcacctcgctttgagcctcagatatccactgttcaccctcaacaagaagacccaaataaaccctactggattttgaggttggtcactgaacacaatgaatcagaattatttgaagtgaaaaaggatacagaaagggcagatgaaatccgagccatgaaacaagcctgggagacaactgagccaggaagagcaatcaaggcttctcaggctcgtttgcattaccttagcgggttcattaagaaaacatctgatgctgagagtccgcctatatctgaaagccaaactaaaccaaaagaagaagtagaaacagctgcacgtggcgtaaaagaaccaaactcaaagaattctgcaggttcagagagcaaagagatgacacaaacaggatcagggagtgcggtgtggaagaagtggcaattgaccaaaggcttgagggatgtggcaaaatccacgagtagcgaaagtggaggagtgtcttcaccagggaaagaagagcgcgagcagagcacacggaaggaaaacattcaaacaggacctcgtacacgatctccaacaattttggaaacatctccacgacttattcgaaaagcactagaat

SEQ ID NO: 107176 - DNA, 590 bp, Homo sapiens
  Payload ID: 1037
  Gene Symbol: ADGB
  Gene Name: androglobin
  ENST ID: ENST00000367489
  CDS Start-End: 1-339
gatgaattgaatcagcagcaggcaatgcaaaaggcggaagaaattcatcagtttcgacagcataggaccagagtccttagcattcgaaacattgaccaagaagagcggttgaagttaaaggatgaagtcctggatatgtataaggaaatgcaggactccttagatgaagcccgacagaaaattttcgacatccgggaagagtacagaaacaaattgctggaagctgagcacctaaagctggaagctctctctgctcaggaagccgccatgaagctggagacagaaaagatgaccccagctcctgacacacagaaaaaaaagaaaggaaagaaaaagtaaccaggggatgtccaataccaccctgcttctggagagaaaaaatttatttgtaatgatctttaactgcctgctgataagatattgggccaactgaaaatagaaattgttctttcttagaaatattttaatgctaacttgttagttttcctcagaaagctagtatttgaagccattcgagtttaagatgctctaatttcaataaaatagcttccaaatatttaaaatgtaataaaatatatgtttgacactct

SEQ ID NO: 107177 - DNA, 2123 bp, Homo sapiens
  Payload ID: 1037
  Gene Symbol: ADGB
  Gene Name: androglobin
  ENST ID: ENST00000367490
  CDS Start-End: 1-1878
gttgcagatactcttcaaaaagtttgggctgtattggaaatgaatttagaacagtatgcagtttctctcttaagactaatgtttaaaagcaagtgcaagtctttggaatcttatccatgctatcaagatgaagaaactaagattgcttttgcagattatactgtgacttatcaagaacagccaccaaattcttggtttatagtattcagagaaacatttttggttcatcaagacatgattttggttcccaaagtatatactacacttccaatctgtatcctacacattgttaataatgacacaatggagcaagtgccaaaggtgttccaaaaagtggtgccttatctttataccaagaataagaagggatacacttttgtggcggaagcatttacaggcgacacatatgtagcagcctcacgatggaaactgcgtctcatcggttcttctgctccactgccatgcctctctcgagactctccatgcaattcctttgccataaaggaaatccgagattactacatacccaatgataagaaaattttattcaggtattcggttaaagttctaacaccacaacctgctacaatacaggtacgcacatccaaaccagatgcattcatcaagctgcaggtcctagaaaatgaagaaactatggtgagctccactggaaaaggccaagctataatcccagcatttcacttcttgaagagtgagaaaggtttgagctcccagtcttatggtgaaagacacgaggagttaattaacttaggaagcccagactcccacactattagtgagggacaaaaatcttcagtaacttccaaaacaacaaggaaaggcaaagaaaagtcttctgagaaagaaaagacagccaaagaaaaacaagcacctcgctttgagcctcagatatccactgttcaccctcaacaagaagacccaaataaaccctactggattttgaggttggtcactgaacacaatgaatcagaattatttgaagtgaaaaaggatacagaaagggcagatgaaatccgagccatgaaacaagcctgggagacaactgagccaggaagagcaatcaaggcttctcaggctcgtttgcattaccttagcgggttcattaagaaaacatctgatgctgagagtccgcctatatctgaaagccaaactaaaccaaaagaagaagtagaaacagctgcacgtggcgtaaaagaaccaaactcaaagaattctgcaggttcagagagcaaagagatgacacaaacaggatcagggagtgcggtgtggaagaagtggcaattgaccaaaggcttgagggatgtggcaaaatccacgagtagcgaaagtggaggagtgtcttcaccagggaaagaagagcgcgagcagagcacacggaaggaaaacattcaaacaggacctcgtacacgatctccaacaattttggaaacatctccacgacttattcgaaaagcactagaatttatggatttaagtcaatatgttcggaaaacagatacagatcctctgctgcaaacagatgaattgaatcagcagcaggcaatgcaaaaggcggaagaaattcatcagtttcgacagcataggaccagagtccttagcattcgaaacattgaccaagaagagcggttgaagttaaaggatgaagtcctggatatgtataaggaaatgcaggactccttagatgaagcccgacagaaaattttcgacatccgggaagagtacagaaacaaattgctggaagctgagcacctaaagctggaaactctggctgctcaggaagcagccatgaagctggagacagaaaagatgaccccagctcctgacacacagaaaaaaaagaaaggaaagaaaaagtaaccaggggatgtccaatactaccctgcttctggagagaaaaaatctatttgtaatgatctttaactgcctgctgttaagatattaggccaaatgaaaatagaaatttctctttcttagaaatattttaatgctaacttgttagttttcctcagaaagctagtatttgaagccatttgagtttaagatgctctaatttcaataaaatagcttccaaatatttaataaaatatgtttgacactctaaa

SEQ ID NO: 107178 - DNA, 5325 bp, Homo sapiens
  Payload ID: 1037
  Gene Symbol: ADGB
  Gene Name: androglobin
  Uniprot ID: Q8N7X0
  ENST ID: ENST00000397944
  CDS Start-End: 77-5080
gcaacgcagacgcggagccgagcgcgcccgcaggctctttgctcagagctcagccctacatagatcggcttctgccatggcctccaaacaaaccaaaaagaaagaggtgcatcgtatcaactcggcgcacggatcggataaatcgaaagatttctatccttttggcagtaatgtacaatctggttctactgaacaaaagaaggggaaattcccactctggccagagtggagtgaagctgacataaattcagaaaagtgggatgcaggcaaaggtgcaaaagaaaaggacaaaacaggaaaaagccctgtatttcatttttttgaggaccctgaaggaaagattgagttaccaccatccttgaaaatttattcctggaaacgtccacaagatattttatttagtcagactccagtagttgtgaaaaatgaaatcacgtttgacttattttcagcaaatgaacatttactctgcagcgagctgatgagatggattatcagtgaaatctatgcagtgtggaagatcttcaatggaggaattttgagcaattattttaaggggacttcaggggaacctcctcttctcccctggaagccctgggaacacatatactctctgtgcaaggctgtgaagggtcatatgcctttgttcaatagctatggaaagtatgttgtgaaactttactggatgggttgctggagaaagataacaattgatgactttttgccttttgatgaagataacaatctattgcttccagctacaacttatgaatttgaactgtggccaatgcttttgtctaaagctattatcaagctggcaaatattgacatccatgtagcagacaggagagagctgggggagttcacggttattcatgcgctcacaggatggttaccagaagtcatttctcttcacccgggatatatggacaaagtttgggagctcctgaaagaaatattgcctgagtttaagctgtcagatgaggccagctctgaaagcaaaatagcagtgttagattctaaattaaaagaaccagggaaagaagggaaggagggaaaagaaataaaggatggaaaggaagtaaaagacgtgaaggaattcaaacctgaaagttctttgacaacactaaaggctcctgagaaaagcgacaaagttccaaaggagaaagcagatgcaagagacattggaaagaagagaagcaaagatggagaaaaagaaaaattcaaattctcacttcatggttcaagaccctcatcagaagtgcagtactctgtgcagtccctatcagattgttcttctgcaatacagacctctcatatggtcgtatatgcgacatttacacctctttatttgtttgaaaacaagatcttttcattagagaagatggcagattctgctgagaaacttagagaatatgggctttcccacatctgtagccatcctgtgctggtgactagaagtaggtcttgtcctctggtagcaccaccaaaaccacctcctctacctccctggaaactcattcgtcaaaaaaaggaaactgttataacagatgaagctcaagagttaatagtaaagaagcctgaacggttccttgagatttcaagtccatttttgaattatagaatgactccatttacaattccaacagaaatgcattttgtgcgctccttaattaagaaaggaatacctccaggatctgatttaccttccgtcagtgaaactgatgaaactgcaacacatagccagacagacttgagtcaaataacaaaagctacatctcagggaaatactgcttcacaagttatacttggaaaaggcacagatgaacaaacagactttggattgggtgatgctcatcagagtgatggattaaacttggaaagagagatagtcagccagaccacagcaacacaggaaaagtcacaggaagaacttccaacaacaaataatagtgtttctaaagaaatatggttagattttgaagatttctgtgtatgctttcaaaatatatatattttccacaagccaagttcatattgccttaactttcaaaaatcagaatttaagttctcagaagaacgagtgtcctactatctatttgtagatagtctaaaacctattgaactactggtttgcttttctgcattggtacgctggggggagtatggagccttaacaaaagacagtcctcccatagagcctggacttctcacagctgaaacgttttcttggaaatccctgaaaccaggcagtcttgttctgaagattcacacatatgctaccaaggctacagtggttcgtctgcctgttgggagacacatgctactcttcaacgcatactccccagtaggacactccatacacatctgcagcatggtgtcatttgtcattggggatgaacacgttgtactgcccaactttgaaccagagagctgccgatttacggaacagtctctgttgattatgaaagctattggaaatgtgattgctaatttcaaagataagggtaaactctctgcagctttgaaggatctgcaaacagctcactaccctgtccccttccatgataaagaactaactgcacagcacttcagggtttttcatctttccttatggcgtttaatgaaaaaagttcaaataacaaaacctcctccaaacttcaaatttgcattccgggctatggttttggacttggagttactcaattcctccttggaagaggtttctttagtggaatggctggacgttaaatattgtatgcccacaagtgataaagagtattctgctgaggaagtagcagcagcaattaaaattcaagccatgtggagaggaacttacgttagattgcttatgaaagccagaataccagacacaaaagaaaatatcagtgttgcagatactcttcaaaaagtttgggctgtattggaaatgaatttagaacagtatgcagtttctctcttaagactaatgtttaaaagcaagtgcaagtctttggaatcttatccatgctatcaagatgaagaaactaagattgcttttgcagattatactgtgacttatcaagaacagccaccaaattcttggtttatagtattcagagaaacatttttggttcatcaagacatgattttggttcccaaagtatatactacacttccaatctgtatcctacacattgttaataatgacacaatggagcaagtgccaaaggtgttccaaaaagtggtgccttatctttataccaagaataagaagggatacacttttgtggcggaagcatttacaggcgacacatatgtagcagcctcacgatggaaactgcgtctcatcggttcttctgctccactgccatgcctctctcgagactctccatgcaattcctttgccataaaggaaatccgagattactacatacccaatgataagaaaattttattcaggtattcggttaaagttctaacaccacaacctgctacaatacaggtacgcacatccaaaccagatgcattcatcaagctgcaggtcctagaaaatgaagaaactatggtgagctccactggaaaaggccaagctataatcccagcatttcacttcttgaagagtgagaaaggtttgagctcccagtctagcaagcacattctttcatttcactctgcatccaagaaagagcaagaagtgtatgttaagaagaaagctgctcagggaattcagaaatcccccaagggtagagctgtaagtgcaatacaagacattggtctaccccttgtggaggaggaaactaccagtacacccactagagaagacagttccagcacaccactgcagaattacaagtatattatacagtgttcggtgttgtataacagttggcctctcactgaaagccagctgacatttgttcaagcactgaaagacttaaagaaaagtaataccaaagcttatggtgaaagacacgaggagttaattaacttaggaagcccagactcccacactattagtgagggacaaaaatcttcagtaacttccaaaacaacaaggaaaggcaaagaaaagtcttctgagaaagaaaagacagccaaagaaaaacaagcacctcgctttgagcctcagatatccactgttcaccctcaacaagaagacccaaataaaccctactggattttgaggttggtcactgaacacaatgaatcagaattatttgaagtgaaaaaggatacagaaagggcagatgaaatccgagccatgaaacaagcctgggagacaactgagccaggaagagcaatcaaggcttctcaggctcgtttgcattaccttagcgggttcattaagaaaacatctgatgctgagagtccgcctatatctgaaagccaaactaaaccaaaagaagaagtagaaacagctgcacgtggcgtaaaagaaccaaactcaaagaattctgcaggttcagagagcaaagagatgacacaaacaggatcagggagtgcggtgtggaagaagtggcaattgaccaaaggcttgagggatgtggcaaaatccacgagtagcgaaagtggaggagtgtcttcaccagggaaagaagagcgcgagcagagcacacggaaggaaaacattcaaacaggacctcgtacacgatctccaacaattttggaaacatctccacgacttattcgaaaagcactagaatttatggatttaagtcaatatgttcggaaaacagatacagatcctctgctgcaaacagatgaattgaatcagcagcaggcaatgcaaaaggcggaagaaattcatcagtttcgacagcataggaccagagtccttagcattcgaaacattgaccaagaagagcggttgaagttaaaggatgaagtcctggatatgtataaggaaatgcaggactccttagatgaagcccgacagaaaattttcgacatccgggaagagtacagaaacaaattgctggaagctgagcacctaaagctggaaactctggctgctcaggaagcagccatgaagctggagacagaaaagatgaccccagctcctgacacacagaaaaaaaagaaaggaaagaaaaagtaaccaggggatgtccaatactaccctgcttctggagagaaaaaatctatttgtaatgatctttaactgcctgctgttaagatattaggccaaatgaaaatagaaatttctctttcttagaaatattttaatgctaacttgttagttttcctcagaaagctagtatttgaagccatttgagtttaagatgctctaatttcaataaaatagcttccaaatatttaataaaatatgtttgacactctaaa

SEQ ID NO: 107179 - DNA, 557 bp, Homo sapiens
  Payload ID: 1037
  Gene Symbol: ADGB
  Gene Name: androglobin
  ENST ID: ENST00000470716
  CDS Start-End: 135-557
gaaattccaacggcatcgcactgtgcggcctcttctgaggttcctctctcattgggcagggatgtgttcttcctcggtctcatcattgcatctctagcactagtgggagatgtcaataagtgtttaatgaatgaatgcatgaacatgccacaccagtgacctcagcttatggtgaaagacacgaggagttaattaacttaggaagcccagactcccacactattagtgagggacaaaaatcttcagtaacttccaaaacaacaaggaaaggcaaagaaaagtcttctgagaaagaaaagacagccaaagaaaaacaagcacctcgctttgagcctcaggcttctcaggctcgtttgcattaccttagcgggttcattaagaaaacatctgatgctgagagtccgcctatatctgaaagccaaactaaaccaaaagaagaagtagaaacagctgcacgtggcgtaaaagaaccaaactcaaagaattctgcaggttcagagagcaaagagatgacacaaacaggatcagggagtgcggtgtggaagaagtggcaattg

SEQ ID NO: 107180 - DNA, 607 bp, Homo sapiens
  Payload ID: 1037
  Gene Symbol: ADGB
  Gene Name: androglobin
  ENST ID: ENST00000522242
  CDS Start-End: 72-607
gcagacgcggagccgagcgcgcccgcaggctctttgctcagagctcagccctacatagatcggcttctgccatggcctccaaacaaaccaaaaagaaagaggtgcatcgtatcaactcggcgcacggatcggataaatcgaaagataatgtacaatctggttctactgaacaaaagaaggggaaattcccactctggccagagtggagtgaagctgacataaattcagaaaagtgggatgcaggcaaaggtgcaaaagaaaaggacaaaacaggaaaaagccctgtatttcatttttttgaggaccctgaaggaaagattgagttaccaccatccttgaaaatttattcctggaaacgtccacaagatattttatttagtcagactccagtagttgtgaaaaatgaaatcacgtttgacttattttcagcaaatgaacatttactctgcagcgagctgatgagatggattatcagtgaaatctatgcagtgtggaagatcttcaatggaggaattttgagcaattattttaaggggacttcaggggaacctcctcttctcccctggaagccctgggaacacatatactctctgtgcaaggctgtgaa

SEQ ID NO: 107181 - DNA, 3072 bp, Homo sapiens
  Payload ID: 1037
  Gene Symbol: ADGB
  Gene Name: androglobin
  ENST ID: ENST00000480328
  CDS Start-End: 1-2144
gcacagatgaacaaacagactttggattgggtgatgctcatcagagtgatggattaaacttggaaagagagatagtcagccagaccacagcaacacaggaaaagtcacaggaagaacttccaacaacaaataatagtgtttctaaagaaatatggttagattttgaagatttctgtgtatgctttcaaaatatatatattttccacaagccaagttcatattgccttaactttcaaaaatcagaatttaagttctcagaagaacgagtgtcctactatctatttgtagatagtctaaaacctattgaactactggtttgcttttctgcattggtacgctggggggagtatggagccttaacaaaagacagtcctcccatagagcctggacttctcacagctgaaacgttttcttggaaatccctgaaaccaggcagtcttgttctgaagattcacacatatgctaccaaggctacagtggttcgtctgcctgttgggagacacatgctactcttcaacgcatactccccagtaggacactccatacacatctgcagcatggtgtcatttgtcattggggatgaacacgttgtactgcccaactttgaaccagagagctgccgatttacggaacagtctctgttgattatgaaagctattggaaatgtgattgctaatttcaaagataagggtaaactctctgcagctttgaaggatctgcaaacagctcactaccctgtccccttccatgataaagaactaactgcacagcacttcagggtttttcatctttccttatggcgtttaatgaaaaaagttcaaataacaaaacctcctccaaacttcaaatttgcattccgggctatggttttggacttggagttactcaattcctccttggaagaggtttctttagtggaatggctggacgttaaatattgtatgcccacaagtgataaagagtattctgctgaggaagtagcagcagcaattaaaattcaagccatgtggagaggaacttacgttagattgcttatgaaagccagaataccagacacaaaagaaaatatcagtgttgcagatactcttcaaaaagtttgggctgtattggaaatgaatttagaacagtatgcagtttctctcttaagactaatgtttaaaagcaagtgcaagtctttggaatcttatccatgctatcaagatgaagaaactaagattgcttttgcagattatactgtgacttatcaagaacagccaccaaattcttggtttatagtattcagagaaacatttttggttcatcaagacatgattttggttcccaaagtatatactacacttccaatctgtatcctacacattgttaataatgacacaatggagcaagtgccaaaggtgttccaaaaagtggtgccttatctttataccaagaataagaagggatacacttttgtggcggaagcatttacaggcgacacatatgtagcagcctcacgatggaaactgcgtctcatcggttcttctgctccactgccatgcctctctcgagactctccatgcaattcctttgccataaaggaaatccgagattactacatacccaatgataagaaaattttattcaggtattcggttaaagttctaacaccacaacctgctacaatacaggtacgcacatccaaaccagatgcattcatcaagctgcaggtcctagaaaatgaagaaactatggtgagctccactggaaaaggccaagctataatcccagcatttcacttcttgaagagtgagaaaggtttgagctcccagtcttatggtgaaagacacgaggagttaattaacttaggaagcccagactcccacactattagtgagggacaaaaatcttcagtaacttccaaaacaacaaggaaaggcaaagaaaagtcttctgagaaagaaaagacagccaaagaaaaacaagcacctcgctttgagcctcagatatccactgttcaccctcaacaagaagacccaaataaaccctactggattttgaggcttctcaggctcgtttgcattaccttagcgggttcattaagaaaacatctgatgctgagagtccgcctatatctgaaagccaaactaaaccaaaagaagaagtagaaacagctgcacgtggcgtaaaagaaccaaactcaaagaattctgcaggttcagagagcaaagagatgacacaaacaggatcagggagtgcggtgtggaagaagtggcaattgaccaaaggcttgagggatgtggcaaaatccacgagtagcgaaagtggaggagtgtcttcaccagggaaagaagagcgcgagcagagcacacggaaggaaaacattcaaacaggacctcgtacacgatctccaacaattttggaaacatctccacgacttattcgaaaagcactagaatttatggatttaagtcaatatgttcggaaaacagatacagatcctctgctgcaaacagatgaattgaatcagcagcaggcaatgcaaaaggcggaagaaattcatcagtttcgacagcataggaccagagtccttagcattcgaaacattgaccaagaagagcggttgaagttaaaggatgaagtcctggatatgtataaggaaatgcaggactccttagatgaagcccgacagaaaattttcgacatccgggaagagtacagaaacaaattgctggaagctgagcacctaaagctggaaactctggctgctcaggaagcagccatgaagctggagacagaaaagatgaccccagctcctgacacacagaaaaaaaagaaaggaaagaaaaagtaaccaggggatgtccaatactaccctgcttctggagagaaaaaatctatttgtaatgatctttaactgcctgctgttaagatattaggccaaatgaaaatagaaatttctctttcttagaaatattttaatgctaacttgttagttttcctcagaaagctagtatttgaagccatttgagtttaagatgctctaatttcaataaaatagcttccaaatatttaataaaatatgtttgacactct

SEQ ID NO: 107182 - DNA, 571 bp, Homo sapiens
  Payload ID: 1037
  Gene Symbol: ADGB
  Gene Name: androglobin
  ENST ID: ENST00000522396
  CDS Start-End: 75-182
aacgcagacgcggagccgagcgcgcccgcaggctctttgctcagagctcagccctacatagatcggcttctgccatggcctccaaacaaaccaaaaagaaagaggtgcatcgtatcaactcggcgcacggatcggataaatcgaaagagtccaaggccgaggacgcccttcagaatcagtaatgtacaatctggttctactgaacaaaagaaggggaaattcccactctggccagagtggagtgaagctgacataaattcagaaaagtgggatgcaggcaaaggtgcaaaagaaaaggacaaaacaggaaaaagccctgtatttcatttttttgaggaccctgaaggaaagattgagttaccaccatccttgaaaatttattcctggaaacgtccacaagatattttatttagtcagactccagtagttgtgaaaaatgaaatcacgtttgacttattttcagcaaatgaacatttactctgcagcgagctgatgagatggattatcagtgaaatctatgcagtgtggaagatcttcaatggaggaattttgagcaattattttaagggga

SEQ ID NO: 107183 - DNA, 6779 bp, Homo sapiens
  Payload ID: 1037
  Gene Symbol: ADGB
  Gene Name: androglobin
  ENST ID: ENST00000493950
  CDS Start-End: 37-699
gctcagagctcagccctacatagatcggcttctgccatggcctccaaacaaaccaaaaagaaagaggtgcatcgtatcaactcggcgcacggatcggataaatcgaaagatttctatccttttggcagtaatgtacaatctggttctactgaacaaaagaaggggaaattcccactctggccagagtggagtgaagctgacataaattcagaaaagtgggatgcaggcaaaggtgcaaaagaaaaggacaaaacaggaaaaagccctgtatttcatttttttgaggaccctgaaggaaagattgagttaccaccatccttgaaaatttattcctggaaacgtccacaagatattttatttagtcagactccagtagttgtgaaaaatgaaatcacgtttgacttattttcagcaaatgaacatttactctgcagcgagctgatgagatggattatcagtgaaatctatgcagtgtggaagatcttcaatggaggaattttgagcaattattttaaggggacttcaggggaacctcctcttctcccctggaagccctgggaacacatatactctctgtgcaaggctgtgaagggtcatatgcctttgttcaatagctatggaaagtatgttgtgaaactttactggatgcccgggatatatggacaaagtttgggagctcctgaaagaaatattgcctgagtttaagctgtcagatgaggccagctctgaaagcaaaatagcagtgttagattctaaattaaaagaaccagggaaagaagggaaggagggaaaagaaataaaggatggaaaggaagtaaaagacgtgaaggaattcaaacctgaaagttctttgacaacactaaaggctcctgagaaaagcgacaaagttccaaaggagaaagcagatgcaagagacattggaaagaagagaagcaaagatggagaaaaagaaaaattcaaattctcacttcatggttcaagaccctcatcagaagtgcagtactctgtgcagtccctatcagattgttcttctgcaatacagacctctcatatggtcgtatatgcgacatttacacctctttatttgtttgaaaacaagatcttttcattagagaagatggcagattctgctgagaaacttagagaatatgggctttcccacatctgtagccatcctgtgctggtgactagaagtaggtcttgtcctctggtagcaccaccaaaaccacctcctctacctccctggaaactcattcgtcaaaaaaaggaaactgttataacagatgaagctcaagagttaatagtaaagaagcctgaacggttccttgagatttcaagtccatttttgaattatagaatgactccatttacaattccaacagaaatgcattttgtgcgctccttaattaagaaaggaatacctccaggatctgatttaccttccgtcagtgaaactgatgaaactgcaacacatagccagacagacttgagtcaaataacaaaagctacatctcaggcacagatgaacaaacagactttggattgggtgatgctcatcagagtgatggattaaacttggaaagagagatagtcagccagaccacagcaacacaggaaaagtcacaggaagaacttccaacaacaaataatagtgtttctaaagaaatatggttagattttgaagatttctgtgtatgctttcaaaatatatatattttccacaagccaagttcatattgccttaactttcaaaaatcagaatttaagttctcagaagaacgagtgtcctactatctatttgtagatagtctaaaacctattgaactactggtttgcttttctgcattggtacgctggggggagtatggagccttaacaaaagacagtcctcccatagagcctggacttctcacagctgaaacgttttcttggaaatccctgaaaccaggcagtcttgttctgaagattcacacatatgctaccaaggctacagtggttcgtctgcctgttgggtatgaagtggcttcatttttcccataataaaaattgtttgaaggcttgcaaattgttggttactaaagaagtaaacaatatggactctaagacattgtttctcaaagcaatttctcaaggcataggtccatgattattattcttgagaaaaatatttccaaaaaactacattgagaaatactgtacaatgaatatccctttgggagattcataattgtcaaagattctgggaatatatttagtcaacaatactgcttgagcttgtttaacccagcattttctaaaattaatttataaatattatacacataacatttataatactttagtatgaattttctcataaatatttcttataagttttctcaccaatataatacttagcaaaaaccttgattttatttaaatgcaaattgagaaatatgcattttcccctaccaatctagattttcttgtggcttatttttgttagatattatttttaattcagataaagctggttaaacacattagtttcaattttaaagaaaatacatataatggaaaagattttattttgatgaataaaattcaaaatattacctcaaatttcagaagaaatattttcactaggctttgaaataaacattttcactagcttttacttttttcccaagatcaatcatgctaattctatgtgatcaatgaaaagctatgtctcttatgcaaaaagcaaagcctcagcaacaaatgctaaaataattgtgtcaagcatctagtacttctacaaaatactacattttgaaactctgacatttctcacatctcccctttatactccagcaaatcaaattactctgtctgagtgcttattcatttgagacaaccaaggacaaggaatttaataaagattcttcttatatccgcttttccccccacagaacctaaaccatcaacatgtatgttttgaacatgctctaaatctgcagtccccaactccagagccatggactggtcctggtccgaggcctgttaggaactgggccatgcagcaggaggttagcggtgcctgagctctgcctcctgtcagatcagcagcagcattagagtctcataggagcgggaatcctattgtgaactgcatatgcaagggatccaggttggacactccttataagaatctaatgcctgatgatctgaggtggaacagtttcatcctgaaaccatccccaaaccaagtccatggaaatattgtcttttgtgaaaccagtccttggtgccaaaaagaatggggatggctgctctaaatgctcaataactggaggaccatgaatatccctgctctcacgatacgacaacctggtagaggagacacgattaacatacatgaaatgatgcatttgtgagaaaaagactaggaagtctacacagccctatacctgcttgagtttttcttgttgttagggagaaatcaagactagtcttcacaccatgactgcagtgtgtgggaggtcactccagcatgtactgcagagaagtttggtatttagcctaactatttttgtcctacataataagtaaagcgtagatttcatgatcccgtagggttcttatagagtgcaaattcaaagatccttatctcatctgtgttaaaaattgaactcttccctaaccttttacttcatttgagttccaaagtgtgaataagcaactcacaggtcaaatgccaccacccaggaagcactcggttatcatccggcatcccttctctttaggagacacatgctactcttcaacgcatactccccagtaggacactccatacacatctgcagcatggtgtcatttgtcattggggatgaacacgttgtactgcccaactttgaaccagagagctgccgatttacggaacagtctctgttgattatgaaagctattggaaatgtgattgctaatttcaaagataagggtaaactctctgcagctttgaaggatctgcaaacagctcactaccctgtccccttccatgataaagaactaactgcacagcacttcagggtttttcatctttccttatggcgtttaatgaaaaaagttcaaataacaaaacctcctccaaacttcaaatttgcattccgggctatggttttggacttggagttactcaattcctccttggaagaggtttctttagtggaatggctggacgttaaatattgtatgcccacaagtgataaagagtattctgctgaggaagtagcagcagcaattaaaattcaagccatgtggagaggaacttacgttagattgcttatgaaagccagaataccagacacaaaagaaaatatcagtgttgcagatactcttcaaaaagtttgggctgtattggaaatgaatttagaacagtatgcagtttctctcttaagactaatgtttaaaagcaagtgcaagtctttggaatcttatccatgctatcaagatgaagaaactaagattgcttttgcagattatactgtgacttatcaagaacagccaccaaattcttggtttatagtattcagagaaacatttttggttcatcaagacatgattttggttcccaaagtatatactacacttccaatctgtatcctacacattgttaataatgacacaatggagcaagtgccaaaggtgttccaaaaagtggtgccttatctttataccaagaataagaagggatacacttttgtggcggaagcatttacaggcgacacatatgtagcagcctcacgatggaaactgcgtctcatcggttcttctgctccactgccatgcctctctcgagactctccatgcaattcctttgccataaaggaaatccgagattactacatacccaatgataagaaaattttattcaggtattcggttaaagttctaacaccacaacctgctacaatacaggtacgcacatccaaaccagatgcattcatcaagctgcaggtcctagaaaatgaagaaactatggtgagctccactggaaaaggccaagctataatcccagcatttcacttcttgaagagtgagaaaggtttgagctcccagtctagcaagcacattctttcatttcactctgcatccaagaaagagcaagaagtgtatgttaagaagaaagctgctcagggaattcagaaatcccccaagggtagagctgtaagtgcaatacaagacattggtctaccccttgtggaggaggaaactaccagtacacccactagagaagacagttccagcacaccactgcagaattacaagtatattatacagtgttcggtgttgtataacagttggcctctcactgaaagccagctgacatttgttcaagcactgaaagacttaaagaaaagtaataccaaagcttatggtgaaagacacgaggagttaattaacttaggaagcccagactcccacactattagtgagggacaaaaatcttcagtaacttccaaaacaacaaggaaaggcaaagaaaagtcttctgagaaagaaaagacagccaaagaaaaacaagcacctcgctttgagcctcagatatccactgttcaccctcaacaagaagacccaaataaaccctactggattttgaggttggtcactgaacacaatgaatcagaattatttgaagtgaaaaaggatacagaaagggcagatgaaatccgagccatgaaacaagcctgggagacaactgagccaggaagagcaatcaaggcttctcaggctcgtttgcattaccttagcgggttcattaagaaaacatctgatgctgagagtccgcctatatctgaaagccaaactaaaccaaaagaagaagtagaaacagctgcacgtggcgtaaaagaaccaaactcaaagaattctgcaggttcagagagcaaagagatgacacaaacaggatcagggagtgcggtgtggaagaagtggcaattgaccaaaggcttgagggatgtggcaaaatccacgagtagcgaaagtggaggagtgtcttcaccagggaaagaagagcgcgagcagagcacacggaaggaaaacattcaaacaggacctcgtacacgatctccaacaattttggaaacatctccacgacttattcgaaaagcactagaatttatggatttaagtcaatatgttcggaaaacagatacagatcctctgctgcaaacagatgaattgaatcagcagcaggcaatgcaaaaggcggaagaaattcatcagtttcgacagcataggaccagagtccttagcattcgaaacattgaccaagaagagcggttgaagttaaaggatgaagtcctggatatgtataaggaaatgcaggactccttagatgaagcccgacagaaaattttcgacatccgggaagagtacagaaacaaattgctggaagctgagcacctaaagctggaaactctggctgctcaggaagcagccatgaagctggagacagaaaagatgaccccagctcctgacacacagaaaaaaaagaaaggaaagaaaaagtaaccaggggatgtccaatactaccctgcttctggagagaaaaaatctatttgtaatgatctttaactgcctgctgttaagatattaggccaaatgaaaatagaaatttctctttcttagaaatattttaatgctaacttgttagttttcctcagaaagctagtatttgaagccatttgagtttaagatgctctaatttcaataaaatagcttccaaatatttaataaaatatgtttgacactctaaa

SEQ ID NO: 107184 - DNA, 242 bp, Homo sapiens
  Payload ID: 1037
  Gene Symbol: ADGB
  Gene Name: androglobin
  ENST ID: ENST00000473647
  CDS Start-End: 1-216
cctttgttcaatagctatggaaagtatgttgtgaaactttactggatgggttgctggagaaagataacaattgatgactttttgccttttgatgaagataacaatctattgcttccagctacaacttatgaatttgaactgtggccaatgcttttgtctaaagctattatcaagctggcaaatattgagtatgtaatgacactatcactcacatgaataaaaaaagcaaacaaaaacattaa

SEQ ID NO: 107185 - DNA, 5176 bp, Homo sapiens
  Payload ID: 1038
  Gene Symbol: ANGEL1
  Gene Name: angel homolog 1 (Drosophila)
  Uniprot ID: Q9UNK9
  ENST ID: ENST00000251089
  CDS Start-End: 114-2126
gttgaagcgcggcggcggcaccacgtgggccggaccgggccgggggcggggccgagctgagggaggacctgctggctgcagtgaggagcggaggcgggcgcgggcggccggccatgatcgcgtcgtgcttgtgttacctgctgctgccggccacgcgcctcttccgcgccctctcagatgctttcttcacatgtcgaaaaaatgtccttctggcgaacagctcatccccccaggtagagggcgactttgccatggcccctcggggccctgagcaggaggaatgtgagggcctgctgcagcagtggcgagaagaagggttgagccaggtgctctcaactgcaagtgaggggccccttatagataaaggactagcccagagcagcctggcacttctgatggataatcctggagaagagaatgctgcttcagaggacaggtggtccagcaggcagctgagtgaccttcgggctgcagagaacctggatgagcctttccctgagatgctaggagaggagccactgctggaggtggagggggtggagggctccatgtgggcagctatccccatgcagtcggagccccagtatgcagactgtgctgccctcccagtgggtgccctggccacagagcagtgggaagaggacccagcggtgttggcctggagcatagcacctgagcctgtgccccaggaagaggcttccatctggccctttgagggcctggggcagttgcagcctcccgcagtggaaataccatatcatgaaattttgtggcgagaatgggaggatttctccacccagccagatgctcagggcctgaaggcaggagatggccctcagttccagttcactctgatgtcttataacatcctggctcaggacctgatgcagcagagctcagagctctatctacattgccatccagacatcctcaattggaactatcgcttcgtgaacctcatgcaggaattccagcactgggaccctgatatcctgtgtctccaggaagtccaggaagatcattactgggagcagctggaaccctctctgcgaatgatgggctttacctgtttctacaagaggaggactgggtgtaaaaccgatggctgtgctgtctgctacaagcctaccagattccgcctgctctgtgctagccctgtggagtacttccggcctggcttggagctacttaatcgggataatgtgggcttagtgttgctactgcaaccactcgtcccagaaggcctgggacaagtctcggtggccccgctgtgtgtggcaaatacccatatcctttacaacccacgccggggcgatgtcaagctggcccagatggccattctcctggcggaagtggacaaggtggccagactgtcagatggcagccactgccccatcatcttgtgcggggacctaaattctgtccctgattcacctctctacaacttcatcagggatggagagctccagtaccatgggatgccagcctggaaggtatctggacaggaagacttctcccatcagctttaccagaggaagctgcaggccccactgtggcccagctccctgggcatcactgattgctgtcagtatgtcacctcctgtcaccccaagagatcagagagacgcaagtatggccgagacttcctgctacgtttccgcttctgcagcatcgcttgtcagcgaccagtaggactggtccttatggaaggagtgacagatactaagccagagcgacctgcgggttgggctgagtctgtccttgaggaagatgcatcggagcttgagcctgccttctccaggactgtaggtaccatccagcactgcctccacctgacgtcagtatatacccacttcctgccccagcgtggccgcccagaggtcactacaatgccattgggtcttggaatgacagtagattacatcttcttctcagctgagtcctgtgagaatgggaacagaactgatcacaggctgtatcgagatggaactctcaagctcctgggtcgtctctcccttctctctgaagagatactctgggctgccaatggcttacccaaccccttctgctcttcagaccacctctgcctgctagccagcttcgggatggaagtcaccgccccatgacagggctcccaggggaagagagcttctcttccagaagagctcactggatcagagactgtggaaaaatcccatgcatctagaaacttagatccaagaaacttacatcccctcccttccccctcctcgttccctttttcccacggttagactttctccaggcctggctgcgttctctgcctgtggtccttgccccaccccagcctcttcctaatcctgtgccacacactcagtggccctgggagaggcagaaggggggctcccccttccttccatgtatccagcgctcccccttgatttttaattaccagggttatgggagttcttgatttcattggttatttgctttcaggccgtttcttgatgtaccttctgacctgaccttttccctgccttcaggacttctgggcccagccctcttgccaggcatgcatatgtgagatatgcatatcatgtatgtgtcctcttggggtgagacttctgcacagccatgcctgcctctgaccagtccacttttcatgttggggctgtaggcctggggcaggttcagagtctacccaagtacctatgtatgagcaggcagcagcagggcatggccccatctctccttttagcctctgtgtttcattaggcattcatcctgccaaccagggcaggcccggcgtctgggctctgggaacaaatggggcccacatcctggagtggcaaattttgggggatgcgctacctgtcccagctggccctgtgcctccaacccagagctccccacagacctggtgtaatttcacaagggccatccctttccccaggcttccctgagggaggcggaagtttgaacccttatgtggggttcattgggctagggtagtggtatgaggtttaaaactatttaaggattaggaggagaaagagtcttcaggaaactcttgtttcactggactctgcagcctgcagaactggggcaagggtaggagttccagtaggggaaggagcaggtagactcttcagctgcctcagctgggactgaagacctaagctgattctctttcctctccactcctaagaagcaattttctgttcctctccttccaccactttttactttctgctatctcccatctcccgcttcccttccatttcctttctagaaaaccctggtatttagctcaggccaaactgcctcagcagaaaggtggccttggacaaaactggtccaagaatttgaagtggcagtacttgcggattggctctgtccagcaaggcctcagctgcttgttgcgtctgctttccctcccctaacagaagggtaccctggcttattcaggggactccttagtccacactgtgtcacctgcatgccttaatctttcattgctggggtgtggccttgggagatcctgggccagcccctccacacatctccctaagtcagagtggctgctggccctggtagatttgacttgctcttgcctcactcgacctccaaagtgggactgaagacagtggtcaagagacttgagttcgggacagtaagccaggggttaaggttctttcctttttttgaaagccaaagacccagtttgcattgtgctgctgcattcatggttagaagctttccatgcctaggttctagggaatttatttttctatgtgtatatattttcaaactttgtttcctgggtactgggcatgtgcctgtctgagccccaggtctgtctacaccccaccattcattctgtctgtctgttccctggacactgcctaaaagggtctcaagacagtgccctgtgggttcctaggactagggcccatcactgttctcttctgctgggaaatgcagctttaaaatggctaaccacagcagagggcagatgcttgatagattatcttttccttgctttcttgtttctgttttgaaagtgaaatggggttttaaattgttatttaaactctttttccaaataaaggtttaccttttttccccccaatgttgttcattttattaggatcctgaagggattaggtccttgagagagggcctgaagaatgaggtgggcagaggaagagactaaggagcttttgatcttggggtggggtctcaagacatgaatctagattgagaaatgtgttgtaagatctccctctattagctgaggtaaattcccactgctgtgaggcctgggaggaacagggcttgagtgaagcctcctgccttgacactgctggggtacagctttcttctgtccttcccaagtgagagaatgattctttggactgcttttcattcttcctccatctgctccccccatgcctcctcctagtatcttctgcacttcaggagggtctgtgcaaagtgggataagatgtgtgttttcctgattaaagctatggcagctgcatgagacatgatgcgggtggcacatgcctcttgctgagcatctatttctgatctcttttgcattctggagccagggctgagcagtgggccatctgtcgctggaaaaatgtctcttccttcctaggcctacctctgttggtgcttttgtcttccaacctccctatgtagtaagaccagccaagcccacatgcccactgggagccctgaaaccagatctggttttctgtcttacctgaacaggttcccagaacccacaccaggcctctgaatcagtctctgagaatctgattgatttaaagccacttggttgcttccattgcactacctgggttgcgatcccctcaattgatttagtaaaaagaaaacttagcggccgggtgcggtggctcacacctgtaatcccagcactttgggaggctgaggcgggtggatcacctgaggtcgagagttccagaccagcctgaccaacatgaagaaatcccgtctctactaaaaatacaaaattagccgggcgtgatggcgcatgcctgtaatcccagctacttggaggctgaggcaggagaattgcttgaacctgggaagcggaggttgtggtgagccgagatcatgccattgcactccagcctggacaacaagagtgaaactccatctcaaa

SEQ ID NO: 107186 - DNA, 1427 bp, Homo sapiens
  Payload ID: 1038
  Gene Symbol: ANGEL1
  Gene Name: angel homolog 1 (Drosophila)
  ENST ID: ENST00000557179
  CDS Start-End: 449-1156
tacgttttgtccgttcccaggctgctcattggctttgaccgaggatggtgacgtagatacggtaaagtgctttggtgctttcccatttggtttgaccctgtggttacccagtaataggttcaggatattagaccttgatccagaagatccaaagatgaggataaacctttaaccattgcaacttaaagcccctgagagttgatattccctgtggaggagaattgtattgatttttcagaggtaaaatttagggaaccacatgttcatactattcgattccccttgattcagtctcttacccctcctcctgtttcatggacatttcagtgttgccagtgaaaaagtaatggttttaatttggtccttatttttaacctgcccctgagacttatatgcttgtttataccatgtacgtagtgtgtgattgtatgtgtttgtatttgtccacatgtcccaaaacatgggctgttacttcctttttctatcttggtttccttattcccacccttctttttccacccaggtatctggacaggaagacttctcccatcagctttaccagaggaagctgcaggccccactgtggcccagctccctgggcatcactgattgctgtcagtatgtcacctcctgtcaccccaagagatcagagagacgcaagtatggccgagacttcctgctacgtttccgcttctgcagcatcgcttgtcagcgaccagtaggactggtccttatggaaggagtgacagatactaagccagagcgacctgcgggttgggctgagtctgtccttgaggaagatgcatcggagcttgagcctgccttctccaggactgtaggtaccatccagcactgcctccacctgacgtcagtatatacccacttcctgccccagcgtggccgcccagaggtcactacaatgccattgggtcttggaatgacagtagattacatcttcttctcagctgagtcctgtgagaatgggaacagaactgatcacaggctgtatcgagatggaactctcaagctcctgggtcgtctctcccttctctctgaagagatactctgggctgccaatggcttacccaaccccttctgctcttcagaccacctctgcctgctagccagcttcgggatggaagtcaccgccccatgacagggctcccaggggaagagagcttctcttccagaagagctcactggatcagagactgtggaaaaatcccatgcatctagaaacttagatccaagaaacttacatcccctcccttccccctcctcgttccctttttcccacggttagactttctccaggcctggctgcgttctctgcctgtggtccttgccccaccccagcctcttcctaatcctgtgccacacactcagtggccctgggagaggcagaaggggggctcccccttccttcc

SEQ ID NO: 107187 - DNA, 727 bp, Homo sapiens
  Payload ID: 1038
  Gene Symbol: ANGEL1
  Gene Name: angel homolog 1 (Drosophila)
  ENST ID: ENST00000556298
  CDS Start-End: 339-727
agtgaggagcggaggcgggcgcgggcggccggccatgatcgcgtcgtgcttgtgttacctgctgctgccggccacgcgcctcttccgcgccctctcagagatgaagtttcgttatgttgcccaggctggtctctaactcctggcctcaagtgatcctgctgcctctgtctctgcctcccaaagtgctgggagccaccacgcctggcctcttgtccccattttacagtcaagagtaacttcatctgactaggggcattgttcaagatgctttcttcacatgtcgaaaaaatgtccttctggcgaacagctcatccccccaggtagagggcgactttgccatggcccctcggggccctgagcaggaggaatgtgagggcctgctgcagcagtggcgagaagaagggttgagccaggtgctctcaactgcaagtgaggggccccttatagataaaggactagcccagagcagcctggcacttctgatggataatcctggagaagagaatgctgcttcagaggacaggtggtccagcaggcagctgagtgaccttcgggctgcagagaacctggatgagcctttccctgagatgctaggagaggagccactgctggaggtggagggggtggagggctccatgtgggcagctatccccatgcagtcggagccccagtatgcagactgtgctgccctcccagtgggtgccctggccacagagcagtgggaaga

SEQ ID NO: 107188 - DNA, 553 bp, Homo sapiens
  Payload ID: 1038
  Gene Symbol: ANGEL1
  Gene Name: angel homolog 1 (Drosophila)
  ENST ID: ENST00000555079
  CDS Start-End: 352-553
catcatcttgtgcggggacctaaattctgtccctgattcacctctctacaacttcatcagggatggagagctccagtaccatgggatgccagcctggaaggctgctcattggctttgaccgaggatggtgacgtagatacggtatctggacaggaagacttctcccatcagctttaccagaggaagctgcaggccccactgtggcccagctccctgggcatcactgattgctgtcagtatgtcacctcctgtcaccccaagagatcagagagacgcaagtatggccgagacttcctgctacgtttccgcttctgcagcatcgcttgtcagcgaccagtaggactggtccttatggaaggagtgacagatactaagccagagcgacctgcgggttgggctgagtctgtccttgaggaagatgcatcggagcttgagcctgccttctccaggactgtaggtaccatccagcactgcctccacctgacgtcagtatatacccacttcctgccccagcgtggccgcccagaggtcactacaatgccattgggtcttg

SEQ ID NO: 107189 - DNA, 4323 bp, Homo sapiens
  Payload ID: 1039
  Gene Symbol: ANGEL2
  Gene Name: angel homolog 2 (Drosophila)
  Uniprot ID: Q5VTE6
  ENST ID: ENST00000360506
  CDS Start-End: 337-1464
cggcgagactgcacctcccagcatgccttgcagccaggactggagtcggtacttaagagtgatggggttccctagatactttaggccgtcgcatcgattatagagattgaggtggaacccggggcctgggaactggacgcacgcggagggcgaagatggaagcctggcgctgtgtgaggaagggctacggccactgtgtggtgggaagaggccggtgtgataaagcggaattgggaatatatatgtagccatgataaagaaaaaacgaagatcctaggagacaaaaatgttgatcccaaatgtgaagacagtgagaacaagtttgacttttcagtgatgtcctataatatactttcacaagatttactggaagataactctcacctttatagacattgccggcggccagtattacactggagttttaggtttcccaatattctgaaagaaattaaacattttgatgcagacgtactttgtttgcaagaagttcaagaagatcattatggagcagagatcaggccaagtttggaatcactgggttatcactgtgaatataagatgcggacaggaaggaaacctgatggctgtgctatttgcttcaaacattccaaattttcactcttgtcagtgaacccagtggaattcttccgccctgatatttctctgttggacagagacaatgttggattagttttactcttacagcccaaaattccatatgctgcctgccctgcaatctgcgtagcaaatacgcatctgttgtataatccaaggcgaggtgatattaagctgacgcaattggcaatgctactggcagagatttccagtgttgcccaccagaaagatggcagcttctgccctattgttatgtgtggtgactttaattctgttcctggttctccactatatagtttcataaaggaaggaaaattgaattatgaaggacttcccataggaaaggtatctggccaggaacagtcttcacggggacaaagaattttatctattccaatttggcccccaaacctaggtatctcacagaactgtgtgtatgaggtacagcaggtaccaaaagtagaaaagacagacagtgatctgacacaaacacagctgaagcaaacagaggtcctagtgacagctgaaaaattgtcttcaaatttacagcaccatttcagtttgtcatctgtttattcacattactttcctgacactggaattccagaagtgaccacctgtcattcccgaagtgccataactgtggattatattttctactctgcagaaaaggaagatgttgctgggcacccaggagctgaagttgctttggttggtggcttgaaacttctagctagactgtcacttcttacagaacaagacttatggactgttaatggacttccaaacgaaaataactcttcagatcatctgcctttattggcaaagttcagacttgagctctgactctctttgatcacatactaattttctttccaatttgtattgtttttcaaagaatgtaaagttcttaagtgtatgcatgttgtttatttttgcactgtggagattctgaagcggttatgttagatgctttgaaactccatatcagaagaaataactttataacaattttttttaataatgaaaaatattttcgtgacaagtgagctctaaattctctttattgtaaaagagatgtaaaggttttatattctaaatcctagtaaaattgacagtgatttttaaatataatgcatcttcctttgtctgcttagtaaaaaatttcatttcataattttggcaagctctgtagtggatccaaagtatctttgagttcttgcaaactacaagttgtttcctttccagaaggcttgatttcattaggagacccctctattgagttctaaatagtttatcttagaaagccttgggtcattcacaggtatccaaccagccattgtttagtttgtttttgaaggggtttgataatgctttttaagttgtacagaatgcttaatccatcttattactgtcctgagccatgtaatatgcctgcatcgtgttggggaaatgtttgggaaatataagccagcataacgtgtaaagctcactctttcaccctggaacagacaagaggtgggcttaatagaggcagagactggggatatacctttgtttccctagcatttttatttatttatttttattttattttattttttgagatggagtttcactcttgttgcccaggctgggggtgcaatggcgcaatctttgctcactgcaacccctgcctcccgggctcaagcgattctcctgcctcagcctctcgagtagctgggattacaggcatgcgtcaccactcccagctaattttgtattttcagtagagacagggtttccccatgttggttaggctggtctcgaactcccaacctcaggtgatccgcccacctcagctctcaaagtgctgggattacaggcgggagccactgcacatggcagcattttttaaaaattcagttttaagatctctggtttaggggagagattttattttactgaaccagttctatagaaatttattttattaggaaatttgtctttggaacaaagtggcagctataaaattatttttgttaagcctcagaaatatgaggaagcctgtaaaactctagtggggagatattaacttggagacctaatgctctgtaaatagtcatttaaactgttggttttagtggttttgtttctaaaatgttttcttttaccgtgatgcaccagtatgagatggtgctgacactttctatgaagtggttatgagcaggtttaataaatcctctatacaagtgtttgaatcaattttaaaacataaaaagtggaaatttccttttttgtagacagtaggaacaaggaattatatgcatttttactaagtagtaattttacactgaattgtaaatgtttttacagtgagttttattaatagaatgcttcaccttaaattggaaaacaataatagtcttggactaagtctttgtactaaagcatttgctataattatttttaaaaaaacaaacagatgaaaacctcagagaaggcatgtggattataagatttgtctagtaaaaattgtaattgaatatgtttaaatatttaatttctcattttggggggtttttatttttttattttttagatggtgtctcacgctatcgcccaggctggagtgcagtggcgcgaactcggctcactgcaacctccgcctcctgggttcaagcaattctccttcctcagcctcccaagtagctgggattacaggcatgcaccaccatgcccagctaatttttgtatttttagtagagatggaattttgccatgttggccaggctggtcttgaactcctgacctcaggggtgatccacccgcctcgggctcccaaagtgctgtgattacaggcatgagccaccatgcctggcctttggggggattttaattacagtattaattatagttctaggatttcccacattttatagtagtagtttgcaggatattatgtgccctaattagcagatatagacattatcaaattataatgatagtataattatccctttttaatattggggaaagaaaaatgaaaattcattagttaattactgctttgtgttgtgtgaatttattaacaaataacattattacatataggtcattgttaacaaacaaacatccctgaaaacctctgtgaaaatttaattttttatatcctgattaatatattgtgactttaggcccatttttcatgtgcttcactttgatagagttaatccataaaattgctctttactttagcttatcaaatgaagtattattttgtggactggaggccaaaaagtcaatgtgagcttctcacaggtttttaaagctccactaaaaataattatccacttgtctttacttttgttgaccagaatagttggtaactctgccagagcctgtacttacctgccaaaaacaattaaatctggttaatgcctgaaaccaaatctctcagtctcaagtgttatactatccaagttttaaatggaaaggtaaactgtggagtaatgaaattttggttttactgtaccttttgctatcaagataatattcatgtttgaaatcttgtctttatttggaatttagttactgtctgcttttaacctttgctttcctaaagaaagtttgagatccagagagttcaagggattggggaaagagaggcgtcaagtcatttgcactttgtacctgtaagttaggtaataaactattatactcgta

SEQ ID NO: 107190 - DNA, 4649 bp, Homo sapiens
  Payload ID: 1039
  Gene Symbol: ANGEL2
  Gene Name: angel homolog 2 (Drosophila)
  Uniprot ID: Q5VTE6
  ENST ID: ENST00000366962
  CDS Start-End: 156-1790
cggcgagactgcacctcccagcatgccttgcagccaggactggagtcggtacttaagagtgatggggttccctagatactttaggccgtcgcatcgattatagagattgaggtggaacccggggcctgggaactggacgcacgcggagggcgaagatggaagcctggcgctgtgtgaggaagggctacggccactgtgtggtgggaagaggccgataccccatgtttccccatcactcgaggagtctgggcagagactggactacaccgtgggagaatctgcaaaggtgttgctggaacagacatatttctagttgtatgaggtggcctggacattactctcgagctccttacccatacttcagtagtaggcatttttcactaaattggagaccaccctgtttgtttgagtctagaactcagttccagtactgtaactggagacctgacaacctgagccagacatctttgattcatctctctagttacgtcatgaacgctgagggagatgagccttcatcaaaacgaagaaaacaccaaggtgtgataaagcggaattgggaatatatatgtagccatgataaagaaaaaacgaagatcctaggagacaaaaatgttgatcccaaatgtgaagacagtgagaacaagtttgacttttcagtgatgtcctataatatactttcacaagatttactggaagataactctcacctttatagacattgccggcggccagtattacactggagttttaggtttcccaatattctgaaagaaattaaacattttgatgcagacgtactttgtttgcaagaagttcaagaagatcattatggagcagagatcaggccaagtttggaatcactgggttatcactgtgaatataagatgcggacaggaaggaaacctgatggctgtgctatttgcttcaaacattccaaattttcactcttgtcagtgaacccagtggaattcttccgccctgatatttctctgttggacagagacaatgttggattagttttactcttacagcccaaaattccatatgctgcctgccctgcaatctgcgtagcaaatacgcatctgttgtataatccaaggcgaggtgatattaagctgacgcaattggcaatgctactggcagagatttccagtgttgcccaccagaaagatggcagcttctgccctattgttatgtgtggtgactttaattctgttcctggttctccactatatagtttcataaaggaaggaaaattgaattatgaaggacttcccataggaaaggtatctggccaggaacagtcttcacggggacaaagaattttatctattccaatttggcccccaaacctaggtatctcacagaactgtgtgtatgaggtacagcaggtaccaaaagtagaaaagacagacagtgatctgacacaaacacagctgaagcaaacagaggtcctagtgacagctgaaaaattgtcttcaaatttacagcaccatttcagtttgtcatctgtttattcacattactttcctgacactggaattccagaagtgaccacctgtcattcccgaagtgccataactgtggattatattttctactctgcagaaaaggaagatgttgctgggcacccaggagctgaagttgctttggttggtggcttgaaacttctagctagactgtcacttcttacagaacaagacttatggactgttaatggacttccaaacgaaaataactcttcagatcatctgcctttattggcaaagttcagacttgagctctgactctctttgatcacatactaattttctttccaatttgtattgtttttcaaagaatgtaaagttcttaagtgtatgcatgttgtttatttttgcactgtggagattctgaagcggttatgttagatgctttgaaactccatatcagaagaaataactttataacaattttttttaataatgaaaaatattttcgtgacaagtgagctctaaattctctttattgtaaaagagatgtaaaggttttatattctaaatcctagtaaaattgacagtgatttttaaatataatgcatcttcctttgtctgcttagtaaaaaatttcatttcataattttggcaagctctgtagtggatccaaagtatctttgagttcttgcaaactacaagttgtttcctttccagaaggcttgatttcattaggagacccctctattgagttctaaatagtttatcttagaaagccttgggtcattcacaggtatccaaccagccattgtttagtttgtttttgaaggggtttgataatgctttttaagttgtacagaatgcttaatccatcttattactgtcctgagccatgtaatatgcctgcatcgtgttggggaaatgtttgggaaatataagccagcataacgtgtaaagctcactctttcaccctggaacagacaagaggtgggcttaatagaggcagagactggggatatacctttgtttccctagcatttttatttatttatttttattttattttattttttgagatggagtttcactcttgttgcccaggctgggggtgcaatggcgcaatctttgctcactgcaacccctgcctcccgggctcaagcgattctcctgcctcagcctctcgagtagctgggattacaggcatgcgtcaccactcccagctaattttgtattttcagtagagacagggtttccccatgttggttaggctggtctcgaactcccaacctcaggtgatccgcccacctcagctctcaaagtgctgggattacaggcgggagccactgcacatggcagcattttttaaaaattcagttttaagatctctggtttaggggagagattttattttactgaaccagttctatagaaatttattttattaggaaatttgtctttggaacaaagtggcagctataaaattatttttgttaagcctcagaaatatgaggaagcctgtaaaactctagtggggagatattaacttggagacctaatgctctgtaaatagtcatttaaactgttggttttagtggttttgtttctaaaatgttttcttttaccgtgatgcaccagtatgagatggtgctgacactttctatgaagtggttatgagcaggtttaataaatcctctatacaagtgtttgaatcaattttaaaacataaaaagtggaaatttccttttttgtagacagtaggaacaaggaattatatgcatttttactaagtagtaattttacactgaattgtaaatgtttttacagtgagttttattaatagaatgcttcaccttaaattggaaaacaataatagtcttggactaagtctttgtactaaagcatttgctataattatttttaaaaaaacaaacagatgaaaacctcagagaaggcatgtggattataagatttgtctagtaaaaattgtaattgaatatgtttaaatatttaatttctcattttggggggtttttatttttttattttttagatggtgtctcacgctatcgcccaggctggagtgcagtggcgcgaactcggctcactgcaacctccgcctcctgggttcaagcaattctccttcctcagcctcccaagtagctgggattacaggcatgcaccaccatgcccagctaatttttgtatttttagtagagatggaattttgccatgttggccaggctggtcttgaactcctgacctcaggggtgatccacccgcctcgggctcccaaagtgctgtgattacaggcatgagccaccatgcctggcctttggggggattttaattacagtattaattatagttctaggatttcccacattttatagtagtagtttgcaggatattatgtgccctaattagcagatatagacattatcaaattataatgatagtataattatccctttttaatattggggaaagaaaaatgaaaattcattagttaattactgctttgtgttgtgtgaatttattaacaaataacattattacatataggtcattgttaacaaacaaacatccctgaaaacctctgtgaaaatttaattttttatatcctgattaatatattgtgactttaggcccatttttcatgtgcttcactttgatagagttaatccataaaattgctctttactttagcttatcaaatgaagtattattttgtggactggaggccaaaaagtcaatgtgagcttctcacaggtttttaaagctccactaaaaataattatccacttgtctttacttttgttgaccagaatagttggtaactctgccagagcctgtacttacctgccaaaaacaattaaatctggttaatgcctgaaaccaaatctctcagtctcaagtgttatactatccaagttttaaatggaaaggtaaactgtggagtaatgaaattttggttttactgtaccttttgctatcaagataatattcatgtttgaaatcttgtctttatttggaatttagttactgtctgcttttaacctttgctttcctaaagaaagtttgagatccagagagttcaagggattggggaaagagaggcgtcaagtcatttgcactttgtacctgtaagttaggtaataaactattatactcgta

SEQ ID NO: 107191 - DNA, 2517 bp, Homo sapiens
  Payload ID: 1039
  Gene Symbol: ANGEL2
  Gene Name: angel homolog 2 (Drosophila)
  Uniprot ID: Q5VTE6
  ENST ID: ENST00000535388
  CDS Start-End: 341-1468
cggcgagactgcacctcccagcatgccttgcagccaggactggagtcggtacttaagagtgatggggttccctagatactttaggccgtcgcatcgattatagagattgaggtggaacccggggcctgggaactggacgcacgcggagggcgaagatggaagcctggcgctgtgtgaggaagggctacggccactgtgtggtgggaagaggccggtcagtgtgataaagcggaattgggaatatatatgtagccatgataaagaaaaaacgaagatcctaggagacaaaaatgttgatcccaaatgtgaagacagtgagaacaagtttgacttttcagtgatgtcctataatatactttcacaagatttactggaagataactctcacctttatagacattgccggcggccagtattacactggagttttaggtttcccaatattctgaaagaaattaaacattttgatgcagacgtactttgtttgcaagaagttcaagaagatcattatggagcagagatcaggccaagtttggaatcactgggttatcactgtgaatataagatgcggacaggaaggaaacctgatggctgtgctatttgcttcaaacattccaaattttcactcttgtcagtgaacccagtggaattcttccgccctgatatttctctgttggacagagacaatgttggattagttttactcttacagcccaaaattccatatgctgcctgccctgcaatctgcgtagcaaatacgcatctgttgtataatccaaggcgaggtgatattaagctgacgcaattggcaatgctactggcagagatttccagtgttgcccaccagaaagatggcagcttctgccctattgttatgtgtggtgactttaattctgttcctggttctccactatatagtttcataaaggaaggaaaattgaattatgaaggacttcccataggaaaggtatctggccaggaacagtcttcacggggacaaagaattttatctattccaatttggcccccaaacctaggtatctcacagaactgtgtgtatgaggtacagcaggtaccaaaagtagaaaagacagacagtgatctgacacaaacacagctgaagcaaacagaggtcctagtgacagctgaaaaattgtcttcaaatttacagcaccatttcagtttgtcatctgtttattcacattactttcctgacactggaattccagaagtgaccacctgtcattcccgaagtgccataactgtggattatattttctactctgcagaaaaggaagatgttgctgggcacccaggagctgaagttgctttggttggtggcttgaaacttctagctagactgtcacttcttacagaacaagacttatggactgttaatggacttccaaacgaaaataactcttcagatcatctgcctttattggcaaagttcagacttgagctctgactctctttgatcacatactaattttctttccaatttgtattgtttttcaaagaatgtaaagttcttaagtgtatgcatgttgtttatttttgcactgtggagattctgaagcggttatgttagatgctttgaaactccatatcagaagaaataactttataacaattttttttaataatgaaaaatattttcgtgacaagtgagctctaaattctctttattgtaaaagagatgtaaaggttttatattctaaatcctagtaaaattgacagtgatttttaaatataatgcatcttcctttgtctgcttagtaaaaaatttcatttcataattttggcaagctctgtagtggatccaaagtatctttgagttcttgcaaactacaagttgtttcctttccagaaggcttgatttcattaggagacccctctattgagttctaaatagtttatcttagaaagccttgggtcattcacaggtatccaaccagccattgtttagtttgtttttgaaggggtttgataatgctttttaagttgtacagaatgcttaatccatcttattactgtcctgagccatgtaatatgcctgcatcgtgttggggaaatgtttgggaaatataagccagcataacgtgtaaagctcactctttcaccctggaacagacaagaggtgggcttaatagaggcagagactggggatatacctttgtttccctagcatttttatttatttatttttattttattttattttttgagatggagtttcactcttgttgcccaggctgggggtgcaatggcgcaatctttgctcactgcaacccctgcctcccgggctcaagcgattctcctgcctcagcctctcgagtagctgggattacaggcatgcgtcaccactcccagctaattttgtattttcagtagagacagggtttccccatgttggttaggctggtctcgaactcccaacctcaggtgatccgcccacctcagctctcaaagtgctgggattacaggcgggagccactgcacatggcagcatttttt

SEQ ID NO: 107192 - DNA, 1244 bp, Homo sapiens
  Payload ID: 1039
  Gene Symbol: ANGEL2
  Gene Name: angel homolog 2 (Drosophila)
  ENST ID: ENST00000621746
  CDS Start-End: 11-799
tagataccccatgtttccccatcactcgaggagtctgggcagagactggactacaccgtgggagaatctgcaaaggtgttgctggaacagacatatttctagttgtatgaggtggcctggacattactctcgagctccttacccatacttcagtagtaggcatttttcactaaattggagaccaccctgtttgtttgagtctagaactcagttccagtactgtaactggagacctgacaacctgagccagacatctttgattcatctctctagttacgtcatgaacgctgagggagatgagccttcatcaaaacgaagaaaacaccaaggtgtgataaagcggaattgggaatatatatgtagccatgataaagaaaaaacgaagatcctaggagacaaaaatgttgatcccaaatgtgaagacagtgagaacaagtttgacttttcagtgatgtcctataatatactttcacaagatttactggaagataactctcacctttatagacattgccggcggccagtattacactggagttttaggtttcccaatattctgaaagaaattaaacattttgatgcagacgtactttgtttgcaagaagttcaagaagatcattatggagcagagatcaggccaagtttggaatcactgggtacaatgcaacttttttttttttttttcttttttgagacagggtctcactctgtcgcccaactggagtgcagtggcacaatcatggctcactacagcctcaacctactgggctcaagtaatcctctcatttcggcttcctgagtagctgggactagagatgtgtgccaccatgcccggccaattatttaattttttttatagagacaaggcaatgtaacttttagccaaatttacttttgaaaattcatgtgtcattaaagtataacttgctgacaaagatgtgtggcatattttggctaaaaatcttaattttaaaaacttaatttcaaagaggaaaagattgaggtactcactggaaacttttgtgttggtgtataattttaattcaaacagaaagatgtgtaagaatatcttagtagctccctttcctaggagttgttctgtccacctgtagacctataagcttctgagctccaggagaccattttgtctcgttcatcattataataccagtgcctgccagtgtctacctaatggatagatgccaaaaacctgtttgataaataaacactcctagaaacaagtt

SEQ ID NO: 107193 - DNA, 1886 bp, Homo sapiens
  Payload ID: 1040
  Gene Symbol: AAMP
  Gene Name: angio-associated, migratory cell protein
  Uniprot ID: Q13685
  ENST ID: ENST00000248450
  CDS Start-End: 172-1476
gcggccagccaaccttcgtagctattggccgaacggccgtcgctcttcctgctggggagtcgcctacgcctacttcctgccgggaggaggggctcgagttccgcgtcgtcgcgcagagctgactctgggaggcgtttgggcccagagaagtggatccgccgcttgcgccgcatggagtccgaatcggaaagcggggctgctgctgacacccccccactggagaccctaagcttccatggtgatgaagagattatcgaggtggtagaacttgatcccggtccgccggacccagatgacctggcccaggagatggaagatgtggactttgaggaagaagaggaggaagagggcaacgaagagggctgggttctagaaccccaggaaggggtggtcggcagcatggagggccccgacgatagcgaggtcacctttgcattgcactcagcatctgtgttttgtgtgagcctggaccccaagaccaataccttggcagtgaccgggggtgaagatgacaaagccttcgtatggcggctcagcgatggggagctgctctttgagtgtgcaggccataaagactctgtgacttgtgctggtttcagccatgactccactctagtggccacaggggacatgagtggcctcttgaaagtgtggcaggtggacactaaggaggaggtctggtcctttgaagcgggagacctggagtggatggagtggcatcctcgggcacctgtcctgttggcgggcacagctgacggcaacacctggatgtggaaagtcccgaatggtgactgcaagaccttccagggtcccaactgcccagccacctgtggccgagtcctccctgatgggaagagagctgtggtaggctatgaagatgggaccatcaggatttgggacctgaagcagggaagccctatccatgtactgaaagggactgagggtcaccagggcccactcacctgtgttgctgccaaccaggatggcagcttgatcctaactggctctgtggactgccaggccaagctggtcagtgccaccaccggcaaggtggtgggtgtttttagacctgagactgtggcctcccagcccagcctgggagaaggggaggagagtgagtccaactcggtggagtccttgggcttctgcagtgtgatgcccctggcagctgttggctacctggatgggaccttggccatctatgacctggctacgcagactcttaggcatcagtgtcagcaccagtcgggcatcgtgcagctgctgtgggaggcaggcactgccgtggtatatacctgcagcctggatggcatcgtgcgcctctgggacgcccggaccggccgcctgcttactgactaccggggccacacggctgagatcctggactttgccctcagcaaagatgcctccctggtggtgaccacgtcaggagaccacaaagcgaaagtattttgtgtccaaaggcctgaccgttaatggctgcagcccctgcctgtgtgtctggtgttgaggggacgaagggacccctgcccctgtctgccagcagaggcagtagggcacagagggaagaggagggtggggccctggatgactttccagcctcttcaactgacttgctcccctctccttttcttctctttagagacccagcccagggccctcccacccttgtccagacctggtgggcccttcagagggaggggtggacctgtttctctttcactttcatttgctggtgtgagccatggggtgtgtatttgtatgtggggagtaggtgtttgaggttcccgttctttcccttcccaagtctctgggggtggaaaggaggaagagatactagttaaagattttaaaaatgtaaataaaatatacttcccagagacaga

SEQ ID NO: 107194 - DNA, 671 bp, Homo sapiens
  Payload ID: 1040
  Gene Symbol: AAMP
  Gene Name: angio-associated, migratory cell protein
  ENST ID: ENST00000447885
  CDS Start-End: 70-671
ctggccagccgtggcctcccgtcctgtgtcccgcgcgcccccgcggaccccgatgacctggcccaggagatggaagatgtggactttgaggaagaagaggaggaagagggcaacgaagagggctgggttctagaaccccaggaaggggtggtcggcagcatggagggccccgacgatagcgaggtcacctttgcattgcactcagcatctgtgttttgtgtgagcctggaccccaagaccaataccttggcagtgaccgggggtgaagatgacaaagccttcgtatggcggctcagcgatggggagctgctctttgagtgtgcaggccataaagactctgtgacttgtgctggtttcagccatgactccactctagtggccacaggggacatgagtggcctcttgaaagtgtggcaggtggacactaaggaggaggtctggtcctttgaagcgggagacctggagtggatggagtggcatcctcgggcacctgtcctgttggcgggcacagctgacggcaacacctggatgtggaaagtcccgaatggtgactgcaagaccttccagggtcccaactgcccagccacctgtggccgagtcctccctgatgggaagagagctgtggtaggctatgaagatgggaccatcaggatttgggacctgaagcaggg

SEQ ID NO: 107195 - DNA, 742 bp, Homo sapiens
  Payload ID: 1040
  Gene Symbol: AAMP
  Gene Name: angio-associated, migratory cell protein
  ENST ID: ENST00000422731
  CDS Start-End: 1-569
ctatccatgtactgaaaggtatcagagggactgagggtcaccagggcccactcacctgtgttgctgccaaccaggatggcagcttgatcctaactggctctgtggactgccaggccaagctggtcagtgccaccaccggcaaggtggtgggtgtttttagacctgagactgtggcctcccagcccagcctgggagaaggggaggagagtgagtccaactcggtggagtccttgggcttctgcagtgtgatgcccctggcagctgttggctacctggatgggaccttggccatctatgacctggctacgcagactcttaggcatcagtgtcagcaccagtcgggcatcgtgcagctgctgtgggaggcaggcactgccgtggtatatacctgcagcctggatggcatcgtgcgcctctgggacgcccggaccggccgcctgcttactgactaccggggccacacggctgagatcctggactttgccctcagcaaagatgcctccctggtggtgaccacgtcaggagaccacaaagcgaaagtattttgtgtccaaaggcctgaccgttaatggctgcagcccctgcctgtgtgtctggtgttgaggggacgaagggacccctgcccctgtctgccagcagaggcagtagggcacagagggaagaggagggtggggccctggatgactttccagcctcttcaactgacttgctcccctctccttttcttctctttagagaccca

SEQ ID NO: 107196 - DNA, 1804 bp, Homo sapiens
  Payload ID: 1040
  Gene Symbol: AAMP
  Gene Name: angio-associated, migratory cell protein
  ENST ID: ENST00000444053
  CDS Start-End: 93-1400
ccgggaggaggggctcgagttccgcgtcgtcgcgcagagctgactctgggaggcgtttgggcccagagaagtggatccgccgcttgcgccgcatggagtccgaatcggaaagcggggctgctgctgacacccccccactggagaccctaagcttccatggtgatgaagagattatcgaggtggtagaacttgatcccggtccgccggacccagcagatgacctggcccaggagatggaagatgtggactttgaggaagaagaggaggaagagggcaacgaagagggctgggttctagaaccccaggaaggggtggtcggcagcatggagggccccgacgatagcgaggtcacctttgcattgcactcagcatctgtgttttgtgtgagcctggaccccaagaccaataccttggcagtgaccgggggtgaagatgacaaagccttcgtatggcggctcagcgatggggagctgctctttgagtgtgcaggccataaagactctgtgacttgtgctggtttcagccatgactccactctagtggccacaggggacatgagtggcctcttgaaagtgtggcaggtggacactaaggaggaggtctggtcctttgaagcgggagacctggagtggatggagtggcatcctcgggcacctgtcctgttggcgggcacagctgacggcaacacctggatgtggaaagtcccgaatggtgactgcaagaccttccagggtcccaactgcccagccacctgtggccgagtcctccctgatgggaagagagctgtggtaggctatgaagatgggaccatcaggatttgggacctgaagcagggaagccctatccatgtactgaaagggactgagggtcaccagggcccactcacctgtgttgctgccaaccaggatggcagcttgatcctaactggctctgtggactgccaggccaagctggtcagtgccaccaccggcaaggtggtgggtgtttttagacctgagactgtggcctcccagcccagcctgggagaaggggaggagagtgagtccaactcggtggagtccttgggcttctgcagtgtgatgcccctggcagctgttggctacctggatgggaccttggccatctatgacctggctacgcagactcttaggcatcagtgtcagcaccagtcgggcatcgtgcagctgctgtgggaggcaggcactgccgtggtatatacctgcagcctggatggcatcgtgcgcctctgggacgcccggaccggccgcctgcttactgactaccggggccacacggctgagatcctggactttgccctcagcaaagatgcctccctggtggtgaccacgtcaggagaccacaaagcgaaagtattttgtgtccaaaggcctgaccgttaatggctgcagcccctgcctgtgtgtctggtgttgaggggacgaagggacccctgcccctgtctgccagcagaggcagtagggcacagagggaagaggagggtggggccctggatgactttccagcctcttcaactgacttgctcccctctccttttcttctctttagagacccagcccagggccctcccacccttgtccagacctggtgggcccttcagagggaggggtggacctgtttctctttcactttcatttgctggtgtgagccatggggtgtgtatttgtatgtggggagtaggtgtttgaggttcccgttctttcccttcccaagtctctgggggtggaaaggaggaagagatactagttaaagattttaaaaatgtaaataaaatatacttcccaga

SEQ ID NO: 107197 - DNA, 1761 bp, Homo sapiens
  Payload ID: 1040
  Gene Symbol: AAMP
  Gene Name: angio-associated, migratory cell protein
  ENST ID: ENST00000420660
  CDS Start-End: 143-1390
tccccttggccctcccttaccgcacggtctctggccagccgtggcctcccgtcctgtgtcccgcgcgcccccgcggaccccggtgtgtctgactccaccttcccttctcgccacatgacccgccccagcctcaggcctcctcatgcttctctccgtacctcttaccgcctcccgagccccatcttctaaccctctccccaaagcagatgacctggcccaggagatggaagatgtggactttgaggaagaagaggaggaagagggcaacgaagagggctgggttctagaaccccaggaaggggtggtcggcagcatggagggccccgacgatagcgaggtcacctttgcattgcactcagcatctgtgttttgtgtgagcctggaccccaagaccaataccttggcagtgaccgggggtgaagatgacaaagccttcgtatggcggctcagcgatggggagctgctctttgagtgtgcaggccataaagactctgtgacttgtgctggtttcagccatgactccactctagtggccacaggggacatgagtggcctcttgaaagtgtggcaggtggacactaaggaggaggtctggtcctttgaagcgggagacctggagtggatggagtggcatcctcgggcacctgtcctgttggcgggcacagctgacggcaacacctggatgtggaaagtcccgaatggtgactgcaagaccttccagggtcccaactgcccagccacctgtggccgagtcctccctgatgggaagagagctgtggtaggctatgaagatgggaccatcaggatttgggacctgaagcagggaagccctatccatgtactgaaagggactgagggtcaccagggcccactcacctgtgttgctgccaaccaggatggcagcttgatcctaactggctctgtggactgccaggccaagctggtcagtgccaccaccggcaaggtggtgggtgtttttagacctgagactgtggcctcccagcccagcctgggagaaggggaggagagtgagtccaactcggtggagtccttgggcttctgcagtgtgatgcccctggcagctgttggctacctggatgggaccttggccatctatgacctggctacgcagactcttaggcatcagtgtcagcaccagtcgggcatcgtgcagctgctgtgggaggcaggcactgccgtggtatatacctgcagcctggatggcatcgtgcgcctctgggacgcccggaccggccgcctgcttactgactaccggggccacacggctgagatcctggactttgccctcagcaaagatgcctccctggtggtgaccacgtcaggagaccacaaagcgaaagtattttgtgtccaaaggcctgaccgttaatggctgcagcccctgcctgtgtgtctggtgttgaggggacgaagggacccctgcccctgtctgccagcagaggcagtagggcacagagggaagaggagggtggggccctggatgactttccagcctcttcaactgacttgctcccctctccttttcttctctttagagacccagcccagggccctcccacccttgtccagacctggtgggcccttcagagggaggggtggacctgtttctctttcactttcatttgctggtgtgagccatggggtgtgtatttgtatgtggggagtaggtgtttgaggttcccgttctttcccttcccaagtctctgggggtggaaaggaggaagagatactagttaaaga

SEQ ID NO: 107198 - DNA, 4509 bp, Homo sapiens
  Payload ID: 1041
  Gene Symbol: AGGF1
  Gene Name: angiogenic factor with G patch and FHA domains 1
  Uniprot ID: Q8N302
  ENST ID: ENST00000312916
  CDS Start-End: 383-2527
ggtcccgcctgccgctggcgccgttgtttccggctcaactggggagctgctggagctcttctggcctctggttttccgactgcttatccgacgctcctccctctgtctctgtagctggagaaggtagtttccaggaaagttttccggtttgcaggccgcgcacatcgggcaggggccatcctcggtccccttgctcgttgctcgcagccccgttcggctacaagtgagtttcagggcgtcatggccaggggccaccgcggccagccgggtgtgaggctgcctttcgctgcccgcgcgctccagtggtctctgggtccgccggcgtccgtttcggcctgaacgcagcccctccgcggcgacgagcagtctcgcgccggagctcatggcctcggaggcgccgtccccgccgcggtcgccgccgccgcccacctcccccgagcctgagctggcccagctaaggcggaaggtggagaagttggaacgtgaactgcggagctgcaagcggcaggtgcgggagatcgagaagctgctgcatcacacagaacggctgtaccagaacgcagaaagcaacaaccaggagctccgcacgcaggtggaagaactcagtaaaatactccaacgtgggagaaatgaagataataaaaagtctgatgtagaagtacaaacagagaaccatgctccttggtcaatctcagattatttttatcagacgtactacaatgacgttagtcttccaaataaagtgactgaactgtcagatcaacaagatcaagctatcgaaacttctattttgaattctaaagaccatttacaagtagaaaatgatgcttaccctggtaccgatagaacagaaaatgttaaatatagacaagtggaccattttgcctcaaattcacaggagccagcatctgcattagcaacagaagatacctccttagaaggctcatcattagctgaaagtttgagagctgcagcagaagcggctgtatcacagactggatttagttatgatgaaaatactggactgtattttgaccacagcactggtttctattatgattctgaaaatcaactctattatgatccttccactggaatttattactattgtgatgtggaaagtggtcgttatcagtttcattctcgagtagatttgcaaccttatccgacttctagcacaaaacaaagtaaagataaaaaattgaagaagaaaagaaaagatccagattcttctgcaacaaatgaggaaaaggatttgaactcagaggatcaaaaagccttcagtgttgaacatacaagctgcaatgaggaagaaaatttcgcaaatatgaaaaagaaggccaaaataggcattcatcacaaaaatagtccccccaaagtcactgttccaactagtggaaatactatagagtctcctcttcatgaaaacatctctaattcaacatcatttaaagatgagaaaatcatggagactgatagtgaaccagaggaaggtgaaattacagactctcagactgaggatagttatgacgaagccattaccagtgaaggcaatgtaactgcagaagatagtgaggatgaagatgaagacaaaatttggcccccatgtattagagtaattgtcattagatcacctgtgttgcagataggatcactctttatcattactgctgtaaaccctgctacaattggaagagaaaaggatatggaacatactctccgaatccctgaagttggtgtcagtaagtttcatgcagaaatttattttgaccatgacttacaaagttatgtccttgtggatcaaggcagtcaaaatggcacaattgttaatggaaaacagattcttcagccgaaaactaaatgtgacccttacgtacttgagcatggagatgaagtcaaaattggagaaactgtcttatcctttcacattcatcctggcagtgatacctgtgatggctgtgaaccagggcaggttagagcccaccttcgccttgataagaaagatgaatcttttgttggtccaacactaagtaaggaggaaaaagagttggaaagaagaaaagaattaaagaaaatacgagtaaaatatggtttacagaatacagaatacgaagatgaaaagacattgaagaatccaaaatataaagatagagctggaaaacgtagggagcaggttggaagtgaaggaactttccaaagagatgatgctcctgcatctgttcattctgaaattactgatagcaacaaaggtcggaagatgttggagaagatgggttggaagaaaggagagggcctggggaaggatggtggaggaatgaaaacgccgatccagcttcagcttcggcgaacacatgcaggcttggggacaggcaaaccatcctcatttgaagatgttcaccttctccaaaacaagaacaaaaaaaactgggacaaagcacgagagcggtttactgaaaacttcccagaaactaagcctcaaaaagatgacccagggaccatgccttgggtaaaagggactttagagtgaaggctaatcatagaaaaaaaacctctagtttttttaaaaatagaatttggaaacttattttttctccccaaaagaatcagcagcacaggggaactatgtcacagtttacctcttcctgattcagaaatgtgtatggtttgcagcttttaaaaaccatttttttaaaactaataaatagtgactgaaccaatttatgcagtaaatagactaaagttcacagggcacggatgagtttatcaaacttcgttattttatcttgtcatttacaacatccatataagcaactagccatataagcaaaattcatagaactactaatgacttaagtgtacatctgttcttgtctccatatattcatgtaagatgcacaacaaaagaaacatcagaagtttataaaaataaatctgactatatgcatcctcatttattccctttagaacctaggtaaaaaatgttgcgaaaacatgggtagtggcgcatacattttgttatccttgaaatagcctaagtaatgttattgaagaactaatgaacaggtaacatattgtagaaaattagtctttcattgttttcttctgtgaagaatctgttgctatgtactgtatattcagcatttatatttggtttgtttcatagctaatgaggtatttagatatgaacaactgaatacatattgaaatagtgtgctggcttttgtagttttgataaagaccattgcaggcaatggaattgtgccagagaaatctgatttctagtacaaaaggaatacttagccagggcctcaagctcaagatacttattgaaaacatcctcaattgcaataaaaacattataacatgaaaaagagtgattttttgaaccggtgatttaaatgtattgatctgctttgaattttcaagcagccagaattttctagtttaaattggcagagttataacaaaggagagcctcaaatattagacaattgcagtgcggctttctgggcacaggtgtcactgctctgccacctatcactattctttttctgttcagtttttctctcaggtgtttgctgggaaattaacactggaactgacccttttctggcagtgaatgtaagctctagctcccccatctactataaagaaatgtcttcgagatgtagaaataaggaatattctgaaaataaaaattatacagtagtaaagataattcagaaagaaaaagctacctgttagaatttccagtctaaatggcacagggtagttacggagaaaaggggatggagaaggagaaactatgactaaagatgagaggtatgaacgagttgtcaggttcctatgggcttaagctaggacaatcaggccctaaactccaaatttggataaaatatctctttgcattcttcttggccacctgcatagtctgacacatacgtatgtacagttagacttgcaggctgcaggagtgccctgcattgttttcttttaattagaaataaaaagtattagtctaaatgtggttctggtgctggtgccctgtatatatgtaacaatataggacccctccaaataggttttgcttctggtgaatcttggtcattgggttagtatatgactgtctataatattttccatttgtattattatattggggaaaacattttttatcattttctattaagaaaatggaaaacttaaatatggtgttaaaaatggaaatatatgtgatatttgcattattaaacccctttgcagatctaaagtctcagggttccactattagtggttaaagtactgaataatgtctgggtctatttccatctgtaaaataagaatatttgtctcacgtgtctgtcatgaatagcaaatgagaaaatgtatataaaagcactttgtaaattgtaaaagtagtacagatgtgagcttctatttgtttagaagcataaatgtgaattatatacagtttgaattttgcataaattttttgtgtctaattttaaa

SEQ ID NO: 107199 - DNA, 825 bp, Homo sapiens
  Payload ID: 1041
  Gene Symbol: AGGF1
  Gene Name: angiogenic factor with G patch and FHA domains 1
  ENST ID: ENST00000502408
  CDS Start-End: 1-262
gtttccggctcaactggggagctgctggagctcttctggcctctggttttccgactgcttatccgacgctcctccctctgtctctgtagctggagaaggtagtttccaggaaagttttccggtttgcaggccgcgcacatcgggcaggggccatcctcggtccccttgctcgttgctcgcagccccgttcggctacaagtggaagaactcagtaaaatactccaacgtgggagaaatgaagataataaaaagtctgatgtagaagtacaaacagagaaccatgctccttggtcaatctcagattatttttatcagacgtactacaatgacgttagtcttccaaataaagtgactgaactgtcagatcaacaagatcaagctatcgaaacttctattttgaattctaaagaccatttacaagtagaaaatgatgcttaccctggtaccgatagaacagaaaatgttaaatatagacaagtggaccattttgcctcaaattcacaggagccagcatctgcattagcaacagaagatacctccttagaaggctcatcattagctgaaagtttgagagctgcagcagaagcggctgtatcacagactggatttagttatgatgaaaatactggactgtattttgaccacagcactggtttctattatgattctgaaaatcaactctattatgatccttccactggaatttattactattgtgatgtggaaagtggtcgttatcagtttcattctcgagtagatttgcaaccttatccgacttctagcacaaaacaaagtaaagataaaaaattgaagaagaaaagaaaa

SEQ ID NO: 107200 - DNA, 1142 bp, Homo sapiens
  Payload ID: 1041
  Gene Symbol: AGGF1
  Gene Name: angiogenic factor with G patch and FHA domains 1
  Uniprot ID: Q8N302
  ENST ID: ENST00000506806
  CDS Start-End: 312-842
ttttccgactgcttatccgacgctcctccctctgtctctgtagctggagaaggtagtttccaggaaagttttccggtttgcaggccgcgcacatcgggcaggggccatcctcggtccccttgctcgttgctcgcagccccgttcggctacaagtgagtttcagggcgtcatggccaggggccaccgcggccagccgggtgtgaggctgcctttcgctgcccgcgcgctccagtggtctctgggtccgccggcgtccgtttcggcctgaacgcagcccctccgcggcgacgagcagtctcgcgccggagctcatggcctcggaggcgccgtccccgccgcggtcgccgccgccgcccacctcccccgagcctgagctggcccagctaaggcggaaggtggagaagttggaacgtgaactgcggagctgcaagcggcaggtgcgggagatcgagaagctgctgcatcacacagaacggctgtaccagaacgcagaaagcaacaaccaggagctccgcacgcaggtggaagaactcagtaaaatactccaacgtgggagaaatgaagataataaaaagtctgatgtagaagtacaaacagagaaccatgctccttggtcaatctcagattatttttatcagacgtactacaatgacgttagtcttccaaataaagtgactgaactgtcagatcaacaagatcaagctatcgaaacttctattttgaattctaaagaccatttacaagtagaaaatgatgcttaccctggtaccgatagaacagaaaatgttaaatatagacaagtggaccattttgcctcaaattcacaggtaataaaatgctaaacatgaaactgttgatgcccaagaacctgtccttctttgttgttattatgtggaaagatagacttctttggtccgtcacagcatatataagggttataaacattcttatgtgtaattatgcaaagaatgttgtagtttttccaaaaccagaattagaacttcttcatatatgtagtggttttcctactacattgtgttccaaaattttgtgatctacataaactaaaacaaaatttgtccagatattttgactgaacaaaagaactgtggacaacaataccacatttacacctaaaaaaa

SEQ ID NO: 107201 - DNA, 1222 bp, Homo sapiens
  Payload ID: 1042
  Gene Symbol: ANG
  Gene Name: angiogenin, ribonuclease, RNase A family, 5
  Uniprot ID: P03950
  ENST ID: ENST00000336811
  CDS Start-End: 601-1044
gtcctgccaaagaaagcagcagcgaataagtacgtggcagatggtgctgtcgaccagtgtcaagaccaagtttcatgggttcctggacgctcagccaggggtagtctctgaagggccgcctggcaattgggagcagaagccagtttcccgccatctgctctccgtggaggcagtgctctcgcggctgctgcccgttggggtccagctgaggaaggagcgcggatcccaggctcgttctttgcctgggctgcccctgcggcccctggggcgggtgctgctgcggcgccagctccaagggcggatccaggcgggaggggcctcctcggagaagcggggcgcggtcccaactacgcagaggctggcacgccgaccctccacacctcaccacgcccccatctccgtccgtgtacacacactcacacaaggacgccaaccccacctagatgcaaagcaggattcaaaagaacatctttgcgttttctaccggctccccatcatcgtactagggaggaagaagcgggtgagaaacaaaacttctttccattgtcctgcccgtttctgcggacttgttctgaggccgaggagcctgtgttggaagagatggtgatgggcctgggcgttttgttgttggtcttcgtgctgggtctgggtctgaccccaccgaccctggctcaggataactccaggtacacacacttcctgacccagcactatgatgccaaaccacagggccgggatgacagatactgtgaaagcatcatgaggagacggggcctgacctcaccctgcaaagacatcaacacatttattcatggcaacaagcgcagcatcaaggccatctgtgaaaacaagaatggaaaccctcacagagaaaacctaagaataagcaagtcttctttccaggtcaccacttgcaagctacatggaggttccccctggcctccatgccagtaccgagccacagcggggttcagaaacgttgttgttgcttgtgaaaatggcttacctgtccacttggatcagtcaattttccgtcgtccgtaaccagcgggcccctggtcaagtgctggctctgctgtccttgccttccatttcccctctgcacccagaacagtggtggcaacattcattgccaagggcccaaagaaagagctacctggaccttttgttttctgtttgacaacatgtttaataaataaaaatgtcttgatatcagtaagaa

SEQ ID NO: 107202 - DNA, 742 bp, Homo sapiens
  Payload ID: 1042
  Gene Symbol: ANG
  Gene Name: angiogenin, ribonuclease, RNase A family, 5
  Uniprot ID: P03950
  ENST ID: ENST00000397990
  CDS Start-End: 121-564
tccaggttcacacaactggaacccatctccaggaacaaacagctggaacccatctcccgttgaagggaaactgccagatttttgtaagattcttcctcctgggagcctgtgttggaagagatggtgatgggcctgggcgttttgttgttggtcttcgtgctgggtctgggtctgaccccaccgaccctggctcaggataactccaggtacacacacttcctgacccagcactatgatgccaaaccacagggccgggatgacagatactgtgaaagcatcatgaggagacggggcctgacctcaccctgcaaagacatcaacacatttattcatggcaacaagcgcagcatcaaggccatctgtgaaaacaagaatggaaaccctcacagagaaaacctaagaataagcaagtcttctttccaggtcaccacttgcaagctacatggaggttccccctggcctccatgccagtaccgagccacagcggggttcagaaacgttgttgttgcttgtgaaaatggcttacctgtccacttggatcagtcaattttccgtcgtccgtaaccagcgggcccctggtcaagtgctggctctgctgtccttgccttccatttcccctctgcacccagaacagtggtggcaacattcattgccaagggcccaaagaaagagctacctggaccttttgttttctgtttgacaacatgtttaataaataaaaatgtcttgatatcagtaagaa

SEQ ID NO: 107203 - DNA, 6888 bp, Homo sapiens
  Payload ID: 1043
  Gene Symbol: AMOT
  Gene Name: angiomotin
  Uniprot ID: Q4VCS5
  ENST ID: ENST00000304758
  CDS Start-End: 797-2824
ccaggagctgccttggcagtcacgccccttccttccgaggagctttctggctgcctaaactggtagaccccctgaattactcctccatctccgctctctttcgcctcctcttctcttagttctctccgcctccccctcaactaccaccacctccagtcagtctcgcctccggctatccgctgctccaccctctggcccggtatcctgcctgtccgctgccaccaaggagagcccggacggagcagcgaggaggggagcagccgggagttggggcttcccccctgcccatccctggccgctggcccgggaccgaagccacttgagcgagcagagagtcgtcaccttgtcttctttgccttcagggagctgctaagaaggacaaataagatagcagagtgaaagagcttttgtctccttagaaggaaggctgagaaactaaaggccagcgcaggacatctcattgccattgtcagccaggaactcgcagcctcacagccctacttcttctctgacctctggggggtccttgcccttgctacaatctccaccatccactagattgtctcctgcccgacaccccttggtcccaaaccagggagaccattcagctcacctgcctaggccgcagcagcatttccttcctaatcaggctcaccagggggatcattaccgtctctcccaacctggcctgagtcagcagcagcagcaacagcagcagcagcaccatcatcaccatcaccaccaacaacagcagcagcagcagccacagcagcagccaggagaagcctattcagctatgcctcgggctcagccatcctctgcttcttatcagccagtgccagcagacccttttgccattgtttccagagcccagcagatggttgagatcctctcagacgagaaccggaacttgaggcaagagttggaaggatgctatgagaaggtggcaagactgcagaaggtggagacagaaatccagcgcgtctcggaggcatatgagaacctcgtgaagtcatcctccaaaagagaggccctagagaaagccatgagaaacaagctagagggcgagattcggaggatgcatgatttcaacagggatctgagagagcgtctagagactgccaacaagcagcttgcagagaaggaatatgaggggtcagaggacaccagaaaaaccatctcgcagctctttgcaaaaaataaagaaagccagcgtgagaaggagaagctggaagcggagctggccactgcccgttctaccaatgaggaccaaagacgacacatcgaaatccgagatcaggccctgagtaatgcccaggccaaggtggtaaagctggaagaagagctgaaaaagaagcaagtgtacgttgacaaggtggagaagatgcagcaggcccttgtacagctccaggcagcatgtgaaaaacgtgagcagctagagcaccgtctccggacacgactggagagggaactggaatccctgagaatccagcagcgtcagggcaactgtcagcccaccaacgtttcagaatacaatgctgctgcactgatggagctccttcgggagaaagaggagaggattctggctctggaagctgatatgacaaagtgggagcagaaatatttggaggagaatgtgatgagacattttgctctggatgctgctgcaactgtggctgctcagagggacacaacagtcatcagtcactctcctaacaccagctatgacacagctctagaagctcgcatccagaaagaggaggaagaaatcttgatggccaataagcgttgccttgacatggagggcaggattaagaccctccatgcccagattattgagaaggatgccatgatcaaagtactccagcagcgttcccggaaggagccgagcaagacagagcagctgtcgtgcatgcggccagcgaagtctctgatgtccatttccaatgctggatcaggcttgctctcccactcatccaccctgactggctcccccatcatggaagaaaagcgagacgacaagagctggaaggggagcctaggcattctcctgggtggagactaccgtgctgaatatgtcccttccacaccctcgcctgtgccaccctcgactcccctgctctcggctcactccaagacaggcagccgagactgcagtacccaaactgaacgtgggacggaatcgaacaaaactgcagctgttgctcccatctctgttcctgctccagttgctgctgccgccactgctgccgccatcactgccactgctgccaccatcaccaccaccatggtagctgctgctccagttgctgttgctgctgctgctgctccagctgctgctgctgccccgtctccagccactgccgctgctactgctgctgctgtttctccagctgctgctggtcagattccagctgctgcctctgttgcctcagctgctgccgttgctccttctgctgctgctgctgctgctgttcaggttgctccagctgctccggctccagttccagctccggctctggttccggttccagctccagcagcggctcaggcttctgctcctgctcagactcaggcaccaacttcagctccggctgtggctccaactccagctccaactccaactccagctgtggctcaggctgaggttcctgcaagtccagctaccggtcctggaccacatcgtttgtctataccaagtttgacctgcaatccagacaaaacagatgggcctgtgttccactccaatactctggaaagaaaaactcccattcagatcctgggacaagagcctgatgcagagatggtggaatatctcatctaaacggccaaatcaagagctgcagattatcagcaaaaatgcttttaatcattttcccccttttattggttcttgttttgagggtgaggacaagggttgtggggaggggatgttttttaacaggactttttattggaacaatgtactacttgagtaataccatgtgaacaccagtctattttggtatgcttagggagtacctctaaagacagattaatcagaatgtgctctaaagcttattgtttgaatttatacgaatactgggactgttaacaggtggctatacatcgacgttttcaatgtgcttaaatttgtttaaattttccatattctagatcattttttattgaagagcacagtatgtgtggaagacagtgtataacacgtagtttggaagtgggaagctagagagaattgagtgtgtgctgttttgtatagttactatcctgtgcagcagctggagaaagcactcacctcaggcttacaaaagggaatagtttcaggagctatgtaagctggaaaaaaggtagggagttttggggtgcagaagggtactggagctaattttttcttccagtttcccagctaccctgccccagggaattgtgtttgtcttcatttcagtggtgctttggaaatggattcttttggttccctcctggaggttcatacattcatatatatgctctggagtaatttatgcatttggataattaatatattgctttcagatgctgggagagtacattaactgagtgatgcgcaacttcctctctcttagggaattagaccatcagaggccttgatggagagttgcatggggtgctatatgcagacttccatggtttgtgtgtagccatgaacacagcttgcttgcatttagtaagaccaatcagcttagtgtttatttcttctacagcacagattcactggctgggtctccagtctcaaattgccaatcatttgcaaagtgaggaaggatctttgttgacaggttgaatgctttgaatttctggtgactactttgaaataacttgttttgtttgtcaaattctaagcatatgtcttaaaaggcatttttgactatcacctccaagggaatagcttgagaaacccaaagtactatgctgcagtcgggggagaggtggattgcagcagtatcctcaactacctcttctcactgtcagtgacaccatcttggaatacctttgggaagcagcaggaaatgtgcatgtgggtagagatcaaaggaggcaatggctccaagccttgccatagggctgcctccaaggacacagaaggatgccagttgccacaggtccctgccctgtgtcacctgtctgcccttcattaaggtgagaaatctgcagatagcatcattaagatcagttttaaggggtatagggagggtgagggaagtggggggtgttaggtaagggttgggggtagaggttttgggatgtcttagttagaaaccagattaatagaagagtaggcctgatatattacatcatgagccatagtggtgggaaagaactttagcaatatagccctacctcctcattttagtgatgaggaatctgagaactggagaggttcagtgactttttgaaagtcatacaacacagctaaccattatgccaatcaccatgcttattttgggaaactctttatcttttttaaattccattttatgaaaaggcatcttcatggtccagggaatatgtatcttgtaaaatgtacctggttggagtagcttgtccagtcttgacaaactactgaatttctgtcttgcctctccttcagtgccttttaaaaggttttcccttttctgatctgcatttcaacatagagtcacataaatgtccccctgagaaaccaatcccacttctttctaggagattgggtatcttagataatcttttggggttcctctgtgagtataggaatggtatccttcctaattatcttccaaaggaattattttgtgtgtgtgcctgtgtgtgtgtagagacataaaggagggtgatgtgattttcagctagtcctttcacattttcaataatgaggtaatcatgttacatacacattagtcctcagttataaagtgaatctcagatagaaattaaaagtgcagttgtgttaagactctttcatactaccctttagtcataaggagaaaaaaacactcaaatagtagaagcagcaagtagcaaacttcaggagagctactttctatccaaataatttaaaaaacacttttcacctactcctttcatggttataacacattggcagactttttgctggctctgggagccatgattttaatcacattctgcaaggtgacaaatgtcatacattccacattgtgtggtagccatctctttagactcatgtgttttggggaaaggaagaagttcttggctgagtactattttgaactttccagaaccctctcacaccagagacagttcttctctgttcagtttccaatccccgataatttgctaaaataacattgtacatccaagagagggaagaagagtatgtcagtatattatgcagaagatagatacagccttttcagaagatctccactagtttttgttccaaaaattcaagtttatgggagaaatctcaattagccaccttttcacagttgtgtggatataacatttgggggatctttctggactcctacctatctgtgcattttaccggcacctcaggaaaggagggtgaccaggttgtcttagcttgtactgcttggtgatctctgaggaccttctaattcagttgtaccccagtgttccatgtatagaaaaacttcattagaacaaactttacttgatatgaaactcctattaacagtctttttttgaaataaaaagtagcttgagctttcttttaaaatcatgtatcttgattgttgatttaatgaaggatttccttttaatgctgcttttgagcttcaaggtaataggacagcaggaacctaaaatatctgccatcatctgccataggaaagatacccagagacccatcatgttctctttttgttgttacactgttgggtgggtataacaattggaaaatgaacaaactgattgattgtgcaaactactttttatgacaagcctaaaccctcataatgcggcagcttaaagtgtatacatatgcactaactttgatcaattatattctcatatctgttagctacacagtctcctattatctcaattgcttatgtgcatatggaatatgttacttaaaacgtgtgcattcttactgaaaatgttttcaaaggaaggtatcagctgtgggctaattgccaccaatttcagcctgccacgattcttggaaatatgtcttccaagtgccatccatcatcagtaggacaagtgtcgggagtttgtttatttttttccagtagcaacgatgggttacatggagccatgaaacctccttctggcctcccttgtgattaatggcatgtgtttgtaaaatggatagctggggttggcagatggctagagaagaatcgcctttggtttaaaatgtatgtggtcccctaatgattgtgaccccattctgtaatcaactgagctagttccaataaagttaagcaggtttaaatccactttgtgcctatcttttcactgacaataaagttagctattttaaaatgcagtaccgtgtggaaaatgctttggtgtttacccgacagaggctttatttgtgctgtatcagtgattactttcaattcagtatgcagtgaaattgcctttcaagggcagcgtgcagcagaatttgcatttgcttgaagtatggaatgtgattatagattataaagtattaagacaacaccacaggccgcatgctctaatcggtctctttatatactcaggcagcatatattaaaagctttgcatctttttatcttctggtttctagggataaaatgatggccacccaaagcagagaatttatcctttggttagcattttggaaggccccttgatattccttttgtacccttgttctgatgccaattcatcagtttt

SEQ ID NO: 107204 - DNA, 2462 bp, Homo sapiens
  Payload ID: 1043
  Gene Symbol: AMOT
  Gene Name: angiomotin
  ENST ID: ENST00000371958
  CDS Start-End: 155-1948
gtcactggccaccagtggagttaaggcccatccacctgttaccagtgctcccctctccccaccacaacccaatgacctctacaagaatcccacaagttccagtgaattctacaaggcccaagggccacttcctaaccagcatagcctgaagggcatggaacaccgaggccccccaccagaatatcccttcaagggcatgccaccccaatctgtagtgtgcaagccccaagagccagggcacttctatagtgagcatcgcctgaaccagccagggagaacagaggggcaactgatgaggtatcagcatccccctgagtatggagcagccaggccagcgcaggacatctcattgccattgtcagccaggaactcgcagcctcacagccctacttcttctctgacctctggggggtccttgcccttgctacaatctccaccatccactagattgtctcctgcccgacaccccttggtcccaaaccagggagaccattcagctcacctgcctaggccgcagcagcatttccttcctaatcaggctcaccagggggatcattaccgtctctcccaacctggcctgagtcagcagcagcagcaacagcagcagcagcaccatcatcaccatcaccaccaacaacagcagcagcagcagccacagcagcagccaggagaagcctattcagctatgcctcgggctcagccatcctctgcttcttatcagccagtgccagcagacccttttgccattgtttccagagcccagcagatggttgagatcctctcagacgagaaccggaacttgaggcaagagttggaaggatgctatgagaaggtggcaagactgcagaaggtggagacagaaatccagcgcgtctcggaggcatatgagaacctcgtgaagtcatcctccaaaagagaggccctagagaaagccatgagaaacaagctagagggcgagattcggaggatgcatgatttcaacagggatctgagagagcgtctagagactgccaacaagcagcttgcagagaaggaatatgaggggtcagaggacaccagaaaaaccatctcgcagctctttgcaaaaaataaagaaagccagcgtgagaaggagaagctggaagcggagctggccactgcccgttctaccaatgaggaccaaagacgacacatcgaaatccgagatcaggccctgagtaatgcccaggccaaggtggtaaagctggaagaagagctgaaaaagaagcaagtgtacgttgacaaggtggagaagatgcagcaggcccttgtacagctccaggcagcatgtgaaaaacgtgagcagctagagcaccgtctccggacacgactggagagggaactggaatccctgagaatccagcagcgtcagggcaactgtcagcccaccaacgtttcagaatacaatgctgctgcactgatggagctccttcgggagaaagaggagaggattctggctctggaagctgatatgacaaagtgggagcagaaatatttggaggagaatgtgatgagacattttgctctggatgctgctgcaactgtggctgctcagagggacacaacagtcatcagtcactctcctaacaccagctatgacacagctctagaagctcgcatccagaaagaggaggaagaaatcttgatggccaataagcgttgccttgacatggagggcaggattaagaccctccatgcccagattattgagaaggatgccatgatcaaagtactccagcagcgttcccggaaggagccgagcaagacagagcagctgtcgtgcatgcggccagcgaagtctctgatgtccatttccaatgctggatcaggcttgctctcccactcatccaccctgactggctcccccatcatggaagaaaagcgagacgacaagagctggaaggggagcctaggtaatgacagtaaataaggaagattatagtcacgtgttcaaagagagccctgagataagcacccatgcttaaggaaaagggatgatggtccaggttctagagaggaaggtgtaccagggttttggagtttttttttcctcctgagaccctagttccacattctggagctcctccacactttgaagtctcccggtgagaataccgattgaggccaaggcttagaggacaagaatcttgagtttcatttgggtgtcaaggaagataactctaatttcctctaaactattctcagatttggcctttgccatgtggcacctttatctttctccaaagcccatgtggcctttgtgtcgttccaaatgtcaaaattccggcatttctgtgttccttcctcctctataataggagaacccagagttttagttacactaaatcgtttgggtagcaggttttgttcccacagtgttgtgagatgagaacagaatgtactttttcattccgttcctgtccattccctcccctctaatcaaa

SEQ ID NO: 107205 - DNA, 7319 bp, Homo sapiens
  Payload ID: 1043
  Gene Symbol: AMOT
  Gene Name: angiomotin
  Uniprot ID: Q4VCS5
  ENST ID: ENST00000371959
  CDS Start-End: 1-3255
atgagaaattctgaagaacagccaagtggagggaccacggtattgcagcgtttgctacaagagcagcttcgctatggcaatcctagtgagaatcgcagcctgcttgccatacaccagcaagccacagggaatggccctcctttccccagtggcagtgggaacccgggccctcagagtgatgtgttgagtccccaagaccaccaccaacagcttgtggctcatgctgctcgacaagaaccccaggggcaggaaatccagtcagaaaacctcatcatggagaagcagctgtctcctcgaatgcaaaataatgaagaactcccgacctatgaagaagccaaggtccagtcccagtactttcggggccaacagcatgccagtgttggagctgccttctatgtcactggagtcaccaaccagaagatgaggactgagggacgcccatcagttcagcggctcaatcctggaaagatgcaccaagatgagggactcagagaccttaagcaagggcatgtccgttccttgagtgaacgactaatgcagatgtcactggccaccagtggagttaaggcccatccacctgttaccagtgctcccctctccccaccacaacccaatgacctctacaagaatcccacaagttccagtgaattctacaaggcccaagggccacttcctaaccagcatagcctgaagggcatggaacaccgaggccccccaccagaatatcccttcaagggcatgccaccccaatctgtagtgtgcaagccccaagagccagggcacttctatagtgagcatcgcctgaaccagccagggagaacagaggggcaactgatgaggtatcagcatccccctgagtatggagcagccaggccagcgcaggacatctcattgccattgtcagccaggaactcgcagcctcacagccctacttcttctctgacctctggggggtccttgcccttgctacaatctccaccatccactagattgtctcctgcccgacaccccttggtcccaaaccagggagaccattcagctcacctgcctaggccgcagcagcatttccttcctaatcaggctcaccagggggatcattaccgtctctcccaacctggcctgagtcagcagcagcagcaacagcagcagcagcaccatcatcaccatcaccaccaacaacagcagcagcagcagccacagcagcagccaggagaagcctattcagctatgcctcgggctcagccatcctctgcttcttatcagccagtgccagcagacccttttgccattgtttccagagcccagcagatggttgagatcctctcagacgagaaccggaacttgaggcaagagttggaaggatgctatgagaaggtggcaagactgcagaaggtggagacagaaatccagcgcgtctcggaggcatatgagaacctcgtgaagtcatcctccaaaagagaggccctagagaaagccatgagaaacaagctagagggcgagattcggaggatgcatgatttcaacagggatctgagagagcgtctagagactgccaacaagcagcttgcagagaaggaatatgaggggtcagaggacaccagaaaaaccatctcgcagctctttgcaaaaaataaagaaagccagcgtgagaaggagaagctggaagcggagctggccactgcccgttctaccaatgaggaccaaagacgacacatcgaaatccgagatcaggccctgagtaatgcccaggccaaggtggtaaagctggaagaagagctgaaaaagaagcaagtgtacgttgacaaggtggagaagatgcagcaggcccttgtacagctccaggcagcatgtgaaaaacgtgagcagctagagcaccgtctccggacacgactggagagggaactggaatccctgagaatccagcagcgtcagggcaactgtcagcccaccaacgtttcagaatacaatgctgctgcactgatggagctccttcgggagaaagaggagaggattctggctctggaagctgatatgacaaagtgggagcagaaatatttggaggagaatgtgatgagacattttgctctggatgctgctgcaactgtggctgctcagagggacacaacagtcatcagtcactctcctaacaccagctatgacacagctctagaagctcgcatccagaaagaggaggaagaaatcttgatggccaataagcgttgccttgacatggagggcaggattaagaccctccatgcccagattattgagaaggatgccatgatcaaagtactccagcagcgttcccggaaggagccgagcaagacagagcagctgtcgtgcatgcggccagcgaagtctctgatgtccatttccaatgctggatcaggcttgctctcccactcatccaccctgactggctcccccatcatggaagaaaagcgagacgacaagagctggaaggggagcctaggcattctcctgggtggagactaccgtgctgaatatgtcccttccacaccctcgcctgtgccaccctcgactcccctgctctcggctcactccaagacaggcagccgagactgcagtacccaaactgaacgtgggacggaatcgaacaaaactgcagctgttgctcccatctctgttcctgctccagttgctgctgccgccactgctgccgccatcactgccactgctgccaccatcaccaccaccatggtagctgctgctccagttgctgttgctgctgctgctgctccagctgctgctgctgccccgtctccagccactgccgctgctactgctgctgctgtttctccagctgctgctggtcagattccagctgctgcctctgttgcctcagctgctgccgttgctccttctgctgctgctgctgctgctgttcaggttgctccagctgctccggctccagttccagctccggctctggttccggttccagctccagcagcggctcaggcttctgctcctgctcagactcaggcaccaacttcagctccggctgtggctccaactccagctccaactccaactccagctgtggctcaggctgaggttcctgcaagtccagctaccggtcctggaccacatcgtttgtctataccaagtttgacctgcaatccagacaaaacagatgggcctgtgttccactccaatactctggaaagaaaaactcccattcagatcctgggacaagagcctgatgcagagatggtggaatatctcatctaaacggccaaatcaagagctgcagattatcagcaaaaatgcttttaatcattttcccccttttattggttcttgttttgagggtgaggacaagggttgtggggaggggatgttttttaacaggactttttattggaacaatgtactacttgagtaataccatgtgaacaccagtctattttggtatgcttagggagtacctctaaagacagattaatcagaatgtgctctaaagcttattgtttgaatttatacgaatactgggactgttaacaggtggctatacatcgacgttttcaatgtgcttaaatttgtttaaattttccatattctagatcattttttattgaagagcacagtatgtgtggaagacagtgtataacacgtagtttggaagtgggaagctagagagaattgagtgtgtgctgttttgtatagttactatcctgtgcagcagctggagaaagcactcacctcaggcttacaaaagggaatagtttcaggagctatgtaagctggaaaaaaggtagggagttttggggtgcagaagggtactggagctaattttttcttccagtttcccagctaccctgccccagggaattgtgtttgtcttcatttcagtggtgctttggaaatggattcttttggttccctcctggaggttcatacattcatatatatgctctggagtaatttatgcatttggataattaatatattgctttcagatgctgggagagtacattaactgagtgatgcgcaacttcctctctcttagggaattagaccatcagaggccttgatggagagttgcatggggtgctatatgcagacttccatggtttgtgtgtagccatgaacacagcttgcttgcatttagtaagaccaatcagcttagtgtttatttcttctacagcacagattcactggctgggtctccagtctcaaattgccaatcatttgcaaagtgaggaaggatctttgttgacaggttgaatgctttgaatttctggtgactactttgaaataacttgttttgtttgtcaaattctaagcatatgtcttaaaaggcatttttgactatcacctccaagggaatagcttgagaaacccaaagtactatgctgcagtcgggggagaggtggattgcagcagtatcctcaactacctcttctcactgtcagtgacaccatcttggaatacctttgggaagcagcaggaaatgtgcatgtgggtagagatcaaaggaggcaatggctccaagccttgccatagggctgcctccaaggacacagaaggatgccagttgccacaggtccctgccctgtgtcacctgtctgcccttcattaaggtgagaaatctgcagatagcatcattaagatcagttttaaggggtatagggagggtgagggaagtggggggtgttaggtaagggttgggggtagaggttttgggatgtcttagttagaaaccagattaatagaagagtaggcctgatatattacatcatgagccatagtggtgggaaagaactttagcaatatagccctacctcctcattttagtgatgaggaatctgagaactggagaggttcagtgactttttgaaagtcatacaacacagctaaccattatgccaatcaccatgcttattttgggaaactctttatcttttttaaattccattttatgaaaaggcatcttcatggtccagggaatatgtatcttgtaaaatgtacctggttggagtagcttgtccagtcttgacaaactactgaatttctgtcttgcctctccttcagtgccttttaaaaggttttcccttttctgatctgcatttcaacatagagtcacataaatgtccccctgagaaaccaatcccacttctttctaggagattgggtatcttagataatcttttggggttcctctgtgagtataggaatggtatccttcctaattatcttccaaaggaattattttgtgtgtgtgcctgtgtgtgtgtagagacataaaggagggtgatgtgattttcagctagtcctttcacattttcaataatgaggtaatcatgttacatacacattagtcctcagttataaagtgaatctcagatagaaattaaaagtgcagttgtgttaagactctttcatactaccctttagtcataaggagaaaaaaacactcaaatagtagaagcagcaagtagcaaacttcaggagagctactttctatccaaataatttaaaaaacacttttcacctactcctttcatggttataacacattggcagactttttgctggctctgggagccatgattttaatcacattctgcaaggtgacaaatgtcatacattccacattgtgtggtagccatctctttagactcatgtgttttggggaaaggaagaagttcttggctgagtactattttgaactttccagaaccctctcacaccagagacagttcttctctgttcagtttccaatccccgataatttgctaaaataacattgtacatccaagagagggaagaagagtatgtcagtatattatgcagaagatagatacagccttttcagaagatctccactagtttttgttccaaaaattcaagtttatgggagaaatctcaattagccaccttttcacagttgtgtggatataacatttgggggatctttctggactcctacctatctgtgcattttaccggcacctcaggaaaggagggtgaccaggttgtcttagcttgtactgcttggtgatctctgaggaccttctaattcagttgtaccccagtgttccatgtatagaaaaacttcattagaacaaactttacttgatatgaaactcctattaacagtctttttttgaaataaaaagtagcttgagctttcttttaaaatcatgtatcttgattgttgatttaatgaaggatttccttttaatgctgcttttgagcttcaaggtaataggacagcaggaacctaaaatatctgccatcatctgccataggaaagatacccagagacccatcatgttctctttttgttgttacactgttgggtgggtataacaattggaaaatgaacaaactgattgattgtgcaaactactttttatgacaagcctaaaccctcataatgcggcagcttaaagtgtatacatatgcactaactttgatcaattatattctcatatctgttagctacacagtctcctattatctcaattgcttatgtgcatatggaatatgttacttaaaacgtgtgcattcttactgaaaatgttttcaaaggaaggtatcagctgtgggctaattgccaccaatttcagcctgccacgattcttggaaatatgtcttccaagtgccatccatcatcagtaggacaagtgtcgggagtttgtttatttttttccagtagcaacgatgggttacatggagccatgaaacctccttctggcctcccttgtgattaatggcatgtgtttgtaaaatggatagctggggttggcagatggctagagaagaatcgcctttggtttaaaatgtatgtggtcccctaatgattgtgaccccattctgtaatcaactgagctagttccaataaagttaagcaggtttaaatccactttgtgcctatcttttcactgacaataaagttagctattttaaaatgcagtaccgtgtggaaaatgctttggtgtttacccgacagaggctttatttgtgctgtatcagtgattactttcaattcagtatgcagtgaaattgcctttcaagggcagcgtgcagcagaatttgcatttgcttgaagtatggaatgtgattatagattataaagtattaagacaacaccacaggccgcatgctctaatcggtctctttatatactcaggcagcatatattaaaagctttgcatctttttatcttctggtttctagggataaaatgatggccacccaaagcagagaatttatcctttggttagcattttggaaggccccttgatattccttttgtacccttgttctgatgccaattcatcagtttt

SEQ ID NO: 107206 - DNA, 2720 bp, Homo sapiens
  Payload ID: 1043
  Gene Symbol: AMOT
  Gene Name: angiomotin
  ENST ID: ENST00000371962
  CDS Start-End: 107-2665
tcccctctccccaccacaacccaatgacctctacaagaatcccacaagttccagtgaattctacaaggcccaagggccacttcctaaccagcatagcctgaagggcatggaacaccgaggccccccaccagaatatcccttcaagggcatgccaccccaatctgtagtgtgcaagccccaagagccagggcacttctatagtgagcatcgcctgaaccagccagggagaacagaggggcaactgatgaggtatcagcatccccctgagtatggagcagccaggccagcgcaggacatctcattgccattgtcagccaggaactcgcagcctcacagccctacttcttctctgacctctggggggtccttgcccttgctacaatctccaccatccactagattgtctcctgcccgacaccccttggtcccaaaccagggagaccattcagctcacctgcctaggccgcagcagcatttccttcctaatcaggctcaccagggggatcattaccgtctctcccaacctggcctgagtcagcagcagcagcaacagcagcagcagcaccatcatcaccatcaccaccaacaacagcagcagcagcagccacagcagcagccaggagaagcctattcagctatgcctcgggctcagccatcctctgcttcttatcagccagtgccagcagacccttttgccattgtttccagagcccagcagatggttgagatcctctcagacgagaaccggaacttgaggcaagagttggaaggatgctatgagaaggtggcaagactgcagaaggtggagacagaaatccagcgcgtctcggaggcatatgagaacctcgtgaagtcatcctccaaaagagaggccctagagaaagccatgagaaacaagctagagggcgagattcggaggatgcatgatttcaacagggatctgagagagcgtctagagactgccaacaagcagcttgcagagaaggaatatgaggggtcagaggacaccagaaaaaccatctcgcagctctttgcaaaaaataaagaaagccagcgtgagaaggagaagctggaagcggagctggccactgcccgttctaccaatgaggaccaaagacgacacatcgaaatccgagatcaggccctgagtaatgcccaggccaaggtggtaaagctggaagaagagctgaaaaagaagcaagtgtacgttgacaaggtggagaagatgcagcaggcccttgtacagctccaggcagcatgtgaaaaacgtgagcagctagagcaccgtctccggacacgactggagagggaactggaatccctgagaatccagcagcgtcagggcaactgtcagcccaccaacgtttcagaatacaatgctgctgcactgatggagctccttcgggagaaagaggagaggattctggctctggaagctgatatgacaaagtgggagcagaaatatttggaggagaatgtgatgagacattttgctctggatgctgctgcaactgtggctgctcagagggacacaacagtcatcagtcactctcctaacaccagctatgacacagctctagaagctcgcatccagaaagaggaggaagaaatcttgatggccaataagcgttgccttgacatggagggcaggattaagaccctccatgcccagattattgagaaggatgccatgatcaaagtactccagcagcgttcccggaaggagccgagcaagacagagcagctgtcgtgcatgcggccagcgaagtctctgatgtccatttccaatgctggatcaggcttgctctcccactcatccaccctgactggctcccccatcatggaagaaaagcgagacgacaagagctggaaggggagcctaggcattctcctgggtggagactaccgtgctgaatatgtcccttccacaccctcgcctgtgccaccctcgactcccctgctctcggctcactccaagacaggcagccgagactgcagtacccaaactgaacgtgggacggaatcgaacaaaactgcagctgttgctcccatctctgttcctgctccagttgctgctgccgccactgctgccgccatcactgccactgctgccaccatcaccaccaccatggtagctgctgctccagttgctgttgctgctgctgctgctccagctgctgctgctgccccgtctccagccactgccgctgctactgctgctgctgtttctccagctgctgctggtcagattccagctgctgcctctgttgcctcagctgctgccgttgctccttctgctgctgctgctgctgctgttcaggttgctccagctgctccggctccagttccagctccggctctggttccggttccagctccagcagcggctcaggcttctgctcctgctcagactcaggcaccaacttcagctccggctgtggctccaactccagctccaactccaactccagctgtggctcaggctgaggttcctgcaagtccagctaccggtcctggaccacatcgtttgtctataccaagtttgacctgcaatccagacaaaacagatgggcctgtgttccactccaatactctggaaagaaaaactcccattcagatcctgggacaagagcctgatgcagagatggtggaatatctcatctaaacggccaaatcaagagctgcagattatcagcaaaaatgcttttaatcattttccc

SEQ ID NO: 107207 - DNA, 3330 bp, Homo sapiens
  Payload ID: 1043
  Gene Symbol: AMOT
  Gene Name: angiomotin
  Uniprot ID: Q4VCS5
  ENST ID: ENST00000524145
  CDS Start-End: 76-3330
taagcaagaattccctatcctgatcaaggctttaagcctaaaagaaagcagaaataggcaccaccagcaatagagatgagaaattctgaagaacagccaagtggagggaccacggtattgcagcgtttgctacaagagcagcttcgctatggcaatcctagtgagaatcgcagcctgcttgccatacaccagcaagccacagggaatggccctcctttccccagtggcagtgggaacccgggccctcagagtgatgtgttgagtccccaagaccaccaccaacagcttgtggctcatgctgctcgacaagaaccccaggggcaggaaatccagtcagaaaacctcatcatggagaagcagctgtctcctcgaatgcaaaataatgaagaactcccgacctatgaagaagccaaggtccagtcccagtactttcggggccaacagcatgccagtgttggagctgccttctatgtcactggagtcaccaaccagaagatgaggactgagggacgcccatcagttcagcggctcaatcctggaaagatgcaccaagatgagggactcagagaccttaagcaagggcatgtccgttccttgagtgaacgactaatgcagatgtcactggccaccagtggagttaaggcccatccacctgttaccagtgctcccctctccccaccacaacccaatgacctctacaagaatcccacaagttccagtgaattctacaaggcccaagggccacttcctaaccagcatagcctgaagggcatggaacaccgaggccccccaccagaatatcccttcaagggcatgccaccccaatctgtagtgtgcaagccccaagagccagggcacttctatagtgagcatcgcctgaaccagccagggagaacagaggggcaactgatgaggtatcagcatccccctgagtatggagcagccaggccagcgcaggacatctcattgccattgtcagccaggaactcgcagcctcacagccctacttcttctctgacctctggggggtccttgcccttgctacaatctccaccatccactagattgtctcctgcccgacaccccttggtcccaaaccagggagaccattcagctcacctgcctaggccgcagcagcatttccttcctaatcaggctcaccagggggatcattaccgtctctcccaacctggcctgagtcagcagcagcagcaacagcagcagcagcaccatcatcaccatcaccaccaacaacagcagcagcagcagccacagcagcagccaggagaagcctattcagctatgcctcgggctcagccatcctctgcttcttatcagccagtgccagcagacccttttgccattgtttccagagcccagcagatggttgagatcctctcagacgagaaccggaacttgaggcaagagttggaaggatgctatgagaaggtggcaagactgcagaaggtggagacagaaatccagcgcgtctcggaggcatatgagaacctcgtgaagtcatcctccaaaagagaggccctagagaaagccatgagaaacaagctagagggcgagattcggaggatgcatgatttcaacagggatctgagagagcgtctagagactgccaacaagcagcttgcagagaaggaatatgaggggtcagaggacaccagaaaaaccatctcgcagctctttgcaaaaaataaagaaagccagcgtgagaaggagaagctggaagcggagctggccactgcccgttctaccaatgaggaccaaagacgacacatcgaaatccgagatcaggccctgagtaatgcccaggccaaggtggtaaagctggaagaagagctgaaaaagaagcaagtgtacgttgacaaggtggagaagatgcagcaggcccttgtacagctccaggcagcatgtgaaaaacgtgagcagctagagcaccgtctccggacacgactggagagggaactggaatccctgagaatccagcagcgtcagggcaactgtcagcccaccaacgtttcagaatacaatgctgctgcactgatggagctccttcgggagaaagaggagaggattctggctctggaagctgatatgacaaagtgggagcagaaatatttggaggagaatgtgatgagacattttgctctggatgctgctgcaactgtggctgctcagagggacacaacagtcatcagtcactctcctaacaccagctatgacacagctctagaagctcgcatccagaaagaggaggaagaaatcttgatggccaataagcgttgccttgacatggagggcaggattaagaccctccatgcccagattattgagaaggatgccatgatcaaagtactccagcagcgttcccggaaggagccgagcaagacagagcagctgtcgtgcatgcggccagcgaagtctctgatgtccatttccaatgctggatcaggcttgctctcccactcatccaccctgactggctcccccatcatggaagaaaagcgagacgacaagagctggaaggggagcctaggcattctcctgggtggagactaccgtgctgaatatgtcccttccacaccctcgcctgtgccaccctcgactcccctgctctcggctcactccaagacaggcagccgagactgcagtacccaaactgaacgtgggacggaatcgaacaaaactgcagctgttgctcccatctctgttcctgctccagttgctgctgccgccactgctgccgccatcactgccactgctgccaccatcaccaccaccatggtagctgctgctccagttgctgttgctgctgctgctgctccagctgctgctgctgccccgtctccagccactgccgctgctactgctgctgctgtttctccagctgctgctggtcagattccagctgctgcctctgttgcctcagctgctgccgttgctccttctgctgctgctgctgctgctgttcaggttgctccagctgctccggctccagttccagctccggctctggttccggttccagctccagcagcggctcaggcttctgctcctgctcagactcaggcaccaacttcagctccggctgtggctccaactccagctccaactccaactccagctgtggctcaggctgaggttcctgcaagtccagctaccggtcctggaccacatcgtttgtctataccaagtttgacctgcaatccagacaaaacagatgggcctgtgttccactccaatactctggaaagaaaaactcccattcagatcctgggacaagagcctgatgcagagatggtggaatatctcatctaa

SEQ ID NO: 107208 - DNA, 653 bp, Homo sapiens
  Payload ID: 1044
  Gene Symbol: AMOTL1
  Gene Name: angiomotin like 1
  ENST ID: ENST00000299004
  CDS Start-End: 218-653
agagttggctcagccaggcagcactcgttgctctttttaaactccacggcaccagggatgaagtcacctttcttcttttaaaacgaacacatttgctctgtgagtccctgtcacttctgttagaacttagtattttttccactgccggtcaccaggacttctcacaggagattgcttccatttgatctgaaagctatacatacaaggggctagaagcatggacctcagtgaaaaatggactttggaggaaggagcctggttatcccatgctggaattcatcattttgccagcaccagagcggacagtgagtttgtggaagcctcgcccgcatcctacagcccagacgagttagggtccccttctgcttgttatagccccagtagtcctgtccaggttctagaagactccacctacttttccccagactttcagctctattctgggaggcatgaaacatctgctttgacggtggaggcaaccagtagcatcagggaaaaagttgttgaagatcctctttgtaacttccactccccaaacttcctgaggatctcagaggtggaaatgagaggttccgaggatgcggcagctggaacagtattgcagcggctgatccaggaacaactgcggtatggcaccccaaccgagaacatga

SEQ ID NO: 107209 - DNA, 8844 bp, Homo sapiens
  Payload ID: 1044
  Gene Symbol: AMOTL1
  Gene Name: angiomotin like 1
  Uniprot ID: Q8IY63
  ENST ID: ENST00000317829
  CDS Start-End: 171-2891
cggacggcggcgggagcgcgcgagaagctctaggacccagcagcggttgtcgggtttggggctggaggtgaagccctgtgtgaatggggttgattgtccggcgccacttccccgcgctgcccggcagccgtcttccccagccgagggactgaactagccatgatcgcctcatgtggagggcaaagttgcgccggggaacttgtgagcctgcggtgaaagttgaagatcctctttgtaacttccactccccaaacttcctgaggatctcagaggtggaaatgagaggttccgaggatgcggcagctggaacagtattgcagcggctgatccaggaacaactgcggtatggcaccccaaccgagaacatgaacttgctggccattcagcaccaggccacagggagtgcaggaccagcccatcctacaaacaacttttcttccacggaaaacctcactcaagaagacccacaaatggtctaccagtcagcacgccaagaaccgcagggtcaagaacaccaggtggacaatacggtgatggagaaacaggtccggtccacgcagcctcagcagaacaacgaggaactgcccacttacgaggaggccaaagcacagtcgcagttcttcagggggcagcagcagcagcaacagcagcagggggcggtgggccatggttactacatggcagggggcaccagtcagaagtcccgaactgaggggaggcccactgtgaaccgtgccaacagtggacaggcgcataaggacgaggcgctgaaggaactgaagcagggccacgtccgctcgctcagcgagagaatcatgcagctgtccctggagaggaatggggccaagcaacaccttcccggctcggggaatggaaagggcttcaaagtaggaggggggccctcccctgcccagcctgcaggtaaagtgctggaccctcggggtcctccacctgagtaccccttcaagaccaagcaaatgatgtccccagtcagcaagacccaggagcacggacttttttatggtgaccagcaccccgggatgctccacgagatggtcaagccctaccctgctcctcagcctgtgagaacagatgtggccgtcctgcggtaccagccaccccctgagtatggggtaacgagccgcccatgccaacttccgttcccatcaaccatgcagcagcacagccccatgtcctcccagacctcttccgccagcgggccactgcactctgtctccctgccgcttccactcccgatggccctgggtgctccacagcccccgcctgccgcctcccccagccagcagcttggtccagatgcctttgcgattgtggagcgagcccagcaaatggtggagatattaacagaggagaaccgggtgcttcaccaggaacttcagggttactacgacaatgccgacaagctccacaagtttgaaaaagaacttcagagaatttcggaagcctatgaaagtctggtcaagtctaccaccaagcgagaatcgctggacaaggccatgagaaacaaattggaaggcgagattagaagacttcatgatttcaacagagacctccgagatcgactagagactgctaacaggcaactatccagcagggaatacgaagggcatgaagacaaagctgcagaggggcattatgcttcccagaacaaagaattcttgaaggaaaaggagaaattagaaatggagttagcagcagtgcggactgcaagtgaggaccatcggagacacatcgagatcctggaccaggctttgagcaacgcccaggccagggtcatcaagctggaagaggagttacgagagaagcaagcatatgttgagaaagttgagaagctgcagcaggccctgacccagctgcagtctgcatgtgagaagcgagaacagatggagcggagactgcggacttggctggagagagagctggatgcactgagaacccagcagaaacatggaaatggccagccagccaacatgccggaatacaatgccccagccctcctggaacttgtgcgggagaaggaggagcggatcctggccctggaggccgacatgacaaagtgggagcagaagtacctggaggagagcaccatccgacactttgccatgaatgccgcagccactgcagcagctgagagggacaccacgatcatcaaccactcacggaatggcagctacggagagagctcgctggaggcccacatctggcaagaggaggaggaggtggtgcaggccaacagaaggtgtcaggacatggaatacactattaaaaatctccatgccaaaatcatagagaaagatgctatgattaaggtcctgcagcagcgatctcgtaaagatgccgggaagacagactcctccagcctacgtcctgcccgctccgttccatccatagcagcagctactgggacacactctcgccagacctctcttaccagcagccagctggctgaggaaaagaaggaagagaagacctggaaggggagcataggattgctgctggggaaggagcaccatgagcatgcctctgccccactgctgccacccccacccacctcagcactgtcctccatagcctccactacggcagccagcagtgcccacgccaagacaggcagcaaggacagcagcacacagactgacaagagtgccgagctcttctggcccagcatggcctcccttcccagccgcggccggctgagcacgacccctgctcacagccccgtcctgaaacacccagcggccaaagggaccgcagagaaactggagaactctcctggccatgggaagtcgcctgaccacagaggccgggtcagcagcttgctgcacaagcccgagttccctgatggagagatgatggaagtcctcatctaactgccatccctgtggaatttcagtacagaacactgacaaacaaggaaagcggcagagaaagaagaaagacctagaaggttgtagatgggaaatcaggaatgatttgaactgataaagatttcagactcataagaacacattttataaatgttaaacacaaaaactacatgactgaagatagaagagaatgcgatggattttattacacatggtggaagagagaagaggcgtgtaggtttgcaaacaaagttaagaaataggaaactgaatttttcattgtacagaaaatgtatctcttggggagggcctgtgtacccccattctctgattataaacagataaacccaaatgtggatcatccttggaatacccccattctccttgcctcttagcatgtttgatttaagaaaagcctccaggaaatcttgagagcctgtcttggcataatgcagtgtcacctgtgccaaccatggggtgtcccgtgagtgtgagtgtggcagtgagaagaagcatcgagggcgaggggaatatgaaagttggtcttcacctaattacctgtttggtttggattttcaagagatgattgggcttcttagcttttctgaattctgcagtattttctaaacaggatagattatgatctcggtccccatccatcctaacttctgagttcatctctgtctctgctttacagtctttaattttttgttgttccttcatttttttctttttaataagacatagcagaattccttaggtatgggatttatgagaccagtacctgaactgtcatcattcctactgtgtttgatagtgaccagtaggacaaagccacgtgccgacttcctggctgcttcacctttgcatagctgggttgcagctgcgaacctcattctgactgtgaactaagcaagctttgaggaggcaggagattccgtgggtccctgtgacatattgcattaagatcgtggcacttgcttttttgtctttcacatcggctgtcttgcaaggagcttgacatttccaaattccattgctctgtttggggaagacttaggacagcactccaggaaacagatgacaatttacagacagttgtctcagtggtttccagaatctcaccagcctcccgtatagcttcttgtattgaggctcatgagcgtattcacactctttcctcccccgcgcacgcctctgcttgctctcgatcagcatccagacctccgtggcaccaggttgcctctgttgtgaacttcttttgtaacctaccaggccagttgtatatacagtgttgtcaggtttttccgggtttcagttttgaggcagtttattcaaagtgagacagaagtgccacggaaaagaggcaggagtgtgttaggtggtgggtccattagacctctgctgtgacattgcatattcagctctgcagacactggcttcctttacaaatctaagagatgctggattagaaaagaggagaagctcatcgggccatcagagagatgctcctacagggtcctgatgtttttgtacctccaggtcagctggatcgctgttttcccagttccctttgctcatgcttacttagaggaagaaagaaaggggggtacctcttccaagtaccttctaaatgaaacactcaagagagtgctactcaggaaactttgcttggatcctaaaatggactggtcttgggtgtgtaaccccggtgaagttatagcctccccaaattgaggtgacagaaggaagacaagaggtgtaagctggagagggaagggaagaaatcagtggctttggccagcctctgtgccacccagtacgacagaggagtgggaactggccctctggggctctgcttggccataggcactgcacattgtgccacctgctcatcacctcctctagtctcacactgagcatcggagtacctgttgtgcagacaggaaaactgaggagctctgagaggctgagcatggagctcaccccatgccatagggtgtgggaagagggcacaggaggcctcatccatgggggaaagggttgaggatggacatgggtggggagagggcatagacatcccttcctaatctctgttcccaccacatttcataggagatgagttaggagatgacagctaactctcttaaggacattttgaccccagtttatgttggggatggaccagaaaggaaaatgtctagagataggaaggtaaatcaactctgccagcccctaccatcaggtctgggccaccccaaacttgggctgcctcccttagacataggttagagtgagagacccagctgtttctcccgaagcctcgtcttcatgccccagacacctgattgccccaatcaggtgtcagacttgcttgctcttcgaggtccccctgagctgccaagtgttttcattgtaaacagacacatcgccatgtttcagggcttcaacggcattgtattttggactttgaccgtattttttttctcttaacctactgagactcttccttaagaacaggatctatagctttaaaatgtcttcttctatgggaaatttcctgccaagccagggcactaaattctttcatcattagagctttcctgaagtccggccatatactgagtacctgctctgagttctgggcagcttacaatatcttaaacagattttcagaaaaataatgcaactatattttctagtgtcaactgtatgcaaacagtgtggtaaataccttttaattagtcctccacccacctggagtacagggggtgcgtttattattctgatttcactgatgaggaaatgggctcagaaaggttaagtcccttcctgaaatctcacagccaggagaagctaggatgatttaaaacaaagtttggagaggcactgggcatagaccctggctgtacagcctctaacatgcggcactgcatcttggcagtctctatgcctgtctgtgatgtgtgtgtgcacgtgtaactacacacacacacacacacacacacacacacacacacagctatcacacatctcagagcctaagaaataggactaagcccagaactcctagaatcacctataaatgctaggcatagatggaaattattgtgttccaccagaagcacagctccaaactatacctaaaaaatatttctgcacttcccagagacctggacttcaaactttcccagtggagcctgattatagaacttgagggtcctatctcaggatgaaggggagaggccctggcttcacgggaaggtattccagcattgttctgcttcacccttgactgcgttgtctggcagtttctgtgtgctgccaggatattatatggaactggagaagttggagtcaggtctctgaagctagagtttcactaattagatgcctctgtacatgagaactattactgtctgcaggtccatatagctaagctgccaggaaaaacacattatcttccaaaactttcagagcatgtgcagaaccctttcttagcgttttcttctcagcattttctctgcctcccagaggctggcagccagtgacactgcagagttcagcatgttctaaccatgcacgcagggcaggggctgccttggccctcctcaggctttcgttgggagagcaggcagtggtggagcccttctgggtgcagtcctctggggttgctctttggaactcatgtatgagtttgactccacaaggcttggcatggataccaaaacagttgcaacaaattagttctgaacctggaacagagaattcagtgcttctgttactcaggaaggaggtgttcagaatgccccgtgcagagcagccagtcattactcttgtttgttctcacctgggtgcgcaccctcatgatgcagtggctgtagcaccttcatgccaggtgctgagagaatgggaaattcttcctccccattgacctgagtcccagagacttagggacacagacttcaggtgaggctgcggacctcagaagcagtggataatagattggggcattaaaagcttttgaggcagggggctcatgttttgactgcagggagttatgctgagcaaagagatgtgtttttcaaaaccagggttcaaaaccagtgtccacgctggagtaagtggagcatgcttctctgtgttctctgaatgatcttgcactcctcttaagcaaaggagtaccatgaccatagtcagtgggatcccacaaatgttcttaaatgggtaaggctttaagtagccagagagtatccagcctaccattggcttctccacatcctaaaacctgagacagccttggtatatgctttataaatgtttcttttcttgttgtttaagtaattaaagtgtttaaaatgtcttcattagatgtgacgattgtttaatgagtttgcctctgacgtgtggctccatgggagataggcaaagtaattaagaagttaccagaaattggtcggctggggaaatgcaaaagttagcatttcagtagtgaatttctcctggaacaaatgagcaatttttcctctttctcttaagtagtatacccttttctcacttagtaatttaatggtatataaagacatgtgtataagtgagtgcatacatatgaggtatgactatagggttgtttgtgggaatttcttttcctaacatacagaagatcaaagtgttcatctcaccccgccctccttaaaaggtgtcttttgggagactatgtgctcattgactatagtgctgccaagtaaaaatatcttgggaactcttctactagaatggccttcagggcttggcatgttcctttggtttacccttagagatgagaaatcctcctcctttgaggatggatttaagttctggaaataatctcaagtgcttgatagcacagttggatgaaaaaagatggcaattaaggtaagttacaccatttttgtttctaaaaaaatccctaagaaatttcttggaatgagtctttggcctcagagcctctcaaagtgtccacttcaaggggggatcatcctcattagcacacagatttttaaaaatcaattctcttgccatgcctcctatgtgttcacatctctgcatacactacagatataagtgcataatcattcatataaacatctggtaggtattctgtaaaactgtgtttactttagtgcatgttattgtcatgttatgatgtgactggggtgtttctttgtcatgaaactttgcttcttcacagaattagaatactgctctctctatattgaactacatatacagcgttttcttgtatcagcccccaaagtctggatgcccggtgttgtgtttacatgtgattgtgcctaggagtctgttcacatagagacacctgtaagtatttattacaaaacggaatgtaagcaaatatatccacattggttttatttgaatcaaggtgtttttttgttttttgttttttttccttttgaggaggaacagggagcctcctcctccatgagcacttacagaattgtgtaaaattctgtgaaacagtggtaagcatgggcacccgatttcagctgtcctgctgccgctgccctccaacctgctctgtgtgtgtgtgtcgctgtgcttggtggcagtgtgccgtgctcgtgccggctcttcccagcagactggtatctggctgtaacgtttgacgtcttcatattgccagtctgtattgaggggtgatgtacatggccatacagccaaatgggtctgtgtaccagtgtggggattccaagaacactgcctgtcccccacagcaaatattgatgctgttggtcagccaaagattttcctctcctttgctgcttaaacttgtgccttaatattgtacataataaatggataaaatggcaaaatgactcttttctctcgcttgctcctttcttccttaaagaacttataaactgatgctcaataaatgtttcatttcattgta

SEQ ID NO: 107210 - DNA, 8970 bp, Homo sapiens
  Payload ID: 1044
  Gene Symbol: AMOTL1
  Gene Name: angiomotin like 1
  Uniprot ID: Q8IY63
  ENST ID: ENST00000433060
  CDS Start-End: 142-3012
ctaggacccagcagcggttgtcgggtttggggctggaggtgaagccctgtgtgaatggggttgattgtccggcgccacttccccgcgctgcccggcagccgtcttccccagccgagggactgaactagccatgatcgcctcatgtggagggcaaagttgcgccggggaacttgtgagcctgcggtgaaagggtccccttctgcttgttatagccccagtagtcctgtccaggttctagaagactccacctacttttccccagactttcagctctattctgggaggcatgaaacatctgctttgacggtggaggcaaccagtagcatcagggaaaaagttgttgaagatcctctttgtaacttccactccccaaacttcctgaggatctcagaggtggaaatgagaggttccgaggatgcggcagctggaacagtattgcagcggctgatccaggaacaactgcggtatggcaccccaaccgagaacatgaacttgctggccattcagcaccaggccacagggagtgcaggaccagcccatcctacaaacaacttttcttccacggaaaacctcactcaagaagacccacaaatggtctaccagtcagcacgccaagaaccgcagggtcaagaacaccaggtggacaatacggtgatggagaaacaggtccggtccacgcagcctcagcagaacaacgaggaactgcccacttacgaggaggccaaagcacagtcgcagttcttcagggggcagcagcagcagcaacagcagcagggggcggtgggccatggttactacatggcagggggcaccagtcagaagtcccgaactgaggggaggcccactgtgaaccgtgccaacagtggacaggcgcataaggacgaggcgctgaaggaactgaagcagggccacgtccgctcgctcagcgagagaatcatgcagctgtccctggagaggaatggggccaagcaacaccttcccggctcggggaatggaaagggcttcaaagtaggaggggggccctcccctgcccagcctgcaggtaaagtgctggaccctcggggtcctccacctgagtaccccttcaagaccaagcaaatgatgtccccagtcagcaagacccaggagcacggacttttttatggtgaccagcaccccgggatgctccacgagatggtcaagccctaccctgctcctcagcctgtgagaacagatgtggccgtcctgcggtaccagccaccccctgagtatggggtaacgagccgcccatgccaacttccgttcccatcaaccatgcagcagcacagccccatgtcctcccagacctcttccgccagcgggccactgcactctgtctccctgccgcttccactcccgatggccctgggtgctccacagcccccgcctgccgcctcccccagccagcagcttggtccagatgcctttgcgattgtggagcgagcccagcaaatggtggagatattaacagaggagaaccgggtgcttcaccaggaacttcagggttactacgacaatgccgacaagctccacaagtttgaaaaagaacttcagagaatttcggaagcctatgaaagtctggtcaagtctaccaccaagcgagaatcgctggacaaggccatgagaaacaaattggaaggcgagattagaagacttcatgatttcaacagagacctccgagatcgactagagactgctaacaggcaactatccagcagggaatacgaagggcatgaagacaaagctgcagaggggcattatgcttcccagaacaaagaattcttgaaggaaaaggagaaattagaaatggagttagcagcagtgcggactgcaagtgaggaccatcggagacacatcgagatcctggaccaggctttgagcaacgcccaggccagggtcatcaagctggaagaggagttacgagagaagcaagcatatgttgagaaagttgagaagctgcagcaggccctgacccagctgcagtctgcatgtgagaagcgagaacagatggagcggagactgcggacttggctggagagagagctggatgcactgagaacccagcagaaacatggaaatggccagccagccaacatgccggaatacaatgccccagccctcctggaacttgtgcgggagaaggaggagcggatcctggccctggaggccgacatgacaaagtgggagcagaagtacctggaggagagcaccatccgacactttgccatgaatgccgcagccactgcagcagctgagagggacaccacgatcatcaaccactcacggaatggcagctacggagagagctcgctggaggcccacatctggcaagaggaggaggaggtggtgcaggccaacagaaggtgtcaggacatggaatacactattaaaaatctccatgccaaaatcatagagaaagatgctatgattaaggtcctgcagcagcgatctcgtaaagatgccgggaagacagactcctccagcctacgtcctgcccgctccgttccatccatagcagcagctactgggacacactctcgccagacctctcttaccagcagccagctggctgaggaaaagaaggaagagaagacctggaaggggagcataggattgctgctggggaaggagcaccatgagcatgcctctgccccactgctgccacccccacccacctcagcactgtcctccatagcctccactacggcagccagcagtgcccacgccaagacaggcagcaaggacagcagcacacagactgacaagagtgccgagctcttctggcccagcatggcctcccttcccagccgcggccggctgagcacgacccctgctcacagccccgtcctgaaacacccagcggccaaagggaccgcagagaaactggagaactctcctggccatgggaagtcgcctgaccacagaggccgggtcagcagcttgctgcacaagcccgagttccctgatggagagatgatggaagtcctcatctaactgccatccctgtggaatttcagtacagaacactgacaaacaaggaaagcggcagagaaagaagaaagacctagaaggttgtagatgggaaatcaggaatgatttgaactgataaagatttcagactcataagaacacattttataaatgttaaacacaaaaactacatgactgaagatagaagagaatgcgatggattttattacacatggtggaagagagaagaggcgtgtaggtttgcaaacaaagttaagaaataggaaactgaatttttcattgtacagaaaatgtatctcttggggagggcctgtgtacccccattctctgattataaacagataaacccaaatgtggatcatccttggaatacccccattctccttgcctcttagcatgtttgatttaagaaaagcctccaggaaatcttgagagcctgtcttggcataatgcagtgtcacctgtgccaaccatggggtgtcccgtgagtgtgagtgtggcagtgagaagaagcatcgagggcgaggggaatatgaaagttggtcttcacctaattacctgtttggtttggattttcaagagatgattgggcttcttagcttttctgaattctgcagtattttctaaacaggatagattatgatctcggtccccatccatcctaacttctgagttcatctctgtctctgctttacagtctttaattttttgttgttccttcatttttttctttttaataagacatagcagaattccttaggtatgggatttatgagaccagtacctgaactgtcatcattcctactgtgtttgatagtgaccagtaggacaaagccacgtgccgacttcctggctgcttcacctttgcatagctgggttgcagctgcgaacctcattctgactgtgaactaagcaagctttgaggaggcaggagattccgtgggtccctgtgacatattgcattaagatcgtggcacttgcttttttgtctttcacatcggctgtcttgcaaggagcttgacatttccaaattccattgctctgtttggggaagacttaggacagcactccaggaaacagatgacaatttacagacagttgtctcagtggtttccagaatctcaccagcctcccgtatagcttcttgtattgaggctcatgagcgtattcacactctttcctcccccgcgcacgcctctgcttgctctcgatcagcatccagacctccgtggcaccaggttgcctctgttgtgaacttcttttgtaacctaccaggccagttgtatatacagtgttgtcaggtttttccgggtttcagttttgaggcagtttattcaaagtgagacagaagtgccacggaaaagaggcaggagtgtgttaggtggtgggtccattagacctctgctgtgacattgcatattcagctctgcagacactggcttcctttacaaatctaagagatgctggattagaaaagaggagaagctcatcgggccatcagagagatgctcctacagggtcctgatgtttttgtacctccaggtcagctggatcgctgttttcccagttccctttgctcatgcttacttagaggaagaaagaaaggggggtacctcttccaagtaccttctaaatgaaacactcaagagagtgctactcaggaaactttgcttggatcctaaaatggactggtcttgggtgtgtaaccccggtgaagttatagcctccccaaattgaggtgacagaaggaagacaagaggtgtaagctggagagggaagggaagaaatcagtggctttggccagcctctgtgccacccagtacgacagaggagtgggaactggccctctggggctctgcttggccataggcactgcacattgtgccacctgctcatcacctcctctagtctcacactgagcatcggagtacctgttgtgcagacaggaaaactgaggagctctgagaggctgagcatggagctcaccccatgccatagggtgtgggaagagggcacaggaggcctcatccatgggggaaagggttgaggatggacatgggtggggagagggcatagacatcccttcctaatctctgttcccaccacatttcataggagatgagttaggagatgacagctaactctcttaaggacattttgaccccagtttatgttggggatggaccagaaaggaaaatgtctagagataggaaggtaaatcaactctgccagcccctaccatcaggtctgggccaccccaaacttgggctgcctcccttagacataggttagagtgagagacccagctgtttctcccgaagcctcgtcttcatgccccagacacctgattgccccaatcaggtgtcagacttgcttgctcttcgaggtccccctgagctgccaagtgttttcattgtaaacagacacatcgccatgtttcagggcttcaacggcattgtattttggactttgaccgtattttttttctcttaacctactgagactcttccttaagaacaggatctatagctttaaaatgtcttcttctatgggaaatttcctgccaagccagggcactaaattctttcatcattagagctttcctgaagtccggccatatactgagtacctgctctgagttctgggcagcttacaatatcttaaacagattttcagaaaaataatgcaactatattttctagtgtcaactgtatgcaaacagtgtggtaaataccttttaattagtcctccacccacctggagtacagggggtgcgtttattattctgatttcactgatgaggaaatgggctcagaaaggttaagtcccttcctgaaatctcacagccaggagaagctaggatgatttaaaacaaagtttggagaggcactgggcatagaccctggctgtacagcctctaacatgcggcactgcatcttggcagtctctatgcctgtctgtgatgtgtgtgtgcacgtgtaactacacacacacacacacacacacacacacacacacacagctatcacacatctcagagcctaagaaataggactaagcccagaactcctagaatcacctataaatgctaggcatagatggaaattattgtgttccaccagaagcacagctccaaactatacctaaaaaatatttctgcacttcccagagacctggacttcaaactttcccagtggagcctgattatagaacttgagggtcctatctcaggatgaaggggagaggccctggcttcacgggaaggtattccagcattgttctgcttcacccttgactgcgttgtctggcagtttctgtgtgctgccaggatattatatggaactggagaagttggagtcaggtctctgaagctagagtttcactaattagatgcctctgtacatgagaactattactgtctgcaggtccatatagctaagctgccaggaaaaacacattatcttccaaaactttcagagcatgtgcagaaccctttcttagcgttttcttctcagcattttctctgcctcccagaggctggcagccagtgacactgcagagttcagcatgttctaaccatgcacgcagggcaggggctgccttggccctcctcaggctttcgttgggagagcaggcagtggtggagcccttctgggtgcagtcctctggggttgctctttggaactcatgtatgagtttgactccacaaggcttggcatggataccaaaacagttgcaacaaattagttctgaacctggaacagagaattcagtgcttctgttactcaggaaggaggtgttcagaatgccccgtgcagagcagccagtcattactcttgtttgttctcacctgggtgcgcaccctcatgatgcagtggctgtagcaccttcatgccaggtgctgagagaatgggaaattcttcctccccattgacctgagtcccagagacttagggacacagacttcaggtgaggctgcggacctcagaagcagtggataatagattggggcattaaaagcttttgaggcagggggctcatgttttgactgcagggagttatgctgagcaaagagatgtgtttttcaaaaccagggttcaaaaccagtgtccacgctggagtaagtggagcatgcttctctgtgttctctgaatgatcttgcactcctcttaagcaaaggagtaccatgaccatagtcagtgggatcccacaaatgttcttaaatgggtaaggctttaagtagccagagagtatccagcctaccattggcttctccacatcctaaaacctgagacagccttggtatatgctttataaatgtttcttttcttgttgtttaagtaattaaagtgtttaaaatgtcttcattagatgtgacgattgtttaatgagtttgcctctgacgtgtggctccatgggagataggcaaagtaattaagaagttaccagaaattggtcggctggggaaatgcaaaagttagcatttcagtagtgaatttctcctggaacaaatgagcaatttttcctctttctcttaagtagtatacccttttctcacttagtaatttaatggtatataaagacatgtgtataagtgagtgcatacatatgaggtatgactatagggttgtttgtgggaatttcttttcctaacatacagaagatcaaagtgttcatctcaccccgccctccttaaaaggtgtcttttgggagactatgtgctcattgactatagtgctgccaagtaaaaatatcttgggaactcttctactagaatggccttcagggcttggcatgttcctttggtttacccttagagatgagaaatcctcctcctttgaggatggatttaagttctggaaataatctcaagtgcttgatagcacagttggatgaaaaaagatggcaattaaggtaagttacaccatttttgtttctaaaaaaatccctaagaaatttcttggaatgagtctttggcctcagagcctctcaaagtgtccacttcaaggggggatcatcctcattagcacacagatttttaaaaatcaattctcttgccatgcctcctatgtgttcacatctctgcatacactacagatataagtgcataatcattcatataaacatctggtaggtattctgtaaaactgtgtttactttagtgcatgttattgtcatgttatgatgtgactggggtgtttctttgtcatgaaactttgcttcttcacagaattagaatactgctctctctatattgaactacatatacagcgttttcttgtatcagcccccaaagtctggatgcccggtgttgtgtttacatgtgattgtgcctaggagtctgttcacatagagacacctgtaagtatttattacaaaacggaatgtaagcaaatatatccacattggttttatttgaatcaaggtgtttttttgttttttgttttttttccttttgaggaggaacagggagcctcctcctccatgagcacttacagaattgtgtaaaattctgtgaaacagtggtaagcatgggcacccgatttcagctgtcctgctgccgctgccctccaacctgctctgtgtgtgtgtgtcgctgtgcttggtggcagtgtgccgtgctcgtgccggctcttcccagcagactggtatctggctgtaacgtttgacgtcttcatattgccagtctgtattgaggggtgatgtacatggccatacagccaaatgggtctgtgtaccagtgtggggattccaagaacactgcctgtcccccacagcaaatattgatgctgttggtcagccaaagattttcctctcctttgctgcttaaacttgtgccttaatattgtacataataaatggataaaatggcaaaatgactcttttctctcgcttgctcctttcttccttaaagaacttataaactgatgctcaataaatgtttcatttcattgtacccca

SEQ ID NO: 107211 - DNA, 4488 bp, Homo sapiens
  Payload ID: 1045
  Gene Symbol: AMOTL2
  Gene Name: angiomotin like 2
  Uniprot ID: Q9Y2J4
  ENST ID: ENST00000249883
  CDS Start-End: 315-2657
cggagggcggaggagggcggtgcgctgagaggttatttgtggttcgctttgatcccgagggggaacctgaaactctcacattcctggcatagcagccgcctccggcgcgggccgaccctggggctgcgcgctggggcgcgaacagccagagcgtcggcgccacggccgagaacacatcttcgccgccgagctgagctgggccgagccggaggttgtggtgtctgactgcgctgggcaccctcgggccgcagcggtgctctggggccaggtgccaccggccattgtccaggcagctgtgtgcaagccaaagaagcatgaggacactggaagactcctcggggacagtcctgcaccgcctcatccaggagcagctgcgctacggcaacctgactgagacgcgcacgctgctagccatccagcagcaggccctgaggggtggggctggaactgggggtacagggagcccccaggcctccctggagatcctggccccagaggacagtcaggtgctgcagcaggccaccaggcaggagccccagggccaggagcaccagggcggtgagaaccacctggcagagaacaccctctaccggctatgcccacagcccagcaagggagaggagctgcccacctatgaggaggccaaagcccactcgcagtactatgcggcccagcaggcagggacccggccacatgcgggggaccgagatccccgtggggccccgggaggcagtcggaggcaggacgaggccctgcgggagctgaggcatgggcacgtgcgctcgttgagtgaacggctccttcagttgtccctggagaggaacggcgcccgggcccccagccacatgagctcctcccacagcttcccacagctggcccgcaaccagcagggccccccactgaggggcccccctgctgagggcccagagtcccgaggacccccacctcagtaccctcatgttgtactagctcatgagaccaccactgctgtcactgacccacggtaccgtgcccgcggcagcccgcacttccagcatgctgaagtcaggatcctgcaggcccaggtgcctcctgtgttcctccaacagcagcagcagtaccagtacctgcagcaatctcaggagcacccccctcccccacatccagctgctctcggccatggccccctgagctccctcagtccacctgctgtggaggggccagtgagtgcccaggcctcctcagccacctcgggcagtgcccacctggcccagatggaggccgtgctgagggagaatgccaggctgcagagagacaatgagcggctgcagagggagctggagagctctgcggagaaggctggccgcattgagaagctggaaagcgaaatccagcggctctctgaggcccatgagagcctgaccagagcctcctccaagcgtgaggccctggagaagaccatgcggaacaagatggacagtgaaatgaggaggctgcaagacttcaaccgggatcttagagagagattggaatctgcaaatcgccgcctggcaagcaagacacaggaggcccaggccggcagtcaggacatggtggccaagctgcttgctcagagctacgaacagcagcaggagcaagagaagctggagcgagagatggcactgctgcgcggcgccatcgaggaccagcggcggcgtgccgagctgctggagcaggctctgggcaatgcgcagggccgggcagctcgagccgaagaggagctgcgcaagaagcaggcctatgtggagaaagtggagcggctgcagcaggcgctcgggcagctgcaggcagcctgtgagaagcgggagcagctggagctgcgtctgcggactcgcctggagcaggaactcaaggccctgcgtgcacagcagagacaggcaggtgccccaggtggtagcagtggcagtggtgggtctccagagctcagcgccctgcgactgtcagaacaactgcgagagaaggaggagcagatcctggcgctggaggccgacatgaccaagtgggagcagaagtatttggaggaacgtgccatgaggcagtttgccatggatgcggctgccacggctgctgctcagcgtgacaccactctcatccgacattccccccagccctcacccagcagcagcttcaatgagggtctgctcactggtggccacaggcatcaggagatggaaagcaggttaaaggtgctccatgcccagatcctggagaaggatgcagtgatcaaggtccttcagcagcgctccaggagagaccctggcaaggccatccagggctccctgcggcctgccaagtcggtgccatctgttttcgcggctgcggcagcaggaacccagggctggcaagggctctcttctagtgagcgacaaacagcagacgcccctgctcggctgactacagcagacagagcacccacagaggagccagtggtcacagctccccctgctgcccatgccaaacacgggagcagagatgggagcacccagactgagggccccccagacagcacctccacctgcctgccaccggagcctgacagccttctggggtgcagcagtagccagagagcagcctctctggactctgtagctacatccagagtccaggacttgtcagacatggtggagatactgatctgaaggaggtggtgcttcaggactctgagccattctctcccctcctctgccctgtgccactctcagccatttcagcagccccgtcaaccgctgctccgtccctttccccagccagacactcattcccattgaccatctggtcccaggagctcaggaggaggaccccaggggagaggagagctgtgagagcaccggcacccccagaagactctgcttcttagcccacattcctccgggccttatggagaatgaggattcagccttgacttcttgcccaaggcctgctactggggtagcaactgacagctcagaaaggagctgagctccctctgccctgccagttgtcagtcaggcagggagggagtggctgtgttggtttggggaactaatttccacggacggctgcccgtggacaccaggtggactggttcactaatcaagtcagccatattgttctctggctaagtttggttccagccaacgtcatctgctcttcagttcctcactgccttcttgggatactaagacttgaattttttggggactattaagggtgttagtcttggagaagacacagcctcaccttctcacttgctgtgggtgaggggccatttaagtggactgggagacagtgcgcagtttgtatataattccctttcttgtggaacagaagactgaggcctgcaggttccgatgtgtctccatgggctgtgctcccctcttcctactgtcagtttctgaaacttctgactggcctcccagttatgcctcctcctcaagttcctggcccgtggatgttaaagctgctcgattcccaggatctcggctgccttttcctctatcttgagccctataaatgcccacgggacccccaccaccagcctcttgaagtggctccacagctcctgtccctggaacatcctgtcagtttggtcataaaccctgagccagatgaaatgagccaccgtgaacagacatctgccatgcccccaggtgggcttcggtggccctacccggtaccagttctttctgagaaactggagatgtcttgttagcataagtgtcttcattcccacctggagggtttgggagaggagcaaagcagttgaaaactagttaatgagctacaagagtcaaatagtcctctgaatggagcccccatcacaaaacagtgcccaggaggctggctcctcaagctacccatgcccagcgccctaaagcagcaccagatgctttggaattggggtgaaacacccacatggcagcctgctagcagcagtgactttgacttctggtcttaaagagtccctcacttcagccccaggagctattggtgggttttagcagttttgtctttaccgtttttagttctccttgattctttgttttcttcctttatcgtttttaggtttggtatgtgttgttttatttccatggttcctcaagtttcctttttaaacatttgcatttgctggacaattgcaattttttttaaaaaattcccctacccctgtttaaagctgaaaaatacatttggttcatgtgcattgtttacaaagcaaaaagaaaaaagaggaaaaaaaggcaaaaaatattgtgaaagaaaaaaaacaacttaatatattttggattaatatttggtatttcttttaaagtattttttgtgctgtgaacattttctgccaaagaccatgatgtgtgtctgtatgtttaagttatcgtaaatatttaaaatgtaaacatggctgttttgttatgccaccctgtaccaggattgctgccgcattccactgggtataacagtattttaattaaaaaaaaataattaaaagtg

SEQ ID NO: 107212 - DNA, 4335 bp, Homo sapiens
  Payload ID: 1045
  Gene Symbol: AMOTL2
  Gene Name: angiomotin like 2
  Uniprot ID: Q9Y2J4
  ENST ID: ENST00000422605
  CDS Start-End: 168-2507
agagcgtcggcgccacggccgagaacacatcttcgccgccgagctgagctgggccgagccggaggttgtggtgtctgactgcgctgggcaccctcgggccgcagcggtgctctggggccaggtgccaccggccattgtccaggcagctgtgtgcaagccaaagaagcatgaggacactggaagactcctcggggacagtcctgcaccgcctcatccaggagcagctgcgctacggcaacctgactgagacgcgcacgctgctagccatccagcagcaggccctgaggggtggggctggaactgggggtacagggagcccccaggcctccctggagatcctggccccagaggacagtcaggtgctgcagcaggccaccaggcaggagccccagggccaggagcaccagggcggtgagaaccacctggcagagaacaccctctaccggctatgcccacagcccagcaagggagaggagctgcccacctatgaggaggccaaagcccactcgcagtactatgcggcccagcaggcagggacccggccacatgcgggggaccgagatccccgtggggccccgggaggcagtcggaggcaggacgaggccctgcgggagctgaggcatgggcacgtgcgctcgttgagtgaacggctccttcagttgtccctggagaggaacggcgcccgggcccccagccacatgagctcctcccacagcttcccacagctggcccgcaaccagcagggccccccactgaggggcccccctgctgagggcccagagtcccgaggacccccacctcagtaccctcatgttgtactagctcatgagaccaccactgctgtcactgacccacggtaccgtgcccgcggcagcccgcacttccagcatgctgaagtcaggatcctgcaggcccaggtgcctcctgtgttcctccaacagcagcagcagtaccagtacctgcagcaatctcaggagcacccccctcccccacatccagctgctctcggccatggccccctgagctccctcagtccacctgctgtggaggggccagtgagtgcccaggcctcctcagccacctcgggcagtgcccacctggcccagatggaggccgtgctgagggagaatgccaggctgcagagagacaatgagcggctgcagagggagctggagagctctgcggagaaggctggccgcattgagaagctggaaagcgaaatccagcggctctctgaggcccatgagagcctgaccagagcctcctccaagcgtgaggccctggagaagaccatgcggaacaagatggacagtgaaatgaggaggctgcaagacttcaaccgggatcttagagagagattggaatctgcaaatcgccgcctggcaagcaagacacaggaggcccaggccggcagtcaggacatggtggccaagctgcttgctcagagctacgaacagcagcaggagcaagagaagctggagcgagagatggcactgctgcgcggcgccatcgaggaccagcggcggcgtgccgagctgctggagcaggctctgggcaatgcgcagggccgggcagctcgagccgaagaggagctgcgcaagaagcaggcctatgtggagaaagtggagcggctgcagcaggcgctcgggcagctgcaggcagcctgtgagaagcgggagcagctggagctgcgtctgcggactcgcctggagcaggaactcaaggccctgcgtgcacagcagagacaggcaggtgccccaggtggtagcagtggcagtggtgggtctccagagctcagcgccctgcgactgtcagaacaactgcgagagaaggaggagcagatcctggcgctggaggccgacatgaccaagtgggagcagaagtatttggaggaacgtgccatgaggcagtttgccatggatgcggctgccacggctgctgctcagcgtgacaccactctcatccgacattccccccagccctcacccagcagcagcttcaatgagggtctgctcactggtggccacaggcatcaggagatggaaagcaggttaaaggtgctccatgcccagatcctggagaaggatgcagtgatcaaggtccttcagcagcgctccaggagagaccctggcaaggccatccagggctccctgcggcctgccaagtcggtgccatctgttttcgcggctgcggcagcaggaacccagggctggcaagggctctcttctagtgagcgacaaacagcagacgcccctgctcggctgactacagacagagcacccacagaggagccagtggtcacagctccccctgctgcccatgccaaacacgggagcagagatgggagcacccagactgagggccccccagacagcacctccacctgcctgccaccggagcctgacagccttctggggtgcagcagtagccagagagcagcctctctggactctgtagctacatccagagtccaggacttgtcagacatggtggagatactgatctgaaggaggtggtgcttcaggactctgagccattctctcccctcctctgccctgtgccactctcagccatttcagcagccccgtcaaccgctgctccgtccctttccccagccagacactcattcccattgaccatctggtcccaggagctcaggaggaggaccccaggggagaggagagctgtgagagcaccggcacccccagaagactctgcttcttagcccacattcctccgggccttatggagaatgaggattcagccttgacttcttgcccaaggcctgctactggggtagcaactgacagctcagaaaggagctgagctccctctgccctgccagttgtcagtcaggcagggagggagtggctgtgttggtttggggaactaatttccacggacggctgcccgtggacaccaggtggactggttcactaatcaagtcagccatattgttctctggctaagtttggttccagccaacgtcatctgctcttcagttcctcactgccttcttgggatactaagacttgaattttttggggactattaagggtgttagtcttggagaagacacagcctcaccttctcacttgctgtgggtgaggggccatttaagtggactgggagacagtgcgcagtttgtatataattccctttcttgtggaacagaagactgaggcctgcaggttccgatgtgtctccatgggctgtgctcccctcttcctactgtcagtttctgaaacttctgactggcctcccagttatgcctcctcctcaagttcctggcccgtggatgttaaagctgctcgattcccaggatctcggctgccttttcctctatcttgagccctataaatgcccacgggacccccaccaccagcctcttgaagtggctccacagctcctgtccctggaacatcctgtcagtttggtcataaaccctgagccagatgaaatgagccaccgtgaacagacatctgccatgcccccaggtgggcttcggtggccctacccggtaccagttctttctgagaaactggagatgtcttgttagcataagtgtcttcattcccacctggagggtttgggagaggagcaaagcagttgaaaactagttaatgagctacaagagtcaaatagtcctctgaatggagcccccatcacaaaacagtgcccaggaggctggctcctcaagctacccatgcccagcgccctaaagcagcaccagatgctttggaattggggtgaaacacccacatggcagcctgctagcagcagtgactttgacttctggtcttaaagagtccctcacttcagccccaggagctattggtgggttttagcagttttgtctttaccgtttttagttctccttgattctttgttttcttcctttatcgtttttaggtttggtatgtgttgttttatttccatggttcctcaagtttcctttttaaacatttgcatttgctggacaattgcaattttttttaaaaaattcccctacccctgtttaaagctgaaaaatacatttggttcatgtgcattgtttacaaagcaaaaagaaaaaagaggaaaaaaaggcaaaaaatattgtgaaagaaaaaaaacaacttaatatattttggattaatatttggtatttcttttaaagtattttttgtgctgtgaacattttctgccaaagaccatgatgtgtgtctgtatgtttaagttatcgtaaatatttaaaatgtaaacatggctgttttgttatgccaccctgtaccaggattgctgccgcattccactgggtataacagtattttaattaaaaaaaaataattaaaa

SEQ ID NO: 107213 - DNA, 535 bp, Homo sapiens
  Payload ID: 1045
  Gene Symbol: AMOTL2
  Gene Name: angiomotin like 2
  ENST ID: ENST00000502491
  CDS Start-End: 437-535
cttttccgggagtcggagcctcgaggatcgagcgtcctcggggcgcagtgcgccctttcgaggcagccgcagtgcctggcaagggccgctctgcccagggagcgcagcgcgctgggctttgcggggctctagaaacgcgcgggtctcttggggctgggggagaggggagagggccgactccggagacaacagccacagtgtttcgggttgcaggaatagtaagtctccatgaatgttatcattagtaatcgtttaccaggattttcactgtgccaggagctcgcaggccactgcctctttttttttcctcatctccatgagtcaagcagaattctttgcatttttctggtggagaaactgaggctcagagattaggtgctctggggccaggtgccaccggccattgtccaggcagctgtgtgcaagccaaagaagcatgaggacactggaagactcctcggggacagtcctgcaccgcctcatccaggagcagctgcgctacggcaacctgactgagacgcgcacgctgctagcc

SEQ ID NO: 107214 - DNA, 544 bp, Homo sapiens
  Payload ID: 1045
  Gene Symbol: AMOTL2
  Gene Name: angiomotin like 2
  ENST ID: ENST00000506107
  CDS Start-End: 163-544
acacacacacacacacagccggagtcccctcccgcagcaaccccaggacacgcgtggtacagcccttgctgtcgtcccgtcgatgggtttagggatgaagggtgctctggggccaggtgccaccggccattgtccaggcagctgtgtgcaagccaaagaagcatgaggacactggaagactcctcggggacagtcctgcaccgcctcatccaggagcagctgcgctacggcaacctgactgagacgcgcacgctgctagccatccagcagcaggccctgaggggtggggctggaactgggggtacagggagcccccaggcctccctggagatcctggccccagaggacagtcaggtgctgcagcaggccaccaggcaggagccccagggccaggagcaccagggcggtgagaaccacctggcagagaacaccctctaccggctatgcccacagcccagcaagggagaggagctgcccacctatgaggaggccaaagcccactcgcagtactatgcggcccagcaggcagggacccggccacatg

SEQ ID NO: 107215 - DNA, 4521 bp, Homo sapiens
  Payload ID: 1045
  Gene Symbol: AMOTL2
  Gene Name: angiomotin like 2
  Uniprot ID: Q9Y2J4
  ENST ID: ENST00000514516
  CDS Start-End: 180-2693
gatagccagggaggggttttgagaatgagaaaccaagcagcccagtggttgattacctggttctcactgtgtgtgactctgggcacgctgcttaagctctctgagccctggtgtcctcatttacaacacagggatgataacagaactccgttggagggtgcttggcagggctgaatcggatgactgggcgaaaagccagcggtggcacaccttgcactctgcgtaaaggggcgcctattatcaccttggggaagaactggacagagcgcctggcggcgggtgattcagttgggtgctctggggccaggtgccaccggccattgtccaggcagctgtgtgcaagccaaagaagcatgaggacactggaagactcctcggggacagtcctgcaccgcctcatccaggagcagctgcgctacggcaacctgactgagacgcgcacgctgctagccatccagcagcaggccctgaggggtggggctggaactgggggtacagggagcccccaggcctccctggagatcctggccccagaggacagtcaggtgctgcagcaggccaccaggcaggagccccagggccaggagcaccagggcggtgagaaccacctggcagagaacaccctctaccggctatgcccacagcccagcaagggagaggagctgcccacctatgaggaggccaaagcccactcgcagtactatgcggcccagcaggcagggacccggccacatgcgggggaccgagatccccgtggggccccgggaggcagtcggaggcaggacgaggccctgcgggagctgaggcatgggcacgtgcgctcgttgagtgaacggctccttcagttgtccctggagaggaacggcgcccgggcccccagccacatgagctcctcccacagcttcccacagctggcccgcaaccagcagggccccccactgaggggcccccctgctgagggcccagagtcccgaggacccccacctcagtaccctcatgttgtactagctcatgagaccaccactgctgtcactgacccacggtaccgtgcccgcggcagcccgcacttccagcatgctgaagtcaggatcctgcaggcccaggtgcctcctgtgttcctccaacagcagcagcagtaccagtacctgcagcaatctcaggagcacccccctcccccacatccagctgctctcggccatggccccctgagctccctcagtccacctgctgtggaggggccagtgagtgcccaggcctcctcagccacctcgggcagtgcccacctggcccagatggaggccgtgctgagggagaatgccaggctgcagagagacaatgagcggctgcagagggagctggagagctctgcggagaaggctggccgcattgagaagctggaaagcgaaatccagcggctctctgaggcccatgagagcctgaccagagcctcctccaagcgtgaggccctggagaagaccatgcggaacaagatggacagtgaaatgaggaggctgcaagacttcaaccgggatcttagagagagattggaatctgcaaatcgccgcctggcaagcaagacacaggaggcccaggccggcagtcaggacatggtggccaagctgcttgctcagagctacgaacagcagcaggagcaagagaagctggagcgagagatggcactgctgcgcggcgccatcgaggaccagcggcggcgtgccgagctgctggagcaggctctgggcaatgcgcagggccgggcagctcgagccgaagaggagctgcgcaagaagcaggcctatgtggagaaagtggagcggctgcagcaggcgctcgggcagctgcaggcagcctgtgagaagcgggagcagctggagctgcgtctgcggactcgcctggagcaggaactcaaggccctgcgtgcacagcagagacaggcaggtgccccaggtggtagcagtggcagtggtgggtctccagagctcagcgccctgcgactgtcagaacaactgcgagagaaggaggagcagatcctggcgctggaggccgacatgaccaagtgggagcagaagtatttggaggaacgtgccatgaggcagtttgccatggatgcggctgccacggctgctgctcagcgtgacaccactctcatccgacattccccccagccctcacccagcagcagcttcaatgagggtctgctcactggtggccacaggcatcaggagatggaaagcaggttaaaggtgctccatgcccagatcctggagaaggatgcagtgatcaaggtccttcagcagcgctccaggagagaccctggcaaggccatccagggctccctgcggcctgccaagtcggtgccatctgttttcgcggctgcggcagcaggaacccagggctggcaagggctctcttctagtgagcgacaaacagcagacgcccctgctcggctgactacagacagagcacccacagaggagccagtggtcacagctccccctgctgcccatgccaaacacgggagcagagatgggagcacccagactgagggccccccagacagcacctccacctgcctgccaccggagcctgacagccttctggggtgcagcagtagccagagagcagcctctctggactctgtagctacatccagagtccaggacttgtcagacatggtggagatactgatctgaaggaggtggtgcttcaggactctgagccattctctcccctcctctgccctgtgccactctcagccatttcagcagccccgtcaaccgctgctccgtccctttccccagccagacactcattcccattgaccatctggtcccaggagctcaggaggaggaccccaggggagaggagagctgtgagagcaccggcacccccagaagactctgcttcttagcccacattcctccgggccttatggagaatgaggattcagccttgacttcttgcccaaggcctgctactggggtagcaactgacagctcagaaaggagctgagctccctctgccctgccagttgtcagtcaggcagggagggagtggctgtgttggtttggggaactaatttccacggacggctgcccgtggacaccaggtggactggttcactaatcaagtcagccatattgttctctggctaagtttggttccagccaacgtcatctgctcttcagttcctcactgccttcttgggatactaagacttgaattttttggggactattaagggtgttagtcttggagaagacacagcctcaccttctcacttgctgtgggtgaggggccatttaagtggactgggagacagtgcgcagtttgtatataattccctttcttgtggaacagaagactgaggcctgcaggttccgatgtgtctccatgggctgtgctcccctcttcctactgtcagtttctgaaacttctgactggcctcccagttatgcctcctcctcaagttcctggcccgtggatgttaaagctgctcgattcccaggatctcggctgccttttcctctatcttgagccctataaatgcccacgggacccccaccaccagcctcttgaagtggctccacagctcctgtccctggaacatcctgtcagtttggtcataaaccctgagccagatgaaatgagccaccgtgaacagacatctgccatgcccccaggtgggcttcggtggccctacccggtaccagttctttctgagaaactggagatgtcttgttagcataagtgtcttcattcccacctggagggtttgggagaggagcaaagcagttgaaaactagttaatgagctacaagagtcaaatagtcctctgaatggagcccccatcacaaaacagtgcccaggaggctggctcctcaagctacccatgcccagcgccctaaagcagcaccagatgctttggaattggggtgaaacacccacatggcagcctgctagcagcagtgactttgacttctggtcttaaagagtccctcacttcagccccaggagctattggtgggttttagcagttttgtctttaccgtttttagttctccttgattctttgttttcttcctttatcgtttttaggtttggtatgtgttgttttatttccatggttcctcaagtttcctttttaaacatttgcatttgctggacaattgcaattttttttaaaaaattcccctacccctgtttaaagctgaaaaatacatttggttcatgtgcattgtttacaaagcaaaaagaaaaaagaggaaaaaaaggcaaaaaatattgtgaaagaaaaaaaacaacttaatatattttggattaatatttggtatttcttttaaagtattttttgtgctgtgaacattttctgccaaagaccatgatgtgtgtctgtatgtttaagttatcgtaaatatttaaaatgtaaacatggctgttttgttatgccaccctgtaccaggattgctgccgcattccactgggtataacagtattttaattaaaaaaaaataattaaaa

SEQ ID NO: 107216 - DNA, 623 bp, Homo sapiens
  Payload ID: 1045
  Gene Symbol: AMOTL2
  Gene Name: angiomotin like 2
  ENST ID: ENST00000504234
  CDS Start-End: 171-623
agggctcgagagggagggaggcggacccgcgatgcttaaagacctctccgggcctcgggctaccctcaccggctcgccccaggcgtaccagcggccaccggtgctccaggtgctctggggccaggtgccaccggccattgtccaggcagctgtgtgcaagccaaagaagcatgaggacactggaagactcctcggggacagtcctgcaccgcctcatccaggagcagctgcgctacggcaacctgactgagacgcgcacgctgctagccatccagcagcaggccctgaggggtggggctggaactgggggtacagggagcccccaggcctccctggagatcctggccccagaggacagtcaggtgctgcagcaggccaccaggcaggagccccagggccaggagcaccagggcggtgagaaccacctggcagagaacaccctctaccggctatgcccacagcccagcaagggagaggagctgcccacctatgaggaggccaaagcccactcgcagtactatgcggcccagcaggcagggacccggccacatgcgggggaccgagatccccgtggggccccgggaggcagtcggaggcaggacgaggccctgcgggagctgagg

SEQ ID NO: 107217 - DNA, 2653 bp, Homo sapiens
  Payload ID: 1045
  Gene Symbol: AMOTL2
  Gene Name: angiomotin like 2
  Uniprot ID: Q9Y2J4
  ENST ID: ENST00000513145
  CDS Start-End: 166-2499
agcgtcggcgccacggccgagaacacatcttcgccgccgagctgagctgggccgagccggaggttgtggtgtctgactgcgctgggcaccctcgggccgcagcggtgctctggggccaggtgccaccggccattgtccaggcagctgtgtgcaagccaaagaagcatgaggacactggaagactcctcggggacagtcctgcaccgcctcatccaggagcagctgcgctacggcaacctgactgagacgcgcacgctgctagccatccagcagcaggccctgaggggtggggctggaactgggggtacagggagcccccaggcctccctggagatcctggccccagaggacagtcaggtgctgcagcaggccaccaggcaggagccccagggccaggagcaccagggcggtgagaaccacctggcagagaacaccctctaccggctatgcccacagcccagcaagggagaggagctgcccacctatgaggaggccaaagcccactcgcagtactatgcggcccagcaggcagggacccggccacatgcgggggaccgagatccccgtggggccccgggaggcagtcggaggcaggacgaggccctgcgggagctgaggcatgggcacgtgcgctcgttgagtgaacggctccttcagttgtccctggagaggaacggcgcccgggcccccagccacatgagctcctcccacagcttcccacagctggcccgcaaccagcagggccccccactgaggggcccccctgctgagggcccagagtcccgaggacccccacctcagtaccctcatgttgtactagctcatgagaccaccactgctgtcactgacccacggtaccgtgcccgcggcagcccgcacttccagcatgctgaagtcaggatcctgcaggcccaggtgcctcctgtgttcctccaacagcagcagcagtaccagtacctgcagcaatctcaggagcacccccctcccccacatccagctgctctcggccatggccccctgagctccctcagtccacctgctgtggaggggccagtgagtgcccaggcctcctcagccacctcgggcagtgcccacctggcccagatggaggccgtgctgagggagaatgccaggctgcagagagacaatgagcggctgcagagggagctggagagctctgcggagaaggctggccgcattgagaagctggaaagcgaaatccagcggctctctgaggcccatgagagcctgaccagagcctcctccaagcgtgaggccctggagaagaccatgcggaacaagatggacagtgaaatgaggaggctgcaagacttcaaccgggatcttagagagagattggaatctgcaaatcgccgcctggcaagcaagacacaggaggcccaggccggcagtcaggacatggtggccaagctgcttgctcagagctacgaacagcagcaggagcaagagaagctggagcgagagatggcactgctgcgcggcgccatcgaggaccagcggcggcgtgccgagctgctggagcaggctctgggcaatgcgcagggccgggcagctcgagccgaagaggagctgcgcaagaagcaggcctatgtggagaaagtggagcggctgcagcaggcgctcgggcagctgcaggcagcctgtgagaagcgggagcagctggagctgcgtctgcggactcgcctggagcaggaactcaaggccctgcgtgcacagcaggcaggtgccccaggtggtagcagtggcagtggtgggtctccagagctcagcgccctgcgactgtcagaacaactgcgagagaaggaggagcagatcctggcgctggaggccgacatgaccaagtgggagcagaagtatttggaggaacgtgccatgaggcagtttgccatggatgcggctgccacggctgctgctcagcgtgacaccactctcatccgacattccccccagccctcacccagcagcagcttcaatgagggtctgctcactggtggccacaggcatcaggagatggaaagcaggttaaaggtgctccatgcccagatcctggagaaggatgcagtgatcaaggtccttcagcagcgctccaggagagaccctggcaaggccatccagggctccctgcggcctgccaagtcggtgccatctgttttcgcggctgcggcagcaggaacccagggctggcaagggctctcttctagtgagcgacaaacagcagacgcccctgctcggctgactacagacagagcacccacagaggagccagtggtcacagctccccctgctgcccatgccaaacacgggagcagagatgggagcacccagactgagggccccccagacagcacctccacctgcctgccaccggagcctgacagccttctggggtgcagcagtagccagagagcagcctctctggactctgtagctacatccagagtccaggacttgtcagacatggtggagatactgatctgaaggaggtggtgcttcaggactctgagccattctctcccctcctctgccctgtgccactctcagccatttcagcagccccgtcaaccgctgctccgtccctttccccagccagacactcattcccattgaccatctggtcccaggagctcaggag

SEQ ID NO: 107218 - DNA, 845 bp, Homo sapiens
  Payload ID: 1045
  Gene Symbol: AMOTL2
  Gene Name: angiomotin like 2
  ENST ID: ENST00000510560
  CDS Start-End: 252-845
cgagagggagggaggcggacccgcgatgcttaaagacctctccgggcctcgggctaccctcaccggctcgccccaggcgtaccagcggccaccggtgctccaggcgagcaggagcccaggccaaggctggagacgcgcgctggcttagaaaggcggccttcagagagcgcagcgggcgagtgcagcagaggtgctctggggccaggtgccaccggccattgtccaggcagctgtgtgcaagccaaagaagcatgaggacactggaagactcctcggggacagtcctgcaccgcctcatccaggagcagctgcgctacggcaacctgactgagacgcgcacgctgctagccatccagcagcaggccctgaggggtggggctggaactgggggtacagggagcccccaggcctccctggagatcctggccccagaggacagtcaggtgctgcagcaggccaccaggcaggagccccagggccaggagcaccagggcggtgagaaccacctggcagagaacaccctctaccggctatgcccacagcccagcaagggagaggagctgcccacctatgaggaggccaaagcccactcgcagtactatgcggcccagcaggcagggacccggccacatgcgggggaccgagatccccgtggggccccgggaggcagtcggaggcaggacgaggccctgcgggagctgaggcatgggcacgtgcgctcgttgagtgaacggctccttcagttgtccctggagaggaacggcgcccgggcccccagccacatgagctcctcccacagcttcccacagctggcccgcaaccagcagggccccccactgaggggc

SEQ ID NO: 107219 - DNA, 527 bp, Homo sapiens
  Payload ID: 1045
  Gene Symbol: AMOTL2
  Gene Name: angiomotin like 2
  ENST ID: ENST00000505596
  CDS Start-End: 94-527
tgtgtagctggctgtacgggtggtggttcctggtgctctggggccaggtgccaccggccattgtccaggcagctgtgtgcaagccaaagaagcatgaggacactggaagactcctcggggacagtcctgcaccgcctcatccaggagcagctgcgctacggcaacctgactgagacgcgcacgctgctagccatccagcagcaggccctgaggggtggggctggaactgggggtacagggagcccccaggcctccctggagatcctggccccagaggacagtcaggtgctgcagcaggccaccaggcaggagccccagggccaggagcaccagggcggtgagaaccacctggcagagaacaccctctaccggctatgcccacagcccagcaagggagaggagctgcccacctatgaggaggccaaagcccactcgcagtactatgcggcccagcaggcagggacccggccacatgcgggggaccgagatccccgtggggccccgggaggcagtcggaggcaggacga

SEQ ID NO: 107220 - DNA, 713 bp, Homo sapiens
  Payload ID: 1045
  Gene Symbol: AMOTL2
  Gene Name: angiomotin like 2
  ENST ID: ENST00000515172
  CDS Start-End: 344-713
aagagggctcgagagggagggaggcggacccgcgatgcttaaagacctctccgggcctcgggctaccctcaccggctcgccccaggcgtaccagcggccaccggtgctccaggtccgcccgggctcgtggtggggcgggagccctggctggggtgccagaacctcctagcttggagactgtctttggttccttaggcgagcaggagcccaggccaaggctggagacgcgcgctggcttagaaaggcggccttcagagagcgcagcgggcgagtgcagcagaggtgctctggggccaggtgccaccggccattgtccaggcagctgtgtgcaagccaaagaagcatgaggacactggaagactcctcggggacagtcctgcaccgcctcatccaggagcagctgcgctacggcaacctgactgagacgcgcacgctgctagccatccagcagcaggccctgaggggtggggctggaactgggggtacagggagcccccaggcctccctggagatcctggccccagaggacagtcaggtgctgcagcaggccaccaggcaggagccccagggccaggagcaccagggcggtgagaaccacctggcagagaacaccctctaccggctatgcccacagcccagcaagggagaggagctgcccacctatgaggaggccaaagcccactcgcagtactatgcggcccagcaggcaggga

SEQ ID NO: 107221 - DNA, 4353 bp, Homo sapiens
  Payload ID: 1046
  Gene Symbol: ANGPT1
  Gene Name: angiopoietin 1
  Uniprot ID: Q15389
  ENST ID: ENST00000297450
  CDS Start-End: 498-1991
gccctaagccatcagcaatccttagtataggggcacactcatgcattcctgtcaagtcatcttgtgaaaggctgcctgcttccagcttggcttggatgtgcaaccttaataaaactcactgaggtctgggagaaaatagcagatctgcagcagatagggtagaggaaagggtctagaatatgtacacgcagctgactcaggcaggctccatgctgaacggtcacacagagaggaaacaataaatctcagctactatgcaataaatatctcaagttttaacgaagaaaaacatcattgcagtgaaataaaaaattttaaaattttagaacaaagctaacaaatggctagttttctatgattcttcttcaaacgctttctttgagggggaaagagtcaaacaaacaagcagttttacctgaaataaagaactagttttagaggtcagaagaaaggagcaagttttgcgagaggcacggaaggagtgtgctggcagtacaatgacagttttcctttcctttgctttcctcgctgccattctgactcacatagggtgcagcaatcagcgccgaagtccagaaaacagtgggagaagatataaccggattcaacatgggcaatgtgcctacactttcattcttccagaacacgatggcaactgtcgtgagagtacgacagaccagtacaacacaaacgctctgcagagagatgctccacacgtggaaccggatttctcttcccagaaacttcaacatctggaacatgtgatggaaaattatactcagtggctgcaaaaacttgagaattacattgtggaaaacatgaagtcggagatggcccagatacagcagaatgcagttcagaaccacacggctaccatgctggagataggaaccagcctcctctctcagactgcagagcagaccagaaagctgacagatgttgagacccaggtactaaatcaaacttctcgacttgagatacagctgctggagaattcattatccacctacaagctagagaagcaacttcttcaacagacaaatgaaatcttgaagatccatgaaaaaaacagtttattagaacataaaatcttagaaatggaaggaaaacacaaggaagagttggacaccttaaaggaagagaaagagaaccttcaaggcttggttactcgtcaaacatatataatccaggagctggaaaagcaattaaacagagctaccaccaacaacagtgtccttcagaagcagcaactggagctgatggacacagtccacaaccttgtcaatctttgcactaaagaagttttactaaagggaggaaaaagagaggaagagaaaccatttagagactgtgcagatgtatatcaagctggttttaataaaagtggaatctacactatttatattaataatatgccagaacccaaaaaggtgttttgcaatatggatgtcaatgggggaggttggactgtaatacaacatcgtgaagatggaagtctagatttccaaagaggctggaaggaatataaaatgggttttggaaatccctccggtgaatattggctggggaatgagtttatttttgccattaccagtcagaggcagtacatgctaagaattgagttaatggactgggaagggaaccgagcctattcacagtatgacagattccacataggaaatgaaaagcaaaactataggttgtatttaaaaggtcacactgggacagcaggaaaacagagcagcctgatcttacacggtgctgatttcagcactaaagatgctgataatgacaactgtatgtgcaaatgtgccctcatgttaacaggaggatggtggtttgatgcttgtggcccctccaatctaaatggaatgttctatactgcgggacaaaaccatggaaaactgaatgggataaagtggcactacttcaaagggcccagttactccttacgttccacaactatgatgattcgacctttagatttttgaaagcgcaatgtcagaagcgattatgaaagcaacaaagaaatccggagaagctgccaggtgagaaactgtttgaaaacttcagaagcaaacaatattgtctcccttccagcaataagtggtagttatgtgaagtcaccaaggttcttgaccgtgaatctggagccgtttgagttcacaagagtctctacttggggtgacagtgctcacgtggctcgactatagaaaactccactgactgtcgggctttaaaaagggaagaaactgctgagcttgctgtgcttcaaactactactggaccttattttggaactatggtagccagatgataaatatggttaatttcatgtaaaacagaaaaaaagagtgaaaaagagaatatacatgaagaatagaaacaagcctgccataatcctttggaaaagatgtattataccagtgaaaaggtgttatatctatgcaaacctactaacaaattatactgttgcacaattttgataaaaatttagaacagcattgtcctctgagttggttaaatgttaatggatttcagaagcctaattccagtatcatacttactagttgatttctgcttacccatcttcaaatgaaaattccatttttgtaagccataatgaactgtagtacatggacaataagtgtgtggtagaaacaaactccattactctgatttttgatacagttttcagaaaaagaaatgaacataatcaagtaaggatgtatgtggtgaaaacttaccacccccatactatggttttcatttactctaaaaactgattgaatgatatataaatatatttatagcctgagtaaagttaaaagaatgtaaaatatatcatcaagttcttaaaataatatacatgcatttaatatttcctttgatattatacaggaaagcaatattttggagtatgttaagttgaagtaaaagcaagtactctggagcagttcattttacagtatctacttgcatgtgtatacatacatgtaacttcattattttaaaaatatttttagaactccaatactcaccctgttatgtcttgctaatttaaattttgctaattaactgaaacatgcttaccagattcacactgttccagtgtctataaaagaaacactttgaagtctataaaaaataaaataattataaatatcattgtacatagcatgtttatatctgcaaaaaacctaatagctaattaatctggaatatgcaacattgtccttaattgatgcaaataacacaaatgctcaaagaaatctactatatcccttaatgaaatacatcattcttcatatatttctccttcagtccattcccttaggcaatttttaatttttaaaaattattatcaggggagaaaaattggcaaaactattatatgtaagggaaatatatacaaaaagaaaattaatcatagtcacctgactaagaaattctgactgctagttgccataaataactcaatggaaatattcctatgggataatgtattttaagtgaatttttggggtgcttgaagttactgcattattttatcaagaagtcttctctgcctgtaagtgtccaaggttatgacagtaaacagtttttattaaaacatgagtcactatgggatgagaaaattgaaataaagctactgggcctcctctcataaaagagacagttgttggcaaggtagcaataccagtttcaaacttggtgacttgatccactatgccttaatggtttcctccatttgagaaaataaagctattcacattgttaagaaaaatactttttaaagtttaccatcaagtcttttttatatttatgtgtctgtattctacccctttttgccttacaagtgatatttgcaggtattataccatttttctattcttggtggcttcttcatagcaggtaagcctctccttctaaaaacttctcaactgttttcatttaagggaaagaaaatgagtattttgtccttttgtgttcctacagacactttcttaaaccagtttttggataaagaatactatttccaaactcatattacaaaaacaaaataaaataataaaaaaagaaagcatgatatttactgttttgttgtctgggtttgagaaatgaaatattgtttccaattatttataataaatcagtataaaatgttttatgattgttatgtgtattatgtaatacgtacatgtttatggcaatttaacatgtgtattcttttaattgtttcagaataggataattaggtattcgaattttgtctttaaaattcatgtggtttctatgcaaagttcttcatatcatcacaacattatttgatttaaataaaattgaaagtaa

SEQ ID NO: 107222 - DNA, 4322 bp, Homo sapiens
  Payload ID: 1046
  Gene Symbol: ANGPT1
  Gene Name: angiopoietin 1
  Uniprot ID: Q15389
  ENST ID: ENST00000517746
  CDS Start-End: 453-1949
ttcctgtcaagtcatcttgtgaaaggctgcctgcttccagcttggcttggatgtgcaaccttaataaaactcactgaggtctgggagaaaatagcagatctgcagcagatagggtagaggaaagggtctagaatatgtacacgcagctgactcaggcaggctccatgctgaacggtcacacagagaggaaacaataaatctcagctactatgcaataaatatctcaagttttaacgaagaaaaacatcattgcagtgaaataaaaaattttaaaattttagaacaaagctaacaaatggctagttttctatgattcttcttcaaacgctttctttgagggggaaagagtcaaacaaacaagcagttttacctgaaataaagaactagttttagaggtcagaagaaaggagcaagttttgcgagaggcacggaaggagtgtgctggcagtacaatgacagttttcctttcctttgctttcctcgctgccattctgactcacatagggtgcagcaatcagcgccgaagtccagaaaacagtgggagaagatataaccggattcaacatgggcaatgtgcctacactttcattcttccagaacacgatggcaactgtcgtgagagtacgacagaccagtacaacacaaacgctctgcagagagatgctccacacgtggaaccggatttctcttcccagaaacttcaacatctggaacatgtgatggaaaattatactcagtggctgcaaaaacttgagaattacattgtggaaaacatgaagtcggagatggcccagatacagcagaatgcagttcagaaccacacggctaccatgctggagataggaaccagcctcctctctcagactgcagagcagaccagaaagctgacagatgttgagacccaggtactaaatcaaacttctcgacttgagatacagctgctggagaattcattatccacctacaagctagagaagcaacttcttcaacagacaaatgaaatcttgaagatccatgaaaaaaacagtttattagaacataaaatcttagaaatggaaggaaaacacaaggaagagttggacaccttaaaggaagagaaagagaaccttcaaggcttggttactcgtcaaacatatataatccaggagctggaaaagcaattaaacagagctaccaccaacaacagtgtccttcagaagcagcaactggagctgatggacacagtccacaaccttgtcaatctttgcactaaagaaggtgttttactaaagggaggaaaaagagaggaagagaaaccatttagagactgtgcagatgtatatcaagctggttttaataaaagtggaatctacactatttatattaataatatgccagaacccaaaaaggtgttttgcaatatggatgtcaatgggggaggttggactgtaatacaacatcgtgaagatggaagtctagatttccaaagaggctggaaggaatataaaatgggttttggaaatccctccggtgaatattggctggggaatgagtttatttttgccattaccagtcagaggcagtacatgctaagaattgagttaatggactgggaagggaaccgagcctattcacagtatgacagattccacataggaaatgaaaagcaaaactataggttgtatttaaaaggtcacactgggacagcaggaaaacagagcagcctgatcttacacggtgctgatttcagcactaaagatgctgataatgacaactgtatgtgcaaatgtgccctcatgttaacaggaggatggtggtttgatgcttgtggcccctccaatctaaatggaatgttctatactgcgggacaaaaccatggaaaactgaatgggataaagtggcactacttcaaagggcccagttactccttacgttccacaactatgatgattcgacctttagatttttgaaagcgcaatgtcagaagcgattatgaaagcaacaaagaaatccggagaagctgccaggtgagaaactgtttgaaaacttcagaagcaaacaatattgtctcccttccagcaataagtggtagttatgtgaagtcaccaaggttcttgaccgtgaatctggagccgtttgagttcacaagagtctctacttggggtgacagtgctcacgtggctcgactatagaaaactccactgactgtcgggctttaaaaagggaagaaactgctgagcttgctgtgcttcaaactactactggaccttattttggaactatggtagccagatgataaatatggttaatttcatgtaaaacagaaaaaaagagtgaaaaagagaatatacatgaagaatagaaacaagcctgccataatcctttggaaaagatgtattataccagtgaaaaggtgttatatctatgcaaacctactaacaaattatactgttgcacaattttgataaaaatttagaacagcattgtcctctgagttggttaaatgttaatggatttcagaagcctaattccagtatcatacttactagttgatttctgcttacccatcttcaaatgaaaattccatttttgtaagccataatgaactgtagtacatggacaataagtgtgtggtagaaacaaactccattactctgatttttgatacagttttcagaaaaagaaatgaacataatcaagtaaggatgtatgtggtgaaaacttaccacccccatactatggttttcatttactctaaaaactgattgaatgatatataaatatatttatagcctgagtaaagttaaaagaatgtaaaatatatcatcaagttcttaaaataatatacatgcatttaatatttcctttgatattatacaggaaagcaatattttggagtatgttaagttgaagtaaaagcaagtactctggagcagttcattttacagtatctacttgcatgtgtatacatacatgtaacttcattattttaaaaatatttttagaactccaatactcaccctgttatgtcttgctaatttaaattttgctaattaactgaaacatgcttaccagattcacactgttccagtgtctataaaagaaacactttgaagtctataaaaaataaaataattataaatatcattgtacatagcatgtttatatctgcaaaaaacctaatagctaattaatctggaatatgcaacattgtccttaattgatgcaaataacacaaatgctcaaagaaatctactatatcccttaatgaaatacatcattcttcatatatttctccttcagtccattcccttaggcaatttttaatttttaaaaattattatcaggggagaaaaattggcaaaactattatatgtaagggaaatatatacaaaaagaaaattaatcatagtcacctgactaagaaattctgactgctagttgccataaataactcaatggaaatattcctatgggataatgtattttaagtgaatttttggggtgcttgaagttactgcattattttatcaagaagtcttctctgcctgtaagtgtccaaggttatgacagtaaacagtttttattaaaacatgagtcactatgggatgagaaaattgaaataaagctactgggcctcctctcataaaagagacagttgttggcaaggtagcaataccagtttcaaacttggtgacttgatccactatgccttaatggtttcctccatttgagaaaataaagctattcacattgttaagaaaaatactttttaaagtttaccatcaagtcttttttatatttatgtgtctgtattctacccctttttgccttacaagtgatatttgcaggtattataccatttttctattcttggtggcttcttcatagcaggtaagcctctccttctaaaaacttctcaactgttttcatttaagggaaagaaaatgagtattttgtccttttgtgttcctacagacactttcttaaaccagtttttggataaagaatactatttccaaactcatattacaaaaacaaaataaaataataaaaaaagaaagcatgatatttactgttttgttgtctgggtttgagaaatgaaatattgtttccaattatttataataaatcagtataaaatgttttatgattgttatgtgtattatgtaatacgtacatgtttatggcaatttaacatgtgtattcttttaattgtttcagaataggataattaggtattcgaattttgtctttaaaattcatgtggtttctatgcaaagttcttcatatcatcacaacattatttgatttaaataaaattgaaagtaatatttgtgcaa

SEQ ID NO: 107223 - DNA, 548 bp, Homo sapiens
  Payload ID: 1046
  Gene Symbol: ANGPT1
  Gene Name: angiopoietin 1
  ENST ID: ENST00000520033
  CDS Start-End: 458-548
tattacttctattttgattccaagtagttgccataggaagaagcaacaccctgcagaaactgaggctatcagtgtatgtaggtgaaattaatttatccatttatttggcaaaataattaatcaaagcatagtgattattatgcagctcatggcatcgctatcaggaaaggttttgaggcagaatagatgtgttatcaactctaaatgaagctatatgataattatgttaatccatcaccttccatgaagggaaacctccttcctcaacttttctggtcttgcaactgaacaggatgagaagcaaggcatgcaagggggcaaatgatttgtgggtcaccataaatactggaactgttatggcactgctttcttgatgtgatggatttaattcaaagaaatcaactttccataatcacttgtcgattaaaatgagcttgagaattacattgtggaaaacatgaagtcggagatggcccagatacagcagaatgcagttcagaaccacacggctaccatgctggagataggaaccagcctcctctctcaga

SEQ ID NO: 107224 - DNA, 1523 bp, Homo sapiens
  Payload ID: 1046
  Gene Symbol: ANGPT1
  Gene Name: angiopoietin 1
  ENST ID: ENST00000520052
  CDS Start-End: 287-1180
cggctaagtttttgtatttttagtagagacggggtttcaccatgtttgccaggatggtctcgatctcttgacctcgtgatccacccgccttggcctcccaaagtgctgggattacaggcgtgagccactgcgcccggcggtactaaatcaaacttctcgacttgagatacagctgctggagaattcattatccacctacaagctagagaagcaacttcttcaacagacaaatgaaatcttgaagatccatgaaaaaaacagtttattagaacataaaatcttagaaatggaaggaaaacacaaggaagagttggacaccttaaaggaagagaaagagaaccttcaaggcttggttactcgtcaaacatatataatccaggagctggaaaagcaattaaacagagctaccaccaacaacagtgtccttcagaagcagcaactggagctgatggacacagtccacaaccttgtcaatctttgcactaaagaagttttactaaagggaggaaaaagagaggaagagaaaccatttagagactgtgcagatgtatatcaagctggttttaataaaagtggaatctacactatttatattaataatatgccagaacccaaaaaggtgttttgcaatatggatgtcaatgggggaggttggactgtaatacaacatcgtgaagatggaagtctagatttccaaagaggctggaaggaatataaaatgggttttggaaatccctccggtgaatattggctggggaatgagtttatttttgccattaccagtcagaggcagtacatgctaagaattgagttaatggactgggaagggaaccgagcctattcacagtatgacagattccacataggaaatgaaaagcaaaactataggttgtatttaaaaggtcacactgggacagcaggaaaacagagcagcctgatcttacacggtgctgatttcagcactaaagatgctgataatgacaactgtatgtgcaaatgtgccctcatgttaacaggaggatggtggtttgatgcttgtggcccctccaatctaaatggaatgttctatactgcgggacaaaaccatggaaaactgaatgggataaagtggcactacttcaaagggcccagttactccttacgttccacaactatgatgattcgacctttagatttttgaaagcgcaatgtcagaagcgattatgaaagcaacaaagaaatccggagaagctgccaggtgagaaactgtttgaaaacttcagaagcaaacaatattgtctcccttccagcaataagtggtagttatgtgaagtcaccaaggttcttgaccgtgaatctggagccgtttgagttcacaagagtctctacttggggtgacagtgctcacgtggctcgactatagaaaactccactgactgtcgggctttaaaaagggaagaaactgctgagcttgctgtgcttcaaactactactggaccttattttggaactatggtagccagatgataaatatggttaatttc

SEQ ID NO: 107225 - DNA, 1526 bp, Homo sapiens
  Payload ID: 1046
  Gene Symbol: ANGPT1
  Gene Name: angiopoietin 1
  ENST ID: ENST00000520734
  CDS Start-End: 287-1183
cggctaagtttttgtatttttagtagagacggggtttcaccatgtttgccaggatggtctcgatctcttgacctcgtgatccacccgccttggcctcccaaagtgctgggattacaggcgtgagccactgcgcccggcggtactaaatcaaacttctcgacttgagatacagctgctggagaattcattatccacctacaagctagagaagcaacttcttcaacagacaaatgaaatcttgaagatccatgaaaaaaacagtttattagaacataaaatcttagaaatggaaggaaaacacaaggaagagttggacaccttaaaggaagagaaagagaaccttcaaggcttggttactcgtcaaacatatataatccaggagctggaaaagcaattaaacagagctaccaccaacaacagtgtccttcagaagcagcaactggagctgatggacacagtccacaaccttgtcaatctttgcactaaagaaggtgttttactaaagggaggaaaaagagaggaagagaaaccatttagagactgtgcagatgtatatcaagctggttttaataaaagtggaatctacactatttatattaataatatgccagaacccaaaaaggtgttttgcaatatggatgtcaatgggggaggttggactgtaatacaacatcgtgaagatggaagtctagatttccaaagaggctggaaggaatataaaatgggttttggaaatccctccggtgaatattggctggggaatgagtttatttttgccattaccagtcagaggcagtacatgctaagaattgagttaatggactgggaagggaaccgagcctattcacagtatgacagattccacataggaaatgaaaagcaaaactataggttgtatttaaaaggtcacactgggacagcaggaaaacagagcagcctgatcttacacggtgctgatttcagcactaaagatgctgataatgacaactgtatgtgcaaatgtgccctcatgttaacaggaggatggtggtttgatgcttgtggcccctccaatctaaatggaatgttctatactgcgggacaaaaccatggaaaactgaatgggataaagtggcactacttcaaagggcccagttactccttacgttccacaactatgatgattcgacctttagatttttgaaagcgcaatgtcagaagcgattatgaaagcaacaaagaaatccggagaagctgccaggtgagaaactgtttgaaaacttcagaagcaaacaatattgtctcccttccagcaataagtggtagttatgtgaagtcaccaaggttcttgaccgtgaatctggagccgtttgagttcacaagagtctctacttggggtgacagtgctcacgtggctcgactatagaaaactccactgactgtcgggctttaaaaagggaagaaactgctgagcttgctgtgcttcaaactactactggaccttattttggaactatggtagccagatgataaatatggttaatttc

SEQ ID NO: 107226 - DNA, 5416 bp, Homo sapiens
  Payload ID: 1047
  Gene Symbol: ANGPT2
  Gene Name: angiopoietin 2
  Uniprot ID: O15123
  ENST ID: ENST00000325203
  CDS Start-End: 476-1966
ctggttggagggcaggcattctgctctgatttttcctgttgcctggctagtgaccccctacaggaagataacggctaagccaggagggcggagcagcccactacacatgtctggctgctcttatcaacttatcatataaggaaaggaaagtgattgattcggatactgacactgtaggatctggggagagaggaacaaaggaccgtgaaagctgctctgtaaaagctgacacagccctcccaagtgagcaggactgttcttcccactgcaatctgacagtttactgcatgcctggagagaacacagcagtaaaaaccaggtttgctactggaaaaagaggaaagagaagactttcattgacggacccagccatggcagcgtagcagccctgcgttttagacggcagcagctcgggactctggacgtgtgtttgccctcaagtttgctaagctgctggtttattactgaagaaagaatgtggcagattgttttctttactctgagctgtgatcttgtcttggccgcagcctataacaactttcggaagagcatggacagcataggaaagaagcaatatcaggtccagcatgggtcctgcagctacactttcctcctgccagagatggacaactgccgctcttcctccagcccctacgtgtccaatgctgtgcagagggacgcgccgctcgaatacgatgactcggtgcagaggctgcaagtgctggagaacatcatggaaaacaacactcagtggctaatgaagcttgagaattatatccaggacaacatgaagaaagaaatggtagagatacagcagaatgcagtacagaaccagacggctgtgatgatagaaatagggacaaacctgttgaaccaaacagcggagcaaacgcggaagttaactgatgtggaagcccaagtattaaatcagaccacgagacttgaacttcagctcttggaacactccctctcgacaaacaaattggaaaaacagattttggaccagaccagtgaaataaacaaattgcaagataagaacagtttcctagaaaagaaggtgctagctatggaagacaagcacatcatccaactacagtcaataaaagaagagaaagatcagctacaggtgttagtatccaagcaaaattccatcattgaagaactagaaaaaaaaatagtgactgccacggtgaataattcagttcttcagaagcagcaacatgatctcatggagacagttaataacttactgactatgatgtccacatcaaactcagctaaggaccccactgttgctaaagaagaacaaatcagcttcagagactgtgctgaagtattcaaatcaggacacaccacgaatggcatctacacgttaacattccctaattctacagaagagatcaaggcctactgtgacatggaagctggaggaggcgggtggacaattattcagcgacgtgaggatggcagcgttgattttcagaggacttggaaagaatataaagtgggatttggtaacccttcaggagaatattggctgggaaatgagtttgtttcgcaactgactaatcagcaacgctatgtgcttaaaatacaccttaaagactgggaagggaatgaggcttactcattgtatgaacatttctatctctcaagtgaagaactcaattataggattcaccttaaaggacttacagggacagccggcaaaataagcagcatcagccaaccaggaaatgattttagcacaaaggatggagacaacgacaaatgtatttgcaaatgttcacaaatgctaacaggaggctggtggtttgatgcatgtggtccttccaacttgaacggaatgtactatccacagaggcagaacacaaataagttcaacggcattaaatggtactactggaaaggctcaggctattcgctcaaggccacaaccatgatgatccgaccagcagatttctaaacatcccagtccacctgaggaactgtctcgaactattttcaaagacttaagcccagtgcactgaaagtcacggctgcgcactgtgtcctcttccaccacagagggcgtgtgctcggtgctgacgggacccacatgctccagattagagcctgtaaactttatcacttaaacttgcatcacttaacggaccaaagcaagaccctaaacatccataattgtgattagacagaacacctatgcaaagatgaacccgaggctgagaatcagactgacagtttacagacgctgctgtcacaaccaagaatgttatgtgcaagtttatcagtaaataactggaaaacagaacacttatgttatacaatacagatcatcttggaactgcattcttctgagcactgtttatacactgtgtaaatacccatatgtcctgaattcaccatcactatcacaattaaaaggaagaaaaaaactctctaagccataaaaagacatattcagggatattctgagaaggggttactagaagtttaatatttggaaaaacagttagtgcatttttactccatctcttaggtgctttaaatttttatttcaaaaacagcgtatttacatttatgttgacagcttagttataagttaatgctcaaatacgtatttcaaatttatatggtagaaacttccagaatctctgaaattatcaacagaaacgtgccattttagtttatatgcagaccgtactatttttttctgcctgattgttaaatatgaaggtatttttagtaattaaatataacttattaggggatatgcctatgtttaacttttatgataatatttacaattttataatttgtttccaaaagacctaattgtgccttgtgataaggaaacttcttacttttaatgatgaggaaaattatacatttcattctatgacaaagaaactttactatcttctcactattctaaaacagaggtctgttttctttcctagtaagatatatttttatagaactagactacaatttaatttctggttgagaaaagccttctatttaagaaatttacaaagctatatgtctcaagattcacccttaaatttacttaaggaaaaaaataattgacactagtaagtttttttatgtcaatcagcaaactgaaaaaaaaaaaagggtttcaaagtgcaaaaacaaaatctgatgttcataatatatttaaatatttaccaaaaatttgagaacacagggctgggcgcagtggctcacacctataatcccagtacattggtaggcaaggtgggcagatcacctgaggtcaggagttcaagaccagcctggacaacatggtgaaaccctgtctctactaaataatacaaaaattagccaggcgtgctggcgggcacctgtaatcccagctactcgggaggctgaggcagggagaattgcttgcaccagggaggtagaggttgcagtgagccaagatcgcaccactgcactccagccggggcaacagagcaagactccatctcaaaaaaaaaaaaaaaaaaagaaagaaaagaaaatttgagaacacagctttatactcgggactacaaaaccataaactcctggagttttaactccttttgaaattttcatagtacaattaatactaatgaacatttgtgtaaagctttataatttaaaggcaatttctcatatattcttttctgaatcatttgcaaggaagttcagagtccagtctgtaactagcatctactatatgtctgtcttcaccttacagtgttctaccattattttttctttattccatttcaaaatctaatttattttaccccaacttctccccaccacttgacgtagttttagaacacacaggtgttgctacatatttggagtcaatgatggactctggcaaagtcaaggctctgttttatttccaccaaggtgcacttttccaacaactatttaactagttaagaacctccctatcttagaactgtatctactttatatttaagaaggttttatgaattcaacaacggtatcatggccttgtatcaagttgaaaaacaactgaaaataagaaaatttcacagcctcgaaagacaacaacaagtttctaggatatctcaatgacaagagtgatggatacttaggtagggaaacgctaatgcaggaaaaactggcaacaacacaatttatatcaattctctttgtaggcaggtgataaaaaattcaaggacaaatctcattatgtcattgtgcatcatatataatctcttatgagcgagaatggggggaatttgtgtttttactttacacttcaattccttacacggtatttcaaacaaacagttttgctgagaggagcttttgtctctccttaagaaaatgtttataaagctgaaaggaaatcaaacagtaatcttaaaaatgaaaacaaaacaacccaacaacctagataactacagtgatcagggagcacagttcaactccttgttatgttttagtcatatggcctactcaaacagctaaataacaacaccagtggcagataaaaatcaccatttatctttcagctattaatcttttgaatgaataaactgtgacaaacaaattaacatttttgaacatgaaaggcaacttctgcacaatcctgtatccaagcaaactttaaattatccacttaattattacttaatcttaaaaaaaattagaacccagaacttttcaatgaagcatttgaaagttgaagtggaatttaggaaagccataaaaatataaatactgttatcacagcaccagcaagccataatctttatacctatcagttctatttctattaacagtaaaaacattaagcaagatataagactacctgcccaagaattcagtcttttttcatttttgtttttctcagttctgaggatgttaatcgtcaaattttctttggactgcattcctcactactttttgcacaatggtctcacgttctcacatttgttctcgcgaataaattgataaaaggtgttaagttctgtgaatgtctttttaattatgggcataattgtgcttgactggataaaaacttaagtccacccttatgtttataataatttcttgagaacagcaaactgcatttaccatcgtaaaacaacatctgacttacgggagctgcagggaagtggtgagacagttcgaacggctcctcagaaatccagtgacccaattctaaagaccatagcacctgcaagtgacacaacaagcagatttattatacatttattagccttagcaggcaataaaccaagaatcactttgaagacacagcaaaaagtgatacactccgcagatctgaaatagatgtgttctcagacaacaaagtcccttcagaatcttcatgttgcataaatgttatgaatattaataaaaagttgattgagaaaaa

SEQ ID NO: 107227 - DNA, 1466 bp, Homo sapiens
  Payload ID: 1047
  Gene Symbol: ANGPT2
  Gene Name: angiopoietin 2
  Uniprot ID: O15123
  ENST ID: ENST00000338312
  CDS Start-End: 111-1445
ccagccatggcagcgtagcagccctgcgttttagacggcagcagctcgggactctggacgtgtgtttgccctcaagtttgctaagctgctggtttattactgaagaaagaatgtggcagattgttttctttactctgagctgtgatcttgtcttggccgcagcctataacaactttcggaagagcatggacagcataggaaagaagcaatatcaggtccagcatgggtcctgcagctacactttcctcctgccagagatggacaactgccgctcttcctccagcccctacgtgtccaatgctgtgcagagggacgcgccgctcgaatacgatgactcggtgcagaggctgcaagtgctggagaacatcatggaaaacaacactcagtggctaatgaaggtattaaatcagaccacgagacttgaacttcagctcttggaacactccctctcgacaaacaaattggaaaaacagattttggaccagaccagtgaaataaacaaattgcaagataagaacagtttcctagaaaagaaggtgctagctatggaagacaagcacatcatccaactacagtcaataaaagaagagaaagatcagctacaggtgttagtatccaagcaaaattccatcattgaagaactagaaaaaaaaatagtgactgccacggtgaataattcagttcttcagaagcagcaacatgatctcatggagacagttaataacttactgactatgatgtccacatcaaactcagctaaggaccccactgttgctaaagaagaacaaatcagcttcagagactgtgctgaagtattcaaatcaggacacaccacgaatggcatctacacgttaacattccctaattctacagaagagatcaaggcctactgtgacatggaagctggaggaggcgggtggacaattattcagcgacgtgaggatggcagcgttgattttcagaggacttggaaagaatataaagtgggatttggtaacccttcaggagaatattggctgggaaatgagtttgtttcgcaactgactaatcagcaacgctatgtgcttaaaatacaccttaaagactgggaagggaatgaggcttactcattgtatgaacatttctatctctcaagtgaagaactcaattataggattcaccttaaaggacttacagggacagccggcaaaataagcagcatcagccaaccaggaaatgattttagcacaaaggatggagacaacgacaaatgtatttgcaaatgttcacaaatgctaacaggaggctggtggtttgatgcatgtggtccttccaacttgaacggaatgtactatccacagaggcagaacacaaataagttcaacggcattaaatggtactactggaaaggctcaggctattcgctcaaggccacaaccatgatgatccgaccagcagatttctaaacatcccagtccacctgagga

SEQ ID NO: 107228 - DNA, 2997 bp, Homo sapiens
  Payload ID: 1047
  Gene Symbol: ANGPT2
  Gene Name: angiopoietin 2
  ENST ID: ENST00000523120
  CDS Start-End: 312-1691
actgacactgtaggatctggggagagaggaacaaaggaccgtgaaagctgctctgtaaaagctgacacagccctcccaagtgagcaggactgttcttcccactgcaatctgacagtttactgcatgcctggagagaacacagcagtaaaaaccaggtttgctactggaaaaagaggaaagagaagactttcattgacggacccagccatggcagcgtagcagccctgcgttttagacggcagcagctcgggactctggacgtgtgtttgccctcaagtttgctaagctgctggtttattactgaagaaagaatgtggcagattgttttctttactctgagctgtgatcttgtcttggccgcagcctataacaactttcggaagagcatggacagcataggaaagaagcaatatcaggtccagcatgggtcctgcagctacactttcctcctgccagagatggacaactgccgctcttcctccagcccctacgtgtccaatgctgtgcagagggacgcgccgctcgaatacgatgactcggtgcagaggctgcaagtgctggagaacatcatggaaaacaacactcagtggctaatgaagcttgagaattatatccaggacaacatgaagaaagaaatggtagagatacagcagaatgcagtacagaaccagacggctgtgatgatagaaatagggacaaacctgttgaaccaaacagcggagcaaacgcggaagttaactgatgtggaagcccaagtattaaatcagaccacgagacttgaacttcagctcttggaacactccctctcgacaaacaaattggaaaaacagattttggaccagaccagtgaaataaacaaattgcaagataagaacagtttcctagaaaagaaggtgctagctatggaagacaagcacatcatccaactacagtcaataaaagaagagaaagatcagctacaggtgttagtatccaagcaaaattccatcattgaagaactagaaaaaaaaatagtgactgccacggtgaataattcagttcttcagaagcagcaacatgatctcatggagacagttaataacttactgactatgatgtccacatcaaactctaaggaccccactgttgctaaagaagaacaaatcagcttcagagactgtgctgaagtattcaaatcaggacacaccacgaatggcatctacacgttaacattccctaattctacagaagagatcaaggcctactgtgacatggaagctggaggaggcgggtggacaattattcagcgacgtgaggatggcagcgttgattttcagaggacttggaaagaatataaagtgggatttggtaacccttcaggagaatattggctgggaaatgagtttgtttcgcaactgactaatcagcaacgctatgtgcttaaaatacaccttaaagactgggaagggaatgaggcttactcattgtatgaacatttctatctctcaagtgaagaactcaattataggattcaccttaaaggacttacagggacagccggcaaaataagcagcatcagccaaccaggaaatgattttagcacaaaggatggagacaacgacaaatgtatttgcaaatgttcacaaatgctaacaggaggtagggatgactttctgtcttcctatttgtattggcaaggaatgatttcatagagggaaaggctggcaatttggactacaaattgtgatttgtaacgatgtccacaatttcatacgtagacacactagcttgatataggtaaatgtgtttttcactttttttagactaagttttaagtgagaatatgatatggagctagacttgtcagcaagccaactgtgtctcctcaggacctagccctggcaaggagaggggatatttgattcttagcaagctctcctgcgtttgtgcttgctggatactagagagatggtttaattacattttgctttatgtaaaaagttaaaaattccaagtagcaaccacaacagtaatatagattatagaaatatttccaactaataatttaatgttcaaagaaggaatttccagctgtcatttattatttatttatttacagacacagtctccagttgtttatttatttattttgagacagagtcttactttgttgtccagaagggagtgtgatcgcagctcactgcaacccctgcctcccaggctcaagcgattctcctgcctcagcctccccagtgctgggattataggcgcccaccagtgcacccggctaattttgtatttttagtagagggagggtttcaccatgtttgccaggctggtctcgaactgctgacctcaagtgatctgcccgccgcagcctccagaagtgttgagattacaggtgtgagccaccacacccggccccagctgtctttttaaaaaagattccattaatatatagcaacacctataaacacaaatgagttaatccaccttttttagtaaatcaaattaaaatgagtcatcttctactttgagacctttcttgtattgtaggtttggtattacactgccataaaacagacaatgaaaaccacactcataagccaaaaaccattgtagtagtcacttaaaacagatgggttggtattcagaaacatttgagagttcaaacataggaataaagttttagaaaatgttatttttctggccgggcccggtggctcacgcctgtaatgccagcactttgggaggccaaggagggcggatcacctgaagttaggagttcaagaccagcctggccaacatgttgaaaccccatctctactaaaaatacaaaaattacctgggcatggtggctggcacctgtaatcccagctactcctactcaggaggctcaggcaggagaatggcttgaacctgggaggcagaggttgcagtaacccaagatcgtgccactgcactccagcctgggggacagagcaagaattcactcaaaaaaaaaaaaaaaaaaaaaaa

SEQ ID NO: 107229 - DNA, 2602 bp, Homo sapiens
  Payload ID: 1047
  Gene Symbol: ANGPT2
  Gene Name: angiopoietin 2
  Uniprot ID: O15123
  ENST ID: ENST00000629816
  CDS Start-End: 312-1799
actgacactgtaggatctggggagagaggaacaaaggaccgtgaaagctgctctgtaaaagctgacacagccctcccaagtgagcaggactgttcttcccactgcaatctgacagtttactgcatgcctggagagaacacagcagtaaaaaccaggtttgctactggaaaaagaggaaagagaagactttcattgacggacccagccatggcagcgtagcagccctgcgttttagacggcagcagctcgggactctggacgtgtgtttgccctcaagtttgctaagctgctggtttattactgaagaaagaatgtggcagattgttttctttactctgagctgtgatcttgtcttggccgcagcctataacaactttcggaagagcatggacagcataggaaagaagcaatatcaggtccagcatgggtcctgcagctacactttcctcctgccagagatggacaactgccgctcttcctccagcccctacgtgtccaatgctgtgcagagggacgcgccgctcgaatacgatgactcggtgcagaggctgcaagtgctggagaacatcatggaaaacaacactcagtggctaatgaagcttgagaattatatccaggacaacatgaagaaagaaatggtagagatacagcagaatgcagtacagaaccagacggctgtgatgatagaaatagggacaaacctgttgaaccaaacagcggagcaaacgcggaagttaactgatgtggaagcccaagtattaaatcagaccacgagacttgaacttcagctcttggaacactccctctcgacaaacaaattggaaaaacagattttggaccagaccagtgaaataaacaaattgcaagataagaacagtttcctagaaaagaaggtgctagctatggaagacaagcacatcatccaactacagtcaataaaagaagagaaagatcagctacaggtgttagtatccaagcaaaattccatcattgaagaactagaaaaaaaaatagtgactgccacggtgaataattcagttcttcagaagcagcaacatgatctcatggagacagttaataacttactgactatgatgtccacatcaaactctaaggaccccactgttgctaaagaagaacaaatcagcttcagagactgtgctgaagtattcaaatcaggacacaccacgaatggcatctacacgttaacattccctaattctacagaagagatcaaggcctactgtgacatggaagctggaggaggcgggtggacaattattcagcgacgtgaggatggcagcgttgattttcagaggacttggaaagaatataaagtgggatttggtaacccttcaggagaatattggctgggaaatgagtttgtttcgcaactgactaatcagcaacgctatgtgcttaaaatacaccttaaagactgggaagggaatgaggcttactcattgtatgaacatttctatctctcaagtgaagaactcaattataggattcaccttaaaggacttacagggacagccggcaaaataagcagcatcagccaaccaggaaatgattttagcacaaaggatggagacaacgacaaatgtatttgcaaatgttcacaaatgctaacaggaggctggtggtttgatgcatgtggtccttccaacttgaacggaatgtactatccacagaggcagaacacaaataagttcaacggcattaaatggtactactggaaaggctcaggctattcgctcaaggccacaaccatgatgatccgaccagcagatttctaaacatcccagtccacctgaggaactgtctcgaactattttcaaagacttaagcccagtgcactgaaagtcacggctgcgcactgtgtcctcttccaccacagagggcgtgtgctcggtgctgacgggacccacatgctccagattagagcctgtaaactttatcacttaaacttgcatcacttaacggaccaaagcaagaccctaaacatccataattgtgattagacagaacacctatgcaaagatgaacccgaggctgagaatcagactgacagtttacagacgctgctgtcacaaccaagaatgttatgtgcaagtttatcagtaaataactggaaaacagaacacttatgttatacaatacagatcatcttggaactgcattcttctgagcactgtttatacactgtgtaaatacccatatgtcctgaattcaccatcactatcacaattaaaaggaagaaaaaaactctctaagccataaaaagacatattcagggatattctgagaaggggttactagaagtttaatatttggaaaaacagttagtgcatttttactccatctcttaggtgctttaaatttttatttcaaaaacagcgtatttacatttatgttgacagcttagttataagttaatgctcaaatacgtatttcaaatttatatggtagaaacttccagaatctctgaaattatcaacagaaacgtgccattttagtttatatgcagaccgtactatttttttctgcctgattgttaaatatgaaggtatttttagtaattaaatataacttattaggg

SEQ ID NO: 107230 - DNA, 4676 bp, Homo sapiens
  Payload ID: 1048
  Gene Symbol: ANGPT4
  Gene Name: angiopoietin 4
  Uniprot ID: Q9Y264
  ENST ID: ENST00000381922
  CDS Start-End: 104-1615
tgcagctgcaggcaagcctggccactgttggctgcagcaggacatcccaggcacagcccctagggctctgagcagacatccctcgccattgacacatcttcagatgctctcccagctagccatgctgcagggcagcctcctccttgtggttgccaccatgtctgtggctcaacagacaaggcaggaggcggataggggctgcgagacacttgtagtccagcacggccactgtagctacaccttcttgctgcccaagtctgagccctgccctccggggcctgaggtctccagggactccaacaccctccagagagaatcactggccaacccactgcacctggggaagttgcccacccagcaggtgaaacagctggagcaggcactgcagaacaacacgcagtggctgaagaagctagagagggccatcaagacgatcttgaggtcgaagctggagcaggtccagcagcaaatggcccagaatcagacggcccccatgctagagctgggcaccagcctcctgaaccagaccactgcccagatccgcaagctgaccgacatggaggctcagctcctgaaccagacatcaagaatggatgcccagatgccagagacctttctgtccaccaacaagctggagaaccagctgctgctacagaggcagaagctccagcagcttcagggccaaaacagcgcgctcgagaagcggttgcaggccctggagaccaagcagcaggaggagctggccagcatcctcagcaagaaggcgaagctgctgaacacgctgagccgccagagcgccgccctcaccaacatcgagcgcggcctgcgcggtgtcaggcacaactccagcctcctgcaggaccagcagcacagcctgcgccagctgctggtgttgttgcggcacctggtgcaagaaagggctaacgcctcggccccggccttcataatggcaggtgagcaggtgttccaggactgtgcagagatccagcgctctggggccagtgccagtggtgtctacaccatccaggtgtccaatgcaacgaagcccaggaaggtgttctgtgacctgcagagcagtggaggcaggtggaccctcatccagcgccgtgagaatggcaccgtgaattttcagcggaactggaaggattacaaacagggcttcggagacccagctggggagcactggctgggcaatgaagtggtgcaccagctcaccagaagggcagcctactctctgcgtgtggagctgcaagactgggaaggccacgaggcctatgcccagtacgaacatttccacctgggcagtgagaaccagctatacaggctttctgtggtcgggtacagcggctcagcagggcgccagagcagcctggtcctgcagaacaccagctttagcacccttgactcagacaacgaccactgtctctgcaagtgtgcccaagtgatgtctggagggtggtggtttgacgcctgtggcctgtcaaacctcaacggcgtctactaccacgctcccgacaacaagtacaagatggacggcatccgctggcactacttcaagggccccagctactcactgcgtgcctctcgcatgatgatacggcctttggacatctaacgagcagctgtgccagaggctggaccacacaggagaagctcggacttggcactcctggacaacctggacccagatgcaagacactgtgccaccgccttccctgacaccctgggcttcctgagccagccctccttgacccagaagtccagaagggtcatctgccccccaactcccctccgtctgtgacatggagggtgttcggggcccatccctctgatgtagtcctcgcccctcttctctccctcccccttcaggggctccctgcctgagggtcacagtaccttgaatgggctgagaacagaccaaacttgattcccatgaccaatggtggggttgcaggcaggtgggaatgtatttgcacatcggaagctgcccagatggcccaggttctctcccttggattggcaagaaggccatctcccattctaagctcctgttccaagattttctagtcttgagatgtccttgaactttcttttcaagtctgaaggggctgcatccaccccttagtgggtgggttaatcattatttccccttcacacttcaccacttctaggttctaatgaccctagatctcagggtctttagacttcaccacttctaggctttaccacttcaccacttctaggctccaatgtttggagctcagggtctttaggagacccaaaaggacatgctccttcacctccagcatgtcctagaggatgtgtcacagggaataactatggcttgtctctaaaagtacctatgagcaatgagaaaaggaaacagcaggttaagtcaaagtgaacaggcactcttcactgcaggactgatcagagcctttaatatggccaagtgccttgtgactacccatgaaggggctagagtgggcagctttctccaaatttacttatttgaaaatgggctcggtttgtcccagagcatctcacaggactgtagatgctcttggacaaagctagtgctcccctggcataaggaggagccctacgaccccatccccaccccagctatactcaccctttttggctacaagggccacagtgacagcctcaaacaacctctaaaaacaactggaaataacctttcagttaaaacagataccatccctgaagaagggtctagaactaggtccctgtctgtgttataggctcatgtcctccaaggctccttcaagtcccaggaagctgatctctacctgggtggcttcccttaggactccctgtaacctcaactcccccaggctcaattacagggactgttaggcaggacatctgtctccaagtccagatcctctctgcctccaagccctaacccctagcctccctcccttccccatccagcagtgatgctgcctctgtggtggtaggtggggagctgcaggggaggagataaggcctctgcctgagtttgggagaccagggccctcatagcttctttcagaggatggagtcagaaaggatccacagctactctgtcacctgcccccatcactgtgtcatgctgtctgccctgttgtcatcagccaacacccaggcatagccaggagcccacctgccctaccgccaggatacacctctgtcctcagaaggttttctcctggatgagactgagccaatgggaatgggaccccttcatccccctggctcgccccagccctgagtcccactctcagccgatccctgagtaaacccagcacagactgactttgatctcattcctgggaattagcactcttccccttcaagactcaaaggacatggttgctaatggtggcatttcaggcatgatgggaaatctttaggggcagattgctgcccagagagctcaaatcgccttaagcagcatttgcccagcagacctttatttagcctctactgtgtgcagtgtggtgtggtgggcagggctttggagtcggacaaacctgctccagctctgacactttggtccagtggctcagcctctcaaggcaccagttatcttcacatcatcaaagcctcagttttcccatctgtaaaatggagatgataatattccttcctggctgggctatggcaaggaggaaatgagaccatgtatgtcatcttcttaatagagcctggcatgaagcaggtgcctaataaatgtttgtcctcaaagaggagaatggggtgaggaaggcattccccagcacatgccgccccttctcctgcactcaggtgaggaaaaggcattttatttttgtatccacatcatttatttttctattgtagtttctaggctgactgcaagctagagaggagacagggcaaagctgtgaggcccagggacagaactcctctgggtgggttgaaggcccaagtccctctctactcccattttataagggggcaggaagctgatttgagttatcctcagacacctgttctttatgtaattttattttatttttttgagacagagtctcactctgtcacccaggctggagtgcagtggcatgatctcagatcactgcaatctctgcctcctggttcaagtgattctcctacctcagcctcctgagtaatgggattacagacgcctaccaccacgcccggaaaacttttgtatttttagtagaaacgggttttcaccatgttggccaggctggtctcaaactcctggcctcatgtgatccacctgcctcagcctcccaaagtgctgggattacaggcatgagccaccatacccagcctcagacacctgttcttaaatattcatccttctttcttaccttccttcctcttccatgccaggactcaggtataagggatagaaattctagccctaaggaataaattgactcacataactggaaagtctaagggtaaaggcaagtgaggttagatccagaggctcaaatgatgtcagctccacctctcagcccctccatctgccccgttgacttcattctcagccaggatctttcctcacaagaaggctctggcagccccaggctcatgtcctcccagctcagcatccctgacccggggagctccctcgtctccatgattccagtaaaggaatgattttctgcagccag

SEQ ID NO: 107231 - DNA, 3348 bp, Homo sapiens
  Payload ID: 1049
  Gene Symbol: ANGPTL1
  Gene Name: angiopoietin-like 1
  Uniprot ID: O95841
  ENST ID: ENST00000234816
  CDS Start-End: 449-1924
gcagctggttactgcatttctccatgtggcagacagagcaaagccacaacgctttctctgctggattaaagacggcccacagaccagaacttccactatactacttaaaattacataggtggcttgtcaaattcaattgattagtattgtaaaaggaaaaagaagttccttcttacagcttggattcaacggtccaaaacaaaaatgcagctgccattaaagtcacagatgaacaaacttctacactgatttttaaaatcaagaataagggcagcaagtttctggattcactgaatcaacagacacaaaaagctggcaatatagcaactatgaagagaaaagctactaataaaattaacccaacgcatagaagacttttttttctcttctaaaaacaactaagtaaagacttaaatttaaacacatcattttacaacctcatttcaaaatgaagacttttacctggaccctaggtgtgctattcttcctactagtggacactggacattgcagaggtggacaattcaaaattaaaaaaataaaccagagaagataccctcgtgccacagatggtaaagaggaagcaaagaaatgtgcatacacattcctggtacctgaacaaagaataacagggccaatctgtgtcaacaccaaggggcaagatgcaagtaccattaaagacatgatcaccaggatggaccttgaaaacctgaaggatgtgctctccaggcagaagcgggagatagatgttctgcaactggtggtggatgtagatggaaacattgtgaatgaggtaaagctgctgagaaaggaaagccgtaacatgaactctcgtgttactcaactctatatgcaattattacatgagattatccgtaagagggataattcacttgaactttcccaactggaaaacaaaatcctcaatgtcaccacagaaatgttgaagatggcaacaagatacagggaactagaggtgaaatacgcttccttgactgatcttgtcaataaccaatctgtgatgatcactttgttggaagaacagtgcttgaggatattttcccgacaagacacccatgtgtctcccccacttgtccaggtggtgccacaacatattcctaacagccaacagtatactcctggtctgctgggaggtaacgagattcagagggatccaggttatcccagagatttaatgccaccacctgatctggcaacttctcccaccaaaagccctttcaagataccaccggtaactttcatcaatgaaggaccattcaaagactgtcagcaagcaaaagaagctgggcattcggtcagtgggatttatatgattaaacctgaaaacagcaatggaccaatgcagttatggtgtgaaaacagtttggaccctgggggttggactgttattcagaaaagaacagacggctctgtcaacttcttcagaaattgggaaaattataagaaagggtttggaaacattgacggagaatactggcttggactggaaaatatctatatgcttagcaatcaagataattacaagttattgattgaattagaagactggagtgataaaaaagtctatgcagaatacagcagctttcgtctggaacctgaaagtgaattctatagactgcgcctgggaacttaccagggaaatgcaggggattctatgatgtggcataatggtaaacaattcaccacactggacagagataaagatatgtatgcaggaaactgcgcccactttcataaaggaggctggtggtacaatgcctgtgcacattctaacctaaatggagtatggtacagaggaggccattacagaagcaagcaccaagatggaattttctgggccgaatacagaggcgggtcatactccttaagagcagttcagatgatgatcaagcctattgactgaagagagacactcgccaatttaaatgacacagaactttgtacttttcagctcttaaaaatgtaaatgttacatgtatattacttggcacaatttatttctacacagaaagtttttaaaatgaattttaccgtaactataaaagggaacctataaatgtagtttcatctgtcgtcaattactgcagaaaattatgtgtatccacaacctagttattttaaaaattatgttgactaaatacaaagtttgttttctaaaatgtaaatatttgccacaatgtaaagcaaatcttagctatattttaaatcataaataacatgttcaagatacttaacaatttatttaaaatctaagattgctctaacgtctagtgaaaaaaatatttttaaaatttcagccaaataatgcattttatttataaaaatacagacagaaaattagggagaaacctctagttttgccaatagaaaatgcttcttccattgaataaaagttatttcaaattgaatttgtgcctttcacacgtaatgattaaatctgaattcttaataatatatcctatgctgattttcccaaaacatgacccatagtattaaatacatatcatttttaaaaataaaaaaaaacccaaaaataatgcatgcataatttaaatggtcaatttataaagacaaatctatgaatgaatttttcagtgttatcttcatatgatatgctgaacaccaaaatctccagaaatgcattttatgtagttctaaaatcagcaaaatattggtattacaaaaatgcagaatatttagtgtgctacagatctgaattatagttctaatttattattactttttttctaatttactgatcttactactacaaagaaaaaaaaacccaaccaatctgcaattcaaatcagaaagtttggacagctttacaagtattagtgcatgctcagaacaggtgggactaaaacaaactcaaggaactgttggctgttttcccgatactgagaattcaacagctccagagcagaagccacaggggcatagcttagtccaaactgctaatttcattttacagtgtatgtaacgcttagtctcacagtgtctttaactcatctttgcaatcaacaactttactagtgactttctggaacaatttcctttcaggaatacatattcactgcttagaggtgaccttgccttaatatatttgtgaagttaaaattttaaagatagctcatgaaacttttgcttaagcaaaaagaaaacctcgaattgaaatgtgtgaggcaaactatgcatgggaatagcttaatgtgaagataatcatttggacaactcaaatccatcaacatgaccaatgtttttcatctgccacatctcaaaataaaacttctggtgaaacaaattaaacaaaatatccaaacctca

SEQ ID NO: 107232 - DNA, 2289 bp, Homo sapiens
  Payload ID: 1049
  Gene Symbol: ANGPTL1
  Gene Name: angiopoietin-like 1
  Uniprot ID: O95841
  ENST ID: ENST00000367629
  CDS Start-End: 309-1784
agacagagcaaagccacaacgctttctctgctggattaaagacggcccacagaccagaacttccactatactacttaaaattacataggtggcttgtcaaattcaattgattagtattgtaaaaggaaaaagaagttccttcttacagcttggattcaacggtccaaaacaaaaatgcagctgccattaaagtcacagatgaacaaacttctacactgatttttaaaatcaagaataagggcagcaagtttctggattcactgaatcaacagacacaaaaagacatcattttacaacctcatttcaaaatgaagacttttacctggaccctaggtgtgctattcttcctactagtggacactggacattgcagaggtggacaattcaaaattaaaaaaataaaccagagaagataccctcgtgccacagatggtaaagaggaagcaaagaaatgtgcatacacattcctggtacctgaacaaagaataacagggccaatctgtgtcaacaccaaggggcaagatgcaagtaccattaaagacatgatcaccaggatggaccttgaaaacctgaaggatgtgctctccaggcagaagcgggagatagatgttctgcaactggtggtggatgtagatggaaacattgtgaatgaggtaaagctgctgagaaaggaaagccgtaacatgaactctcgtgttactcaactctatatgcaattattacatgagattatccgtaagagggataattcacttgaactttcccaactggaaaacaaaatcctcaatgtcaccacagaaatgttgaagatggcaacaagatacagggaactagaggtgaaatacgcttccttgactgatcttgtcaataaccaatctgtgatgatcactttgttggaagaacagtgcttgaggatattttcccgacaagacacccatgtgtctcccccacttgtccaggtggtgccacaacatattcctaacagccaacagtatactcctggtctgctgggaggtaacgagattcagagggatccaggttatcccagagatttaatgccaccacctgatctggcaacttctcccaccaaaagccctttcaagataccaccggtaactttcatcaatgaaggaccattcaaagactgtcagcaagcaaaagaagctgggcattcggtcagtgggatttatatgattaaacctgaaaacagcaatggaccaatgcagttatggtgtgaaaacagtttggaccctgggggttggactgttattcagaaaagaacagacggctctgtcaacttcttcagaaattgggaaaattataagaaagggtttggaaacattgacggagaatactggcttggactggaaaatatctatatgcttagcaatcaagataattacaagttattgattgaattagaagactggagtgataaaaaagtctatgcagaatacagcagctttcgtctggaacctgaaagtgaattctatagactgcgcctgggaacttaccagggaaatgcaggggattctatgatgtggcataatggtaaacaattcaccacactggacagagataaagatatgtatgcaggaaactgcgcccactttcataaaggaggctggtggtacaatgcctgtgcacattctaacctaaatggagtatggtacagaggaggccattacagaagcaagcaccaagatggaattttctgggccgaatacagaggcgggtcatactccttaagagcagttcagatgatgatcaagcctattgactgaagagagacactcgccaatttaaatgacacagaactttgtacttttcagctcttaaaaatgtaaatgttacatgtatattacttggcacaatttatttctacacagaaagtttttaaaatgaattttaccgtaactataaaagggaacctataaatgtagtttcatctgtcgtcaattactgcagaaaattatgtgtatccacaacctagttattttaaaaattatgttgactaaatacaaagtttgttttctaaaatgtaaatatttgccacaatgtaaagcaaatcttagctatattttaaatcataaataacatgttcaagatacttaacaatttatttaaaatctaagattgctctaacgtctagtgaaaaaaatatttttaaaatttcagccaaataatgcattttatttataaaaatacagacagaaaattagggagaaacctctagttttgccaatagaaaatgcttcttccattgaataaaagttatttcaaattgaa

SEQ ID NO: 107233 - DNA, 534 bp, Homo sapiens
  Payload ID: 1049
  Gene Symbol: ANGPTL1
  Gene Name: angiopoietin-like 1
  ENST ID: ENST00000444255
  CDS Start-End: 192-534
gagtttaccatctgaaaggaggcaaatcctgactttcgtttcttctctctactagctggcaatatagcaactatgaagagaaaagctactaataaaattaacccaacgcatagaagacttttttttctcttctaaaaacaactaagtaaagacttaaatttaaacacatcattttacaacctcatttcaaaatgaagacttttacctggaccctaggtgtgctattcttcctactagtggacactggacattgcagaggtggacaattcaaaattaaaaaaataaaccagagaagataccctcgtgccacagatggtaaagaggaagcaaagaaatgtgcatacacattcctggtacctgaacaaagaataacagggccaatctgtgtcaacaccaaggggcaagatgcaagtaccattaaagacatgatcaccaggatggaccttgaaaacctgaaggatgtgctctccaggcagaagcgggagatagatgttctgcaactggtggtggatgtagatggaaacattgtgaatg

SEQ ID NO: 107234 - DNA, 2575 bp, Homo sapiens
  Payload ID: 1050
  Gene Symbol: ANGPTL2
  Gene Name: angiopoietin-like 2
  Uniprot ID: Q9UKU9
  ENST ID: ENST00000373417
  CDS Start-End: 410-985
aaatgaggctgctgcggacggcctgaggatggaccccaagccctggacctgccgagcgtggcactgaggcagcggctgacgctactgtgagggaaagaaggttgtgagcagccccgcaggacccctggccagccctggccccagcctctgccggagccctctgtggaggcagagccagtggagcccagtgaggcagggctgcttggcagccaccggcctgcaactcaggaacccctccagaggccatggacaggctgccccgctgacggccagggtgaagcatgtgaggagccgccccggagccaagcaggagggaagaggcccatggagagactgcctgcaggccctggaggatggccacgacaccagctccatctacctggtgaagccggagaacaccaaccgcctcatgcaggtgtggtgcgaccagagacacgaccccgggggctggaccgtcatccagagacgcctggatggctctgttaacttcttcaggaactgggagacgtacaagcaagggtttgggaacattgacggcgaatactggctgggcctggagaacatttactggctgacgaaccaaggcaactacaaactcctggtgaccatggaggactggtccggccgcaaagtctttgcagaatacgccagtttccgcctggaacctgagagcgagtattataagctgcggctggggcgctaccatggcaatgcgggtgactcctttacatggcacaacggcaagcagttcaccaccctggacagagatcatgatgtctacacaggaaactgtgcccactaccagaagggaggctggtggtataacgcctgtgcccactccaacctcaacggggtctggtaccgcgggggccattaccggagccgctaccaggacggagtctactgggctgagttccgaggaggctcttactcactcaagaaagtggtgatgatgatccgaccgaaccccaacaccttccactaagccagctccccctcctgacctctcgtggccattgccaggagcccaccctggtcacgctggccacagcacaaagaacaactcctcaccagttcatcctgaggctgggaggaccgggatgctggattctgttttccgaagtcactgcagcggatgatggaactgaatcgatacggtgttttctgtccctcctactttccttcacaccagacagcccctcatgtctccaggacaggacaggactacagacaactctttctttaaataaattaagtctctacaataaaaacacaactgcaaagtaccttcataatatacatgtgtatgagcctcccttgtgcacgtatgtgtataccacatatatatgcatttagatatacatcacatgtgatatatctagatccatatataggtttgccttagatacctaaatacacatatattcagttctcagatgttgaagctgtcaccagcagctttgctcttaggagaaaagcatttcattagtgttgtattacttgagtctaagggtagatcacagactgtgtggtctcaactgaaaggatcacccttggcatctgtgtgcctggattcttccagaatgtctacaatgctaatctctcacatagaggttcccagcttcttaagaaccccttttggcacctaatcaaatttcaaaatccctccccccacattttcatacttttccccattctcaggacttttcaccatccatcacccacttatcccttcatttgacaccattcattaagtgccttctgtgtgtcagtccctggccactcactgcagttcaaggccccctttccgctctgctgtactcctcgcctacctactccttgccttttctgtcgcacagccccttctttccaggcgagattcctcagcttctgagtaggaaacactccgggctccaggtttctggttgggaagggaaggccaggccaaaagctccaccggccgtatagataatgtactcgcagttttgtatcttccattcatactttaacctacaggtcatttgagtcttcacacaaataataacctatctggccaggagaattatctcagaacagaagtcatcagatcatcagagcccccagatggctacagaccagagattccacgctctcaggctgactagagtccgcatctcatctccaaactacacttccctggagaacaagtgccacaaaaatgaaaacaggccacttctcaggagttgaataatcaggggtcaccggaccccttggttgatgcactgcagcatggtggctttctgagtcctgttggccaccaagtgtcagcctcagcactcccgggactattgccaagaaggggcaagggatgagtcaagaaggtgagacccttcccggtgggcacgtgggccaggctgtgtgagatgttggatgtttggtactgtccatgtctgggtgtgtgcctattacctcagcatttctcacaaagtgtaccatgtagcatgttttgtgtatataaaagggagggtttttttaaaaatatattcccagattatccttgtaatgacacgaatctgcaataaaagccatcagtgct

SEQ ID NO: 107235 - DNA, 3707 bp, Homo sapiens
  Payload ID: 1050
  Gene Symbol: ANGPTL2
  Gene Name: angiopoietin-like 2
  Uniprot ID: Q9UKU9
  ENST ID: ENST00000373425
  CDS Start-End: 619-2100
ggggcctgccgaggccgccaaagcgggctgggcgggaggggccaggccagctggggccggagctcgtgtgacatcaccgggcggcccgcctctgtctggggctgaggggaggcccggagcctttctggggcctgggggatcctcttgcactggtgggtggagagaagcgcctgcagccaaccagggtcaggctgtgctcacagtttcctctggcggcatgtaaaggctccacaaaggagttgggagttcaaatgaggctgctgcggacggcctgaggatggaccccaagccctggacctgccgagcgtggcactgaggcagcggctgacgctactgtgagggaaagaaggttgtgagcagccccgcaggacccctggccagccctggccccagcctctgccggagccctctgtggaggcagagccagtggagcccagtgaggcagggctgcttggcagccaccggcctgcaactcaggaacccctccagaggccatggacaggctgccccgctgacggccagggtgaagcatgtgaggagccgccccggagccaagcaggagggaagaggctttcatagattctattcacaaagaataaccaccattttgcaaggaccatgaggccactgtgcgtgacatgctggtggctcggactgctggctgccatgggagctgttgcaggccaggaggacggttttgagggcactgaggagggctcgccaagagagttcatttacctaaacaggtacaagcgggcgggcgagtcccaggacaagtgcacctacaccttcattgtgccccagcagcgggtcacgggtgccatctgcgtcaactccaaggagcctgaggtgcttctggagaaccgagtgcataagcaggagctagagctgctcaacaatgagctgctcaagcagaagcggcagatcgagacgctgcagcagctggtggaggtggacggcggcattgtgagcgaggtgaagctgctgcgcaaggagagccgcaacatgaactcgcgggtcacgcagctctacatgcagctcctgcacgagatcatccgcaagcgggacaacgcgttggagctctcccagctggagaacaggatcctgaaccagacagccgacatgctgcagctggccagcaagtacaaggacctggagcacaagtaccagcacctggccacactggcccacaaccaatcagagatcatcgcgcagcttgaggagcactgccagagggtgccctcggccaggcccgtcccccagccaccccccgctgccccgccccgggtctaccaaccacccacctacaaccgcatcatcaaccagatctctaccaacgagatccagagtgaccagaacctgaaggtgctgccaccccctctgcccactatgcccactctcaccagcctcccatcttccaccgacaagccgtcgggcccatggagagactgcctgcaggccctggaggatggccacgacaccagctccatctacctggtgaagccggagaacaccaaccgcctcatgcaggtgtggtgcgaccagagacacgaccccgggggctggaccgtcatccagagacgcctggatggctctgttaacttcttcaggaactgggagacgtacaagcaagggtttgggaacattgacggcgaatactggctgggcctggagaacatttactggctgacgaaccaaggcaactacaaactcctggtgaccatggaggactggtccggccgcaaagtctttgcagaatacgccagtttccgcctggaacctgagagcgagtattataagctgcggctggggcgctaccatggcaatgcgggtgactcctttacatggcacaacggcaagcagttcaccaccctggacagagatcatgatgtctacacaggaaactgtgcccactaccagaagggaggctggtggtataacgcctgtgcccactccaacctcaacggggtctggtaccgcgggggccattaccggagccgctaccaggacggagtctactgggctgagttccgaggaggctcttactcactcaagaaagtggtgatgatgatccgaccgaaccccaacaccttccactaagccagctccccctcctgacctctcgtggccattgccaggagcccaccctggtcacgctggccacagcacaaagaacaactcctcaccagttcatcctgaggctgggaggaccgggatgctggattctgttttccgaagtcactgcagcggatgatggaactgaatcgatacggtgttttctgtccctcctactttccttcacaccagacagcccctcatgtctccaggacaggacaggactacagacaactctttctttaaataaattaagtctctacaataaaaacacaactgcaaagtaccttcataatatacatgtgtatgagcctcccttgtgcacgtatgtgtataccacatatatatgcatttagatatacatcacatgtgatatatctagatccatatataggtttgccttagatacctaaatacacatatattcagttctcagatgttgaagctgtcaccagcagctttgctcttaggagaaaagcatttcattagtgttgtattacttgagtctaagggtagatcacagactgtgtggtctcaactgaaaggatcacccttggcatctgtgtgcctggattcttccagaatgtctacaatgctaatctctcacatagaggttcccagcttcttaagaaccccttttggcacctaatcaaatttcaaaatccctccccccacattttcatacttttccccattctcaggacttttcaccatccatcacccacttatcccttcatttgacaccattcattaagtgccttctgtgtgtcagtccctggccactcactgcagttcaaggccccctttccgctctgctgtactcctcgcctacctactccttgccttttctgtcgcacagccccttctttccaggcgagattcctcagcttctgagtaggaaacactccgggctccaggtttctggttgggaagggaaggccaggccaaaagctccaccggccgtatagataatgtactcgcagttttgtatcttccattcatactttaacctacaggtcatttgagtcttcacacaaataataacctatctggccaggagaattatctcagaacagaagtcatcagatcatcagagcccccagatggctacagaccagagattccacgctctcaggctgactagagtccgcatctcatctccaaactacacttccctggagaacaagtgccacaaaaatgaaaacaggccacttctcaggagttgaataatcaggggtcaccggaccccttggttgatgcactgcagcatggtggctttctgagtcctgttggccaccaagtgtcagcctcagcactcccgggactattgccaagaaggggcaagggatgagtcaagaaggtgagacccttcccggtgggcacgtgggccaggctgtgtgagatgttggatgtttggtactgtccatgtctgggtgtgtgcctattacctcagcatttctcacaaagtgtaccatgtagcatgttttgtgtatataaaagggagggtttttttaaaaatatattcccagattatccttgtaatgacacgaatctgcaataaaagccatcagtgctatttggatgtatctaca

SEQ ID NO: 107236 - DNA, 2805 bp, Homo sapiens
  Payload ID: 1051
  Gene Symbol: ANGPTL3
  Gene Name: angiopoietin-like 3
  Uniprot ID: Q9Y5C1
  ENST ID: ENST00000371129
  CDS Start-End: 81-1463
atatatagagttaagaagtctaggtctgcttccagaagaaaacagttccacgttgcttgaaattgaaaatcaagataaaaatgttcacaattaagctccttctttttattgttcctctagttatttcctccagaattgatcaagacaattcatcatttgattctctatctccagagccaaaatcaagatttgctatgttagacgatgtaaaaattttagccaatggcctccttcagttgggacatggtcttaaagactttgtccataagacgaagggccaaattaatgacatatttcaaaaactcaacatatttgatcagtctttttatgatctatcgctgcaaaccagtgaaatcaaagaagaagaaaaggaactgagaagaactacatataaactacaagtcaaaaatgaagaggtaaagaatatgtcacttgaactcaactcaaaacttgaaagcctcctagaagaaaaaattctacttcaacaaaaagtgaaatatttagaagagcaactaactaacttaattcaaaatcaacctgaaactccagaacacccagaagtaacttcacttaaaacttttgtagaaaaacaagataatagcatcaaagaccttctccagaccgtggaagaccaatataaacaattaaaccaacagcatagtcaaataaaagaaatagaaaatcagctcagaaggactagtattcaagaacccacagaaatttctctatcttccaagccaagagcaccaagaactactccctttcttcagttgaatgaaataagaaatgtaaaacatgatggcattcctgctgaatgtaccaccatttataacagaggtgaacatacaagtggcatgtatgccatcagacccagcaactctcaagtttttcatgtctactgtgatgttatatcaggtagtccatggacattaattcaacatcgaatagatggatcacaaaacttcaatgaaacgtgggagaactacaaatatggttttgggaggcttgatggagaattttggttgggcctagagaagatatactccatagtgaagcaatctaattatgttttacgaattgagttggaagactggaaagacaacaaacattatattgaatattctttttacttgggaaatcacgaaaccaactatacgctacatctagttgcgattactggcaatgtccccaatgcaatcccggaaaacaaagatttggtgttttctacttgggatcacaaagcaaaaggacacttcaactgtccagagggttattcaggaggctggtggtggcatgatgagtgtggagaaaacaacctaaatggtaaatataacaaaccaagagcaaaatctaagccagagaggagaagaggattatcttggaagtctcaaaatggaaggttatactctataaaatcaaccaaaatgttgatccatccaacagattcagaaagctttgaatgaactgaggcaaatttaaaaggcaataatttaaacattaacctcattccaagttaatgtggtctaataatctggtattaaatccttaagagaaagcttgagaaatagattttttttatcttaaagtcactgtctatttaagattaaacatacaatcacataaccttaaagaataccgtttacatttctcaatcaaaattcttataatactatttgttttaaattttgtgatgtgggaatcaattttagatggtcacaatctagattataatcaataggtgaacttattaaataacttttctaaataaaaaatttagagacttttattttaaaaggcatcatatgagctaatatcacaactttcccagtttaaaaaactagtactcttgttaaaactctaaacttgactaaatacagaggactggtaattgtacagttcttaaatgttgtagtattaatttcaaaactaaaaatcgtcagcacagagtatgtgtaaaaatctgtaatacaaatttttaaactgatgcttcattttgctacaaaataatttggagtaaatgtttgatatgatttatttatgaaacctaatgaagcagaattaaatactgtattaaaataagttcgctgtctttaaacaaatggagatgactactaagtcacattgactttaacatgaggtatcactataccttatttgttaaaatatatactgtatacattttatatattttaacacttaatactatgaaaacaaataattgtaaaggaatcttgtcagattacagtaagaatgaacatatttgtggcatcgagttaaagtttatatttcccctaaatatgctgtgattctaatacattcgtgtaggttttcaagtagaaataaacctcgtaacaagttactgaacgtttaaacagcctgacaagcatgtatatatgtttaaaattcaataaacaaagacccagtccctaaattatagaaatttaaattattcttgcatgtttatcgacatcacaacagatccctaaatccctaaatccctaaagattagatacaaattttttaccacagtatcacttgtcagaatttatttttaaatatgattttttaaaactgccagtaagaaattttaaattaaacccatttgttaaaggatatagtgcccaagttatatggtgacctacctttgtcaatacttagcattatgtatttcaaattatccaatatacatgtcatatatatttttatatgtcacatatataaaagatatgtatgatctatgtgaatcctaagtaaatattttgttccagaaaagtacaaaataataaaggtaaaaataatctataa

SEQ ID NO: 107237 - DNA, 1879 bp, Homo sapiens
  Payload ID: 1052
  Gene Symbol: ANGPTL4
  Gene Name: angiopoietin-like 4
  Uniprot ID: Q9BY76
  ENST ID: ENST00000301455
  CDS Start-End: 172-1392
ggggagaagccgagctgagcggatcctcacacgactgtgatccgattctttccagcggcttctgcaaccaagcgggtcttacccccggtcctccgcgtctccagtcctcgcacctggaaccccaacgtccccgagagtccccgaatccccgctcccaggctacctaagaggatgagcggtgctccgacggccggggcagccctgatgctctgcgccgccaccgccgtgctactgagcgctcagggcggacccgtgcagtccaagtcgccgcgctttgcgtcctgggacgagatgaatgtcctggcgcacggactcctgcagctcggccaggggctgcgcgaacacgcggagcgcacccgcagtcagctgagcgcgctggagcggcgcctgagcgcgtgcgggtccgcctgtcagggaaccgaggggtccaccgacctcccgttagcccctgagagccgggtggaccctgaggtccttcacagcctgcagacacaactcaaggctcagaacagcaggatccagcaactcttccacaaggtggcccagcagcagcggcacctggagaagcagcacctgcgaattcagcatctgcaaagccagtttggcctcctggaccacaagcacctagaccatgaggtggccaagcctgcccgaagaaagaggctgcccgagatggcccagccagttgacccggctcacaatgtcagccgcctgcaccggctgcccagggattgccaggagctgttccaggttggggagaggcagagtggactatttgaaatccagcctcaggggtctccgccatttttggtgaactgcaagatgacctcagatggaggctggacagtaattcagaggcgccacgatggctcagtggacttcaaccggccctgggaagcctacaaggcggggtttggggatccccacggcgagttctggctgggtctggagaaggtgcatagcatcacgggggaccgcaacagccgcctggccgtgcagctgcgggactgggatggcaacgccgagttgctgcagttctccgtgcacctgggtggcgaggacacggcctatagcctgcagctcactgcacccgtggccggccagctgggcgccaccaccgtcccacccagcggcctctccgtacccttctccacttgggaccaggatcacgacctccgcagggacaagaactgcgccaagagcctctctggaggctggtggtttggcacctgcagccattccaacctcaacggccagtacttccgctccatcccacagcagcggcagaagcttaagaagggaatcttctggaagacctggcggggccgctactacccgctgcaggccaccaccatgttgatccagcccatggcagcagaggcagcctcctagcgtcctggctgggcctggtcccaggcccacgaaagacggtgactcttggctctgcccgaggatgtggccgttccctgcctgggcaggggctccaaggaggggccatctggaaacttgtggacagagaagaagaccacgactggagaagccccctttctgagtgcaggggggctgcatgcgttgcctcctgagatcgaggctgcaggatatgctcagactctagaggcgtggaccaaggggcatggagcttcactccttgctggccagggagttggggactcagagggaccacttggggccagccagactggcctcaatggcggactcagtcacattgactgacggggaccagggcttgtgtgggtcgagagcgccctcatggtgctggtgctgttgtgtgtaggtcccctggggacacaagcaggcgccaatggtatctgggcggagctcacagagttcttggaataaaagcaacctcagaacactt

SEQ ID NO: 107238 - DNA, 1705 bp, Homo sapiens
  Payload ID: 1052
  Gene Symbol: ANGPTL4
  Gene Name: angiopoietin-like 4
  Uniprot ID: Q9BY76
  ENST ID: ENST00000393962
  CDS Start-End: 154-1260
gcggatcctcacacgactgtgatccgattctttccagcggcttctgcaaccaagcgggtcttacccccggtcctccgcgtctccagtcctcgcacctggaaccccaacgtccccgagagtccccgaatccccgctcccaggctacctaagaggatgagcggtgctccgacggccggggcagccctgatgctctgcgccgccaccgccgtgctactgagcgctcagggcggacccgtgcagtccaagtcgccgcgctttgcgtcctgggacgagatgaatgtcctggcgcacggactcctgcagctcggccaggggctgcgcgaacacgcggagcgcacccgcagtcagctgagcgcgctggagcggcgcctgagcgcgtgcgggtccgcctgtcagggaaccgaggggtccaccgacctcccgttagcccctgagagccgggtggaccctgaggtccttcacagcctgcagacacaactcaaggctcagaacagcaggatccagcaactcttccacaaggtggcccagcagcagcggcacctggagaagcagcacctgcgaattcagcatctgcaaagccagtttggcctcctggaccacaagcacctagaccatgaggtggccaagcctgcccgaagaaagaggctgcccgagatggcccagccagttgacccggctcacaatgtcagccgcctgcaccatggaggctggacagtaattcagaggcgccacgatggctcagtggacttcaaccggccctgggaagcctacaaggcggggtttggggatccccacggcgagttctggctgggtctggagaaggtgcatagcatcacgggggaccgcaacagccgcctggccgtgcagctgcgggactgggatggcaacgccgagttgctgcagttctccgtgcacctgggtggcgaggacacggcctatagcctgcagctcactgcacccgtggccggccagctgggcgccaccaccgtcccacccagcggcctctccgtacccttctccacttgggaccaggatcacgacctccgcagggacaagaactgcgccaagagcctctctggaggctggtggtttggcacctgcagccattccaacctcaacggccagtacttccgctccatcccacagcagcggcagaagcttaagaagggaatcttctggaagacctggcggggccgctactacccgctgcaggccaccaccatgttgatccagcccatggcagcagaggcagcctcctagcgtcctggctgggcctggtcccaggcccacgaaagacggtgactcttggctctgcccgaggatgtggccgttccctgcctgggcaggggctccaaggaggggccatctggaaacttgtggacagagaagaagaccacgactggagaagccccctttctgagtgcaggggggctgcatgcgttgcctcctgagatcgaggctgcaggatatgctcagactctagaggcgtggaccaaggggcatggagcttcactccttgctggccagggagttggggactcagagggaccacttggggccagccagactggcctcaatggcggactcagtcacattgactgacggggaccagggcttgtgtgggtcgagagcgccctcatggtgctggtgctgttgtgtgtaggtcccctggggacacaagcaggcgccaatggtatctgggcgg

SEQ ID NO: 107239 - DNA, 552 bp, Homo sapiens
  Payload ID: 1052
  Gene Symbol: ANGPTL4
  Gene Name: angiopoietin-like 4
  ENST ID: ENST00000601886
  CDS Start-End: 265-552
atgcgagcccagaaaagtctctcctggtcttgggatggaggtcacacgaagcctccgcaaggcaaggacttttgagactgggtttcacgatgttggccgggctggtctggaagtcttgacctcaagcgtgcgccctctccgccactggcggcttctgcaaccaagcgggtcttacccccggtcctccgcgtctccagtcctcgcacctggaaccccaacgtccccgagagtccccgaatccccgctcccaggctacctaagaggatgagcggtgctccgacggccggggcagccctgatgctctgcgccgccaccgccgtgctactgagcgctcagggcggacccgtgcagtccaagtcgccgcgctttgcgtcctgggacgagatgaatgtcctggcgcacggactcctgcagctcggccaggggctgcgcgaacacgcggagcgcacccgcagtcagctgagcgcgctggagcggcgcctgagcgcgtgcgggtccgcctgtcagggaaccgaggggtccaccgacctcccgttagcccctgagagccgg

SEQ ID NO: 107240 - DNA, 813 bp, Homo sapiens
  Payload ID: 1052
  Gene Symbol: ANGPTL4
  Gene Name: angiopoietin-like 4
  ENST ID: ENST00000601770
  CDS Start-End: 557-813
tctttccttcttcctttctttccctccttccttccttcctctttctctctttcctttctctctctcttttctctctctctctccttcttccctccctccctacctctctctcttttctttttccgtccttccttccttctttccttctttctctctcttttctttcttttcttttcttttctcttctttcattttgagacgtactctggctctgtcgcccaggctggagcgcaatggcgccatctcggcgcactgcaacctccacctcccgggttcaagcgattctactgcctcagcctcccgagtagctgggactacaggcgcgcactaccaagcccggctaatttttttttgtatttttagtagagactgggtttcacgatgttggccgggctggtctggaagtcttgacctcaagcgtgcgccctctccgccactggcggcttctgcaaccaagcgggtcttacccccggtcctccgcgtctccagtcctcgcacctggaaccccaacgtccccgagagtccccgaatccccgctcccaggctacctaagaggatgagcggtgctccgacggccggggcagccctgatgctctgcgccgccaccgccgtgctactgagcgctcagggcggacccgtgcagtccaagtcgccgcgctttgcgtcctgggacgagatgaatgtcctggcgcacggactcctgcagctcggccaggggctgcgcgaacacgcggagcgcacccgcagtcagctgagcgcgctggagcggcgcctgagcgcgtgcgggtccgcctgtcagggaaccgaggggtc

SEQ ID NO: 107241 - DNA, 1798 bp, Homo sapiens
  Payload ID: 1052
  Gene Symbol: ANGPTL4
  Gene Name: angiopoietin-like 4
  Uniprot ID: Q9BY76
  ENST ID: ENST00000593998
  CDS Start-End: 154-1374
gcggatcctcacacgactgtgatccgattctttccagcggcttctgcaaccaagcgggtcttacccccggtcctccgcgtctccagtcctcgcacctggaaccccaacgtccccgagagtccccgaatccccgctcccaggctacctaagaggatgagcggtgctccgacggccggggcagccctgatgctctgcgccgccaccgccgtgctactgagcgctcagggcggacccgtgcagtccaagtcgccgcgctttgcgtcctgggacgagatgaatgtcctggcgcacggactcctgcagctcggccaggggctgcgcgaacacgcggagcgcacccgcagtcagctgagcgcgctggagcggcgcctgagcgcgtgcgggtccgcctgtcagggaaccgaggggtccaccgacctcccgttagcccctgagagccgggtggaccctgaggtccttcacagcctgcagacacaactcaaggctcagaacagcaggatccagcaactcttccacaaggtggcccagcagcagcggcacctggagaagcagcacctgcgaattcagcatctgcaaagccagtttggcctcctggaccacaagcacctagaccatgaggtggccaagcctgcccgaagaaagaggctgcccgagatggcccagccagttgacccggctcacaatgtcagccgcctgcaccggctgcccagggattgccaggagctgttccaggttggggagaggcagagtggactatttgaaatccagcctcaggggtctccgccatttttggtgaactgcaagatgacctcagatggaggctggacagtaattcagaggcgccacgatggctcagtggacttcaaccggccctgggaagcctacaaggcggggtttggggatccccacggcgagttctggctgggtctggagaaggtgcatagcatcacgggggaccgcaacagccgcctggccgtgcagctgcgggactgggatggcaacgccgagttgctgcagttctccgtgcacctgggtggcgaggacacggcctatagcctgcagctcactgcacccgtggccggccagctgggcgccaccaccgtcccacccagcggcctctccgtacccttctccacttgggaccaggatcacgacctccgcagggacaagaactgcgccaagagcctctctggaggctggtggtttggcacctgcagccattccaacctcaacggccagtacttccgctccatcccacagcagcggcagaagcttaagaagggaatcttctggaagacctggcggggccgctactacccgctgcaggccaccaccatgttgatccagcccatggcagcagaggcagcctcctagcgtcctggctgggcctggtcccaggcccacgaaagacggtgactcttggctctgcccgaggatgtggccaagaccacgactggagaagccccctttctgagtgcaggggggctgcatgcgttgcctcctgagatcgaggctgcaggatatgctcagactctagaggcgtggaccaaggggcatggagcttcactccttgctggccagggagttggggactcagagggaccacttggggccagccagactggcctcaatggcggactcagtcacattgactgacggggaccagggcttgtgtgggtcgagagcgccctcatggtgctggtgctgttgtgtgtaggtcccctggggacacaagcaggcgccaatggtatctgggcggagctcacagagttcttggaataaaagcaacctcagaaca

SEQ ID NO: 107242 - DNA, 531 bp, Homo sapiens
  Payload ID: 1052
  Gene Symbol: ANGPTL4
  Gene Name: angiopoietin-like 4
  ENST ID: ENST00000594875
  CDS Start-End: 1-389
gacccgtgcagtccaagtcgccgcgctttgcgtcctgggacgagatgaatgtcctggcgcacggactcctgcagctcggccaggggctgcgcgaacacgcggagcgcacccgcagtcagctgagcgcgctggagcggcgcctgagcgcgtgcgggtccgcctgtcagggaaccgaggggtccaccgacctcccgttagcccctgagagccgggtggaccctgaggtccttcacagcctgcagacacaactcaaggctcagaacagcaggatccagcaactcttccacaaggtggcccagcagcagcggcacctggagaagcagcacctgcgaattcagcatctgcaaagccagactggcctcaatggcggactcagtcacattgactgacggggaccagggcttgtgtgggtcgagagcgccctcatggtgctggtgctgttgtgtgtaggtcccctggggacacaagcaggcgccaatggtatctgggcggagctcacagagttcttggaataaaagcaacctcagaaca

SEQ ID NO: 107243 - DNA, 1719 bp, Homo sapiens
  Payload ID: 1052
  Gene Symbol: ANGPTL4
  Gene Name: angiopoietin-like 4
  ENST ID: ENST00000595079
  CDS Start-End: 167-553
gaagccgagctgagcggatcctcacacgactgtgatccgattctttccagcggcttctgcaaccaagcgggtcttacccccggtcctccgcgtctccagtcctcgcacctggaaccccaacgtccccgagagtccccgaatccccgctcccaggctacctaagaggatgagcggtgctccgacggccggggcagccctgatgctctgcgccgccaccgccgtgctactgagcgctcagggcggacccgtgcagtccaagtcgccgcgctttgcgtcctgggacgagatgaatgtcctggcgcacggactcctgcagctcggccaggggctgcgcgaacacgcggagcgcacccgcagtcagctgagcgcgctggagcggcgcctgagcgcgtgcgggtccttcacagcctgcagacacaactcaaggctcagaacagcaggatccagcaactcttccacaaggtggcccagcagcagcggcacctggagaagcagcacctgcgaattcagcatctgcaaagccagtttggcctcctggaccacaagcacctagaccatgaggtggccaagcctgcccgaagaaagaggctgcccgagatggcccagccagttgacccggctcacaatgtcagccgcctgcaccggctgcccagggattgccaggagctgttccaggttggggagaggcagagtggactatttgaaatccagcctcaggggtctccgccatttttggtgaactgcaagatgacctcagatggaggctggacagtaattcagaggcgccacgatggctcagtggacttcaaccggccctgggaagcctacaaggcggggtttggggatccccacggcgagttctggctgggtctggagaaggtgcatagcatcacgggggaccgcaacagccgcctggccgtgcagctgcgggactgggatggcaacgccgagttgctgcagttctccgtgcacctgggtggcgaggacacggcctatagcctgcagctcactgcacccgtggccggccagctgggcgccaccaccgtcccacccagcggcctctccgtacccttctccacttgggaccaggatcacgacctccgcagggacaagaactgcgccaagagcctctctggaggctggtggtttggcacctgcagccattccaacctcaacggccagtacttccgctccatcccacagcagcggcagaagcttaagaagggaatcttctggaagacctggcggggccgctactacccgctgcaggccaccaccatgttgatccagcccatggcagcagaggcagcctcctagcgtcctggctgggcctggtcccaggcccacgaaagacggtgactcttggctctgcccgaggatgtggccgttccctgcctgggcaggggctccaaggaggggccatctggaaacttgtggacagagaagaagaccacgactggagaagccccctttctgagtgcaggggggctgcatgcgttgcctcctgagatcgaggctgcaggatatgctcagactctagaggcgtggaccaaggggcatggagcttcactccttgctggccagggagttggggactcagagggaccacttggggccagccagactggcctcaatggcggactcagtcacattgactgacggggaccagggcttgtgtgggtcgagagcgccctcatggtgctggtgctgttgtgtgta

SEQ ID NO: 107244 - DNA, 571 bp, Homo sapiens
  Payload ID: 1052
  Gene Symbol: ANGPTL4
  Gene Name: angiopoietin-like 4
  ENST ID: ENST00000599192
  CDS Start-End: 258-571
agaaaagtctctcctggtcttgggatggaggtcacacgaagcctccgcaaggcaaggacttttgtagagactgggtttcacgatgttggccgggctggtctggaagtcttgacctcaagcgtgcgccctctccgccactggcggcttctgcaaccaagcgggtcttacccccggtcctccgcgtctccagtcctcgcacctggaaccccaacgtccccgagagtccccgaatccccgctcccaggctacctaagaggatgagcggtgctccgacggccggggcagccctgatgctctgcgccgccaccgccgtgctactgagcgctcagggcggacccgtgcagtccaagtcgccgcgctttgcgtcctgggacgagatgaatgtcctggcgcacggactcctgcagctcggccaggggctgcgcgaacacgcggagcgcacccgcagtcagctgagcgcgctggagcggcgcctgagcgcgtgcgggtccgcctgtcagggaaccgaggggtccaccgacctcccgttagcccctgagagccgggtggaccctgaggtccttcacagcct

SEQ ID NO: 107245 - DNA, 2368 bp, Homo sapiens
  Payload ID: 1053
  Gene Symbol: ANGPTL5
  Gene Name: angiopoietin-like 5
  Uniprot ID: Q86XS5
  ENST ID: ENST00000334289
  CDS Start-End: 597-1763
gatgagaggaactagaagcagctattgcaagctaccattttgagaacctgcccaaagaaagaaaagactgaagggatggaagattgcagaaagcatgatcggagaagagatattttacttttagtgaagctctatacacatttgtcttcctcactagatttgtatccctagaacctagaacagagtcagccaaagagcaggcactcaatacaaattgttgacttgctgctaaaattgtaacagagtacaaagaacatcctagaaattggagacaaaggggataagaaaacagagttaacttggaaagagaagacactcatctctgacaagactgaagatgattacacaacaccatcattgccaaccaagtcctttgggaatacaaaggttaaatcctaatcatcacaacagtctctaaaggaataaacctgatttacagattttgataacaaaatacttctcctctttccattttctacaatgcaaccaacagcaacatcaaagaggtttttaactgaagactctatgctctgtagttctttccacaaagagctgactgatatttgaagaagtgttttcatctatccaagaaaaatatgatgtctccatcccaagcctcactcttattcttaaatgtatgtatttttatttgtggagaagctgtacaaggtaactgtgtacatcattctacggactcttcagtagttaacattgtagaagatggatctaatgcaaaagatgaaagtaaaagtaatgatactgtttgtaaggaagactgtgaggaatcatgtgatgttaaaactaaaattacacgagaagaaaaacatttcatgtgtagaaatttgcaaaattctattgtttcctacacaagaagtaccaaaaaactactaaggaatatgatggatgagcaacaagcttccttggattatttatctaatcaggttaacgagctcatgaatagagttctccttttgactacagaagtttttagaaaacagctggatccttttcctcacagacctgttcagtcacatggtttagattgcactgatattaaggataccattggctctgtcaccaaaacaccgagtggtttatacataattcacccagaaggatctagctacccatttgaggtaatgtgtgacatggattacagaggaggtggacggactgtgatacagaaaagaattgatgggataattgatttccagaggttgtggtgtgattatctggatggatttggagatcttctaggagaattttggctaggactgaaaaagattttttatatagtaaatcagaaaaataccagttttatgctgtatgtggctttggaatctgaagatgacactcttgcttatgcatcatatgataatttttggctagaggatgaaacgagattttttaaaatgcacttaggacggtattcaggaaatgctggtgatgcattccggggtctcaaaaaagaagataatcaaaatgcaatgccttttagcacatcagatgttgataatgatgggtgtcgccctgcatgcctggtcaatggtcagtctgtgaagagctgcagtcacctccataacaagaccggctggtggtttaacgagtgtggtctagcaaatctaaatggcattcatcacttctctggaaaattgcttgcaactggaattcaatggggcacgtggaccaaaaacaactcacctgtcaagattaaatctgtttcaatgaaaattagaagaatgtacaatccatattttaaataatctcatttaacattgtaatgcaagttctacaatgataatatattaaagatttttaaaagtttatcttttcacttagtgtttcaaacatattaggcaaaatttaactgtagatggcatttagatgttatgagtttaattagaaaacttcaattttgtagtattctataaaagaaaacatggcttattgtatgtttttacttctgactatattaacaatatacaatgaaatttgtttcaagtgaactacaacttgtcttcctaaaatttatagtgattttaaaggattttgccttttctttgaagcatttttaaaccataatatgttgtaaggaaaattgaagggaatattttacttatttttatactttatatgattatataatctacagataatttctactgaagacagttacaataaataactttatgcagattaatatataagctacacatgatgtaaaaaccttactatttctaggtgatgccataccattttaaaagtagtaagagtttgctgcccaaatagtttttcttgttttcatatctaatcatggttaactattttgttattgtttgtaataaatatatgtacttttatatcctga

SEQ ID NO: 107246 - DNA, 601 bp, Homo sapiens
  Payload ID: 1053
  Gene Symbol: ANGPTL5
  Gene Name: angiopoietin-like 5
  ENST ID: ENST00000534527
  CDS Start-End: 26-601
gtgttttcatctatccaagaaaaatatgatgtctccatcccaagcctcactcttattcttaaatgtatgtatttttatttgtggagaagctgtacaaggtaactgtgtacatcattctacggactcttcagtagttaacattgtagaagatggatctaatgcaaaagatgaaagtaaaagtaatgatactgtttgtaaggaagactgtgaggaatcatgtgatgttaaaactaaaattacacgagaagaaaaacatttcatgtgtagaaatttgcaaaattctattgtttcctacacaagaagtaccaaaaaactactaaggaatatgatggatgagcaacaagcttccttggattatttatctaatcaggtaatgtgtgacatggattacagaggaggtggacggactgtgatacagaaaagaattgatgggataattgatttccagaggttgtggtgtgattatctggatggatttggagatcttctaggagaattttggctaggactgaaaaagattttttatatagtaaatcagaaaaataccagttttatgctgtatgtggctttggaatctgaagatgacactcttgcttatgca

SEQ ID NO: 107247 - DNA, 1900 bp, Homo sapiens
  Payload ID: 1054
  Gene Symbol: ANGPTL6
  Gene Name: angiopoietin-like 6
  Uniprot ID: Q8NI99
  ENST ID: ENST00000253109
  CDS Start-End: 240-1652
ctcattcgggaaatgctaaatatttatagtttgggctcctgggcccagcatcccagctccactcccaggctctgggggctggggagtggttaccaagcctcctctctccttctgtcccactgccctctccccgtctctagctcagaggccccactggaccctcggctcttccttggacttcttgtgtgttctgtgagcttcgctggattcagggtcttgggcatcagaggtccgccgcgatggggaagccctggctgcgtgcgctacagctgctgctcctgctgggcgcgtcgtgggcgcgggcgggcgccccgcgctgcacctacaccttcgtgctgcccccgcagaagttcacgggcgctgtgtgctggagcggccccgcatccacgcgggcgacgcccgaggccgccaacgccagcgagctggcggcgctgcgcatgcgcgtcggccgccacgaggagctgttacgcgagctgcagaggctggcggcggccgacggcgccgtggccggcgaggtgcgcgcgctgcgcaaggagagccgcggcctgagcgcgcgcctgggccagttgcgcgcgcagctgcagcacgaggcggggcccggggcgggcccgggggcggatctgggggcggagcctgccgcggcgctggcgctgctcggggagcgcgtgctcaacgcgtccgccgaggctcagcgcgcagccgcccggttccaccagctggacgtcaagttccgcgagctggcgcagctcgtcacccagcagagcagtctcatcgcccgcctggagcgcctgtgcccgggaggcgcgggcgggcagcagcaggtcctgccgccacccccactggtgcctgtggttccggtccgtcttgtgggtagcaccagtgacaccagtaggatgctggacccagccccagagccccagagagaccagacccagagacagcaggagcccatggcttctcccatgcctgcaggtcaccctgcggtccccaccaagcctgtgggcccgtggcaggattgtgcagaggcccgccaggcaggccatgaacagagtggagtgtatgaactgcgagtgggccgtcacgtagtgtcagtatggtgtgagcagcaactggagggtggaggctggactgtgatccagcggaggcaagatggttcagtcaacttcttcactacctggcagcactataaggcgggctttgggcggccagacggagaatactggctgggccttgaacccgtgtatcagctgaccagccgtggggaccatgagctgctggttctcctggaggactgggggggccgtggagcacgtgcccactatgatggcttctccctggaacccgagagcgaccactaccgcctgcggcttggccagtaccatggtgatgctggagactctctttcctggcacaatgacaagcccttcagcaccgtggatagggaccgagactcctattctggtaactgtgccctgtaccagcggggaggctggtggtaccatgcctgtgcccactccaacctcaacggtgtgtggcaccacggcggccactaccgaagccgctaccaggatggtgtctactgggctgagtttcgtggtggggcatattctctcaggaaggccgccatgctcattcggcccctgaagctgtgactctgtgttcctctgtcccctaggccctagaggacattggtcagcaggagcccaagttgttctggccacaccttctttgtggctcagtgccaatgtgtcccacagaacttcccactgtggatctgtgaccctgggcgctgaaaatgggacccaggaatcccccccgtcaatatcttggcctcagatggctccccaaggtcattcatatctcggtttgagctcatatcttataataacacaaagtagcc

SEQ ID NO: 107248 - DNA, 1579 bp, Homo sapiens
  Payload ID: 1054
  Gene Symbol: ANGPTL6
  Gene Name: angiopoietin-like 6
  ENST ID: ENST00000589181
  CDS Start-End: 36-1328
ccttccgttcctcctctgcctgcaggtccgccgcgatggggaagccctggctgcgtgcgctacagctgctgctcctgctgggcgcgtcgtgggcgcgggcgggcgccccgcgctgcacctacaccttcgtgctgcccccgcagaagttcacgggcgctgtgtgctggagcggccccgcatccacgcgggcgacgcccgaggccgccaacgccagcgagctggcggcgctgcgcatgcgcgtcggccgccacgaggagctgttacgcgagctgcagaggctggcggcggccgacggcgccgtggccggcgaggtgcgcgcgctgcgcaaggagagccgcggcctgagcgcgcgcctgggccagttgcgcgcgcagctgcagcacgaggcggggcccggggcgggcccgggggcggatctgggggcggagcctgccgcggcgctggcgctgctcggggagcgcgtgctcaacgcgtccgccgaggctcagcgcgcagccgcccggttccaccagctggacgtcaagttccgcgagctggcgcagctcgtcacccagcagagcagtctcatcgcccgcctggagcgcctgtgcccgggaggcgcgggcgggcagcagcaggtcctgccgccacccccactggtgcctgtggttccggtccgtcttgtgggtagcaccagtgacaccagtaggatgctggacccagccccagagccccagagagaccagacccagagacagcaggagcccatggcttctcccatgcctgcaggtcaccctgcggtccccaccaagcctgtgggcccgtggcaggattgtgcagaggcccgccaggcaggccatgaacagagtggagtgtatgaactgcgagcgggctttgggcggccagacggagaatactggctgggccttgaacccgtgtatcagctgaccagccgtggggaccatgagctgctggttctcctggaggactgggggggccgtggagcacgtgcccactatgatggcttctccctggaacccgagagcgaccactaccgcctgcggcttggccagtaccatggtgatgctggagactctctttcctggcacaatgacaagcccttcagcaccgtggatagggaccgagactcctattctggtaactgtgccctgtaccagcggggaggctggtggtaccatgcctgtgcccactccaacctcaacggtgtgtggcaccacggcggccactaccgaagccgctaccaggatggtgtctactgggctgagtttcgtggtggggcatattctctcaggaaggccgccatgctcattcggcccctgaagctgtgactctgtgttcctctgtcccctaggccctagaggacattggtcagcaggagcccaagttgttctggccacaccttctttgtggctcagtgccaatgtgtcccacagaacttcccactgtggatctgtgaccctgggcgctgaaaatgggacccaggaatcccccccgtcaatatcttggcctcagatggctccccaaggtcattcatatctcggtttgagctcatatcttataataacacaaagtagccaca

SEQ ID NO: 107249 - DNA, 1781 bp, Homo sapiens
  Payload ID: 1054
  Gene Symbol: ANGPTL6
  Gene Name: angiopoietin-like 6
  Uniprot ID: Q8NI99
  ENST ID: ENST00000592641
  CDS Start-End: 119-1531
tagctcagaggccccactggaccctcggctcttccttggacttcttgtgtgttctgtgagcttcgctggattcagggtcttgggcatcagaggtgagagggtgggaaggtccgccgcgatggggaagccctggctgcgtgcgctacagctgctgctcctgctgggcgcgtcgtgggcgcgggcgggcgccccgcgctgcacctacaccttcgtgctgcccccgcagaagttcacgggcgctgtgtgctggagcggccccgcatccacgcgggcgacgcccgaggccgccaacgccagcgagctggcggcgctgcgcatgcgcgtcggccgccacgaggagctgttacgcgagctgcagaggctggcggcggccgacggcgccgtggccggcgaggtgcgcgcgctgcgcaaggagagccgcggcctgagcgcgcgcctgggccagttgcgcgcgcagctgcagcacgaggcggggcccggggcgggcccgggggcggatctgggggcggagcctgccgcggcgctggcgctgctcggggagcgcgtgctcaacgcgtccgccgaggctcagcgcgcagccgcccggttccaccagctggacgtcaagttccgcgagctggcgcagctcgtcacccagcagagcagtctcatcgcccgcctggagcgcctgtgcccgggaggcgcgggcgggcagcagcaggtcctgccgccacccccactggtgcctgtggttccggtccgtcttgtgggtagcaccagtgacaccagtaggatgctggacccagccccagagccccagagagaccagacccagagacagcaggagcccatggcttctcccatgcctgcaggtcaccctgcggtccccaccaagcctgtgggcccgtggcaggattgtgcagaggcccgccaggcaggccatgaacagagtggagtgtatgaactgcgagtgggccgtcacgtagtgtcagtatggtgtgagcagcaactggagggtggaggctggactgtgatccagcggaggcaagatggttcagtcaacttcttcactacctggcagcactataaggcgggctttgggcggccagacggagaatactggctgggccttgaacccgtgtatcagctgaccagccgtggggaccatgagctgctggttctcctggaggactgggggggccgtggagcacgtgcccactatgatggcttctccctggaacccgagagcgaccactaccgcctgcggcttggccagtaccatggtgatgctggagactctctttcctggcacaatgacaagcccttcagcaccgtggatagggaccgagactcctattctggtaactgtgccctgtaccagcggggaggctggtggtaccatgcctgtgcccactccaacctcaacggtgtgtggcaccacggcggccactaccgaagccgctaccaggatggtgtctactgggctgagtttcgtggtggggcatattctctcaggaaggccgccatgctcattcggcccctgaagctgtgactctgtgttcctctgtcccctaggccctagaggacattggtcagcaggagcccaagttgttctggccacaccttctttgtggctcagtgccaatgtgtcccacagaacttcccactgtggatctgtgaccctgggcgctgaaaatgggacccaggaatcccccccgtcaatatcttggcctcagatggctccccaaggtcattcatatctcggtttgagctcatatcttataataacacaaagtagccac

SEQ ID NO: 107250 - DNA, 2238 bp, Homo sapiens
  Payload ID: 1055
  Gene Symbol: ANGPTL7
  Gene Name: angiopoietin-like 7
  Uniprot ID: O43827
  ENST ID: ENST00000376819
  CDS Start-End: 240-1280
cttgtggagcattcgggcttggaaggaaagctataggctacccattcagctcccctgtcagagactcaagctttgagaaaggctagcaaagagcaaggaaagagagaaaacaacaaagtggcgaggccctcagagtgaaagcgtaaggttcagtcagcctgctgcagctttgcagacctcagctgggcatctccagactcccctgaaggaagagccttcctcacccaaacccacaaaagatgctgaaaaagcctctctcagctgtgacctggctctgcattttcatcgtggcctttgtcagccacccagcgtggctgcagaagctctctaagcacaagacaccagcacagccacagctcaaagcggccaactgctgtgaggaggtgaaggagctcaaggcccaagttgccaaccttagcagcctgctgagtgaactgaacaagaagcaggagagggactgggtcagcgtggtcatgcaggtgatggagctggagagcaacagcaagcgcatggagtcgcggctcacagatgctgagagcaagtactccgagatgaacaaccaaattgacatcatgcagctgcaggcagcacagacggtcactcagacctccgcagatgccatctacgactgctcttccctctaccagaagaactaccgcatctctggagtgtataagcttcctcctgatgacttcctgggcagccctgaactggaggtgttctgtgacatggagacttcaggcggaggctggaccatcatccagagacgaaaaagtggccttgtctccttctaccgggactggaagcagtacaagcagggctttggcagcatccgtggggacttctggctggggaacgaacacatccaccggctctccagacagccaacccggctgcgtgtagagatggaggactgggagggcaacctgcgctacgctgagtatagccactttgttttgggcaatgaactcaacagctatcgcctcttcctggggaactacactggcaatgtggggaacgacgccctccagtatcataacaacacagccttcagcaccaaggacaaggacaatgacaactgcttggacaagtgtgcacagctccgcaaaggtggctactggtacaactgctgcacagactccaacctcaatggagtgtactaccgcctgggtgagcacaataagcacctggatggcatcacctggtatggctggcatggatctacctactccctcaaacgggtggagatgaaaatccgcccagaagacttcaagccttaaaaggaggctgccgtggagcacggatacagaaactgagacacgtggagactggatgagggcagatgaggacaggaagagagtgttagaaagggtaggactgagaaacagcctataatctccaaagaaagaataagtctccaaggagcacaaaaaaatcatatgtaccaaggatgttacagtaaacaggatgaactatttaaacccactgggtcctgccacatccttctcaaggtggtagactgagtggggtctctctgcccaagatccctgacatagcagtagcttgtcttttccacatgatttgtctgtgaaagaaaataattttgagatcgttttatctattttctctacggcttaggctatgtgagggcaaaacacaaatccctttgctaaaaagaaccatattattttgattctcaaaggataggcctttgagtgttagagaaaggagtgaaggaggcaggtgggaaatggtatttctatttttaaatccagtgaaattatcttgagtctacacattatttttaaaacacaaaaattgttcggctggaactgacccaggctggacttgcggggaggaaactccagggcactgcatctggcgatcagactctgagcactgcccctgctcgccttggtcatgtacagcactgaaaggaatgaagcaccagcaggaggtggacagagtctctcatggatgccggcacaaaactgccttaaaatattcatagttaatacaggtatatctatttttatttactttgtaagaaacaagctcaaggagcttccttttaaattttgtctgtaggaaatggttgaaaactgaaggtagatggtgttatagttaataataaatgctgtaaataagcatctcactttgtaaaaataaaatattgtggttttgttttaaacattcaacgtttcttttccttctacaataaacactttcaaaatgtga

SEQ ID NO: 107251 - DNA, 2479 bp, Homo sapiens
  Payload ID: 1056
  Gene Symbol: ACE
  Gene Name: angiotensin I converting enzyme
  Uniprot ID: P12821
  ENST ID: ENST00000290863
  CDS Start-End: 29-2227
agctgcaggactctgctctcctgcggccatgggccagggttgggctactgcaggacttcccagcctcctcttcctgctgctctgctacgggcaccctctgctggtccccagccaggaggcatcccaacaggtgacagtcacccatgggacaagcagccaggcaacaaccagcagccagacaaccacccaccaggcgacggcccaccagacatcagcccagagcccaaacctggtgactgatgaggctgaggccagcaagtttgtggaggaatatgaccggacatcccaggtggtgtggaacgagtatgccgaggccaactggaactacaacaccaacatcaccacagagaccagcaagattctgctgcagaagaacatgcaaatagccaaccacaccctgaagtacggcacccaggccaggaagtttgatgtgaaccagttgcagaacaccactatcaagcggatcataaagaaggttcaggacctagaacgggcagcactgcctgcccaggagctggaggagtacaacaagatcctgttggatatggaaaccacctacagcgtggccactgtgtgccacccgaatggcagctgcctgcagctcgagccagatctgacgaatgtgatggccacgtcccggaaatatgaagacctgttatgggcatgggagggctggcgagacaaggcggggagagccatcctccagttttacccgaaatacgtggaactcatcaaccaggctgcccggctcaatggctatgtagatgcaggggactcgtggaggtctatgtacgagacaccatccctggagcaagacctggagcggctcttccaggagctgcagccactctacctcaacctgcatgcctacgtgcgccgggccctgcaccgtcactacggggcccagcacatcaacctggaggggcccattcctgctcacctgctggggaacatgtgggcgcagacctggtccaacatctatgacttggtggtgcccttcccttcagccccctcgatggacaccacagaggctatgctaaagcagggctggacgcccaggaggatgtttaaggaggctgatgatttcttcacctccctggggctgctgcccgtgcctcctgagttctggaacaagtcgatgctggagaagccaaccgacgggcgggaggtggtctgccacgcctcggcctgggacttctacaacggcaaggacttccggatcaagcagtgcaccaccgtgaacttggaggacctggtggtggcccaccacgaaatgggccacatccagtatttcatgcagtacaaagacttacctgtggccttgagggagggtgccaaccccggcttccatgaggccattggggacgtgctagccctctcagtgtctacgcccaagcacctgcacagtctcaacctgctgagcagtgagggtggcagcgacgagcatgacatcaactttctgatgaagatggcccttgacaagatcgcctttatccccttcagctacctcgtcgatcagtggcgctggagggtatttgatggaagcatcaccaaggagaactataaccaggagtggtggagcctcaggctgaagtaccagggcctctgccccccagtgcccaggactcaaggtgactttgacccaggggccaagttccacattccttctagcgtgccttacatcaggtactttgtcagcttcatcatccagttccagttccacgaggcactgtgccaggcagctggccacacgggccccctgcacaagtgtgacatctaccagtccaaggaggccgggcagcgcctggcgaccgccatgaagctgggcttcagtaggccgtggccggaagccatgcagctgatcacgggccagcccaacatgagcgcctcggccatgttgagctacttcaagccgctgctggactggctccgcacggagaacgagctgcatggggagaagctgggctggccgcagtacaactggacgccgaactccgctcgctcagaagggcccctcccagacagcggccgcgtcagcttcctgggcctggacctggatgcgcagcaggcccgcgtgggccagtggctgctgctcttcctgggcatcgccctgctggtagccaccctgggcctcagccagcggctcttcagcatccgccaccgcagcctccaccggcactcccacgggccccagttcggctccgaggtggagctgagacactcctgaggtgacccggctgggtcggccctgcccaagggcctcccaccagagactgggatgggaacactggtgggcagctgaggacacaccccacaccccagcccaccctgctcctcctgccctgtccctgtccccctcccctcccagtcctccagaccaccagccgccccagccccttctcccagcacacggctgcctgacactgagccccacctctccaagtctctctgtgaatacaattaaaggtcctgccctccc

SEQ ID NO: 107252 - DNA, 4959 bp, Homo sapiens
  Payload ID: 1056
  Gene Symbol: ACE
  Gene Name: angiotensin I converting enzyme
  Uniprot ID: P12821
  ENST ID: ENST00000290866
  CDS Start-End: 25-3945
gagccgagcaccgcgcaccgcgtcatgggggccgcctcgggccgccgggggccggggctgctgctgccgctgccgctgctgttgctgctgccgccgcagcccgccctggcgttggaccccgggctgcagcccggcaacttttctgctgacgaggccggggcgcagctcttcgcgcagagctacaactccagcgccgaacaggtgctgttccagagcgtggccgccagctgggcgcacgacaccaacatcaccgcggagaatgcaaggcgccaggaggaagcagccctgctcagccaggagtttgcggaggcctggggccagaaggccaaggagctgtatgaaccgatctggcagaacttcacggacccgcagctgcgcaggatcatcggagctgtgcgcaccctgggctctgccaacctgcccctggctaagcggcagcagtacaacgccctgctaagcaacatgagcaggatctactccaccgccaaggtctgcctccccaacaagactgccacctgctggtccctggacccagatctcaccaacatcctggcttcctcgcgaagctacgccatgctcctgtttgcctgggagggctggcacaacgctgcgggcatcccgctgaaaccgctgtacgaggatttcactgccctcagcaatgaagcctacaagcaggacggcttcacagacacgggggcctactggcgctcctggtacaactcccccaccttcgaggacgatctggaacacctctaccaacagctagagcccctctacctgaacctccatgccttcgtccgccgcgcactgcatcgccgatacggagacagatacatcaacctcaggggacccatccctgctcatctgctgggagacatgtgggcccagagctgggaaaacatctacgacatggtggtgcctttcccagacaagcccaacctcgatgtcaccagtactatgctgcagcagggctggaacgccacgcacatgttccgggtggcagaggagttcttcacctccctggagctctcccccatgcctcccgagttctgggaagggtcgatgctggagaagccggccgacgggcgggaagtggtgtgccacgcctcggcttgggacttctacaacaggaaagacttcaggatcaagcagtgcacacgggtcacgatggaccagctctccacagtgcaccatgagatgggccatatacagtactacctgcagtacaaggatctgcccgtctccctgcgtcggggggccaaccccggcttccatgaggccattggggacgtgctggcgctctcggtctccactcctgaacatctgcacaaaatcggcctgctggaccgtgtcaccaatgacacggaaagtgacatcaattacttgctaaaaatggcactggaaaaaattgccttcctgccctttggctacttggtggaccagtggcgctggggggtctttagtgggcgtacccccccttcccgctacaacttcgactggtggtatcttcgaaccaagtatcaggggatctgtcctcctgttacccgaaacgaaacccactttgatgctggagctaagtttcatgttccaaatgtgacaccatacatcaggtactttgtgagttttgtcctgcagttccagttccatgaagccctgtgcaaggaggcaggctatgagggcccactgcaccagtgtgacatctaccggtccaccaaggcaggggccaagctccggaaggtgctgcaggctggctcctccaggccctggcaggaggtgctgaaggacatggtcggcttagatgccctggatgcccagccgctgctcaagtacttccagccagtcacccagtggctgcaggagcagaaccagcagaacggcgaggtcctgggctggcccgagtaccagtggcacccgccgttgcctgacaactacccggagggcatagacctggtgactgatgaggctgaggccagcaagtttgtggaggaatatgaccggacatcccaggtggtgtggaacgagtatgccgaggccaactggaactacaacaccaacatcaccacagagaccagcaagattctgctgcagaagaacatgcaaatagccaaccacaccctgaagtacggcacccaggccaggaagtttgatgtgaaccagttgcagaacaccactatcaagcggatcataaagaaggttcaggacctagaacgggcagcactgcctgcccaggagctggaggagtacaacaagatcctgttggatatggaaaccacctacagcgtggccactgtgtgccacccgaatggcagctgcctgcagctcgagccagatctgacgaatgtgatggccacgtcccggaaatatgaagacctgttatgggcatgggagggctggcgagacaaggcggggagagccatcctccagttttacccgaaatacgtggaactcatcaaccaggctgcccggctcaatggctatgtagatgcaggggactcgtggaggtctatgtacgagacaccatccctggagcaagacctggagcggctcttccaggagctgcagccactctacctcaacctgcatgcctacgtgcgccgggccctgcaccgtcactacggggcccagcacatcaacctggaggggcccattcctgctcacctgctggggaacatgtgggcgcagacctggtccaacatctatgacttggtggtgcccttcccttcagccccctcgatggacaccacagaggctatgctaaagcagggctggacgcccaggaggatgtttaaggaggctgatgatttcttcacctccctggggctgctgcccgtgcctcctgagttctggaacaagtcgatgctggagaagccaaccgacgggcgggaggtggtctgccacgcctcggcctgggacttctacaacggcaaggacttccggatcaagcagtgcaccaccgtgaacttggaggacctggtggtggcccaccacgaaatgggccacatccagtatttcatgcagtacaaagacttacctgtggccttgagggagggtgccaaccccggcttccatgaggccattggggacgtgctagccctctcagtgtctacgcccaagcacctgcacagtctcaacctgctgagcagtgagggtggcagcgacgagcatgacatcaactttctgatgaagatggcccttgacaagatcgcctttatccccttcagctacctcgtcgatcagtggcgctggagggtatttgatggaagcatcaccaaggagaactataaccaggagtggtggagcctcaggctgaagtaccagggcctctgccccccagtgcccaggactcaaggtgactttgacccaggggccaagttccacattccttctagcgtgccttacatcaggtactttgtcagcttcatcatccagttccagttccacgaggcactgtgccaggcagctggccacacgggccccctgcacaagtgtgacatctaccagtccaaggaggccgggcagcgcctggcgaccgccatgaagctgggcttcagtaggccgtggccggaagccatgcagctgatcacgggccagcccaacatgagcgcctcggccatgttgagctacttcaagccgctgctggactggctccgcacggagaacgagctgcatggggagaagctgggctggccgcagtacaactggacgccgaactccgctcgctcagaagggcccctcccagacagcggccgcgtcagcttcctgggcctggacctggatgcgcagcaggcccgcgtgggccagtggctgctgctcttcctgggcatcgccctgctggtagccaccctgggcctcagccagcggctcttcagcatccgccaccgcagcctccaccggcactcccacgggccccagttcggctccgaggtggagctgagacactcctgaggtgacccggctgggtcggccctgcccaagggcctcccaccagagactgggatgggaacactggtgggcagctgaggacacaccccacaccccagcccaccctgctcctcctgccctgtccctgtccccctcccctcccagtcctccagaccaccagccgccccagccccttctcccagcacacggctgcctgacactgagccccacctctccaagtctctctgtgaatacaattaaaggtcctgccctccccatctgagtctgtgtccctcacagggaagccagggacagggacaggctgctttcctgcctcctggcagtcaagtgggtcccgttactaggtttgttcctccatcctccttcaggagccggggaggatccccagagctctgccccagcacctcctggcgctggcgcctgtcttccctccagcccaggcagcccgccactgtcctgccaccgcaggcagcccctgtctggcccaagcactgacccacgcggactctgggaagcagacatcctgggctgctggcctcacatttccactggcagtggagcctttccctgctccacaaatggccaggtccccccaggggaaggcttccggctgttatcggctgcctcagggggcgagtaccttggagggcctgcttcaaggagggtgccccctggagggcacacaccagcctagtgcttaccttggctcctgcctgtaccagctccatgactctgctcgggtgaacagccttggctctcagacagccattctaacactgccagtgcagaggggcctcagacgctggagtgtagcagtggctgcacctgcacagggattagctgccagcagccaccctgctggcgtcccagcacacacctcctcactccctgcattggagggagtgtcattttaagggacatttttatgacttttatgtgtatgtttatgtagaaatttggaaaatacagaaaactgtaaagaaaataaaagccctttatatcaacgtcaagagataa

SEQ ID NO: 107253 - DNA, 2237 bp, Homo sapiens
  Payload ID: 1056
  Gene Symbol: ACE
  Gene Name: angiotensin I converting enzyme
  Uniprot ID: P12821
  ENST ID: ENST00000413513
  CDS Start-End: 23-2098
aggactctgctctcctgcggccatgggccagggttgggctactgcaggacttcccagcctcctcttcctgctgctctgctacgggcaccctctgctggtccccagccaggaggcatcccaacaggtgacagtcacccatgggacaagcagccaggcaacaaccagcagccagacaaccacccaccaggcgacggcccaccagacatcagcccagagcccaaacctggtgactgatgaggctgaggccagcaagtttgtggaggaatatgaccggacatcccaggtggtgtggaacgagtatgccgaggccaactggaactacaacaccaacatcaccacagagaccagcaagattctgctgcagaagaacatgcaaatagccaaccacaccctgaagtacggcacccaggccaggaagtttgatgtgaaccagttgcagaacaccactatcaagcggatcataaagaaggttcaggacctagaacgggcagcactgcctgcccaggagctggaggagtacaacaagatcctgttggatatggaaaccacctacagcgtggccactgtgtgccacccgaatggcagctgcctgcagctcgagccagatctgacgaatgtgatggccacgtcccggaaatatgaagacctgttatgggcatgggagggctggcgagacaaggcggggagagccatcctccagttttacccgaaatacgtggaactcatcaaccaggctgcccggctcaatggctatgtagatgcaggggactcgtggaggtctatgtacgagacaccatccctggagcaagacctggagcggctcttccaggagctgcagccactctacctcaacctgcatgcctacgtgcgccgggccctgcaccgtcactacggggcccagcacatcaacctggaggggcccattcctgctcacctgctggggaacatgtgggcgcagacctggtccaacatctatgacttggtggtgcccttcccttcagccccctcgatggacaccacagaggctatgctaaagcagggctggacgcccaggaggatgtttaaggaggctgatgatttcttcacctccctggggctgctgcccgtgcctcctgagttctggaacaagtcgatgctggagaagccaaccgacgggcgggaggtggtctgccacgcctcggcctgggacttctacaacggcaaggacttccggatcaagcagtgcaccaccgtgaacttggaggacctggtggtggcccaccacgaaatgggccacatccagtatttcatgcagtacaaagacttacctgtggccttgagggagggtgccaaccccggcttccatgaggccattggggacgtgctagccctctcagtgtctacgcccaagcacctgcacagtctcaacctgctgagcagtgagggtggcagcgacgagcatgacatcaactttctgatgaagatggcccttgacaagatcgcctttatccccttcagctacctcgtcgatcagtggcgctggagggtatttgatggaagcatcaccaaggagaactataaccaggagtggtggagcctcaggctgaagtaccagggcctctgccccccagtgcccaggactcaaggtgactttgacccaggggccaagttccacattccttctagcgtgccttacatcaggaccgccatgaagctgggcttcagtaggccgtggccggaagccatgcagctgatcacgggccagcccaacatgagcgcctcggccatgttgagctacttcaagccgctgctggactggctccgcacggagaacgagctgcatggggagaagctgggctggccgcagtacaactggacgccgaactccgctcgctcagaagggcccctcccagacagcggccgcgtcagcttcctgggcctggacctggatgcgcagcaggcccgcgtgggccagtggctgctgctcttcctgggcatcgccctgctggtagccaccctgggcctcagccagcggctcttcagcatccgccaccgcagcctccaccggcactcccacgggccccagttcggctccgaggtggagctgagacactcctgaggtgacccggctgggtcggccctgcccaagggcctcccaccagagactgggatgggaacactggtgggcagctgaggacacaccccacaccccagcccaccctgctcctcctgccctgtccctgtccccctcccctccc

SEQ ID NO: 107254 - DNA, 5120 bp, Homo sapiens
  Payload ID: 1056
  Gene Symbol: ACE
  Gene Name: angiotensin I converting enzyme
  ENST ID: ENST00000428043
  CDS Start-End: 35-3763
agaaggggcagagccgagcaccgcgcaccgcgtcatgggggccgcctcgggccgccgggggccggggctgctgctgccgctgccgctgctgttgctgctgccgccgcagcccgccctggcgttggaccccgggctgcagcccggcaacttttctgctgacgaggccggggcgcagctcttcgcgcagagctacaactccagcgccgaacaggtgctgttccagagcgtggccgccagctgggcgcacgacaccaacatcaccgcggagaatgcaaggcgccaggaggaagcagccctgctcagccaggagtttgcggaggcctggggccagaaggccaaggagctgtatgaaccgatctggcagaacttcacggacccgcagctgcgcaggatcatcggagctgtgcgcaccctgggctctgccaacctgcccctggctaagcggcagcagtacaacgccctgctaagcaacatgagcaggatctactccaccgccaaggtctgcctccccaacaagactgccacctgctggtccctggacccagatctcaccaacatcctggcttcctcgcgaagctacgccatgctcctgtttgcctgggagggctggcacaacgctgcgggcatcccgctgaaaccgctgtacgaggatttcactgccctcagcaatgaagcctacaagcaggacggcttcacagacacgggggcctactggcgctcctggtacaactcccccaccttcgaggacgatctggaacacctctaccaacagctagagcccctctacctgaacctccatgccttcgtccgccgcgcactgcatcgccgatacggagacagatacatcaacctcaggggacccatccctgctcatctgctgggagacatgtgggcccagagctgggaaaacatctacgacatggtggtgcctttcccagacaagcccaacctcgatgtcaccagtactatgctgcagcagggctggaacgccacgcacatgttccgggtggcagaggagttcttcacctccctggagctctcccccatgcctcccgagttctgggaagggtcgatgctggagaagccggccgacgggcgggaagtggtgtgccacgcctcggcttgggacttctacaacaggaaagacttcaggatcaagcagtgcacacgggtcacgatggaccagctctccacagtgcaccatgagatgggccatatacagtactacctgcagtacaaggatctgcccgtctccctgcgtcggggggccaaccccggcttccatgaggccattggggacgtgctggcgctctcggtctccactcctgaacatctgcacaaaatcggcctgctggaccgtgtcaccaatgacacggaaagtgacatcaattacttgctaaaaatggcactggaaaaaattgccttcctgccctttggctacttggtggaccagtggcgctggggggtctttagtgggcgtacccccccttcccgctacaacttcgactggtggtatcttcgaaccaagtatcaggggatctgtcctcctgttacccgaaacgaaacccactttgatgctggagctaagtttcatgttccaaatgtgacaccatacatcaggtactttgtgagttttgtcctgcagttccagttccatgaagccctgtgcaaggaggcaggctatgagggcccactgcaccagtgtgacatctaccggtccaccaaggcaggggccaagctccggaaggtgctgcaggctggctcctccaggccctggcaggaggtgctgaaggacatggtcggcttagatgccctggatgcccagccgctgctcaagtacttccagccagtcacccagtggctgcaggagcagaaccagcagaacggcgaggtcctgggctggcccgagtaccagtggcacccgccgttgcctgacaactacccggagggcatagacctggtgactgatgaggctgaggccagcaagtttgtggaggaatatgaccggacatcccaggtggtgtggaacgagtatgccgaggccaactggaactacaacaccaacatcaccacagagaccagcaagattctgctgcagaagaacatgcaaatagccaaccacaccctgaagtacggcacccaggccaggaagtttgatgtgaaccagttgcagaacaccactatcaagcggatcataaagaaggttcaggacctagaacgggcagcactgcctgcccaggagctggaggagtacaacaagatcctgttggatatggaaaccacctacagcgtggccactgtgtgccacccgaatggcagctgcctgcagctcgagccagatctgacgaatgtgatggccacgtcccggaaatatgaagacctgttatgggcatgggagggctggcgagacaaggcggggagagccatcctccagttttacccgaaatacgtggaactcatcaaccaggctgcccggctcaatggctatgtagatgcaggggactcgtggaggtctatgtacgagacaccatccctggagcaagacctggagcggctcttccaggagctgcagccactctacctcaacctgcatgcctacgtgcgccgggccctgcaccgtcactacggggcccagcacatcaacctggaggggcccattcctgctcacctgctggggaacatgtgggcgcagacctggtccaacatctatgacttggtggtgcccttcccttcagccccctcgatggacaccacagaggctatgctaaagcagggctggacgcccaggaggatgtttaaggaggctgatgatttcttcacctccctggggctgctgcccgtgcctcctgagttctggaacaagtcgatgctggagaagccaaccgacgggcgggaggtggtctgccacgcctcggcctgggacttctacaacggcaaggacttccggatcaagcagtgcaccaccgtgaacttggaggacctggtggtggcccaccacgaaatgggccacatccagtatttcatgcagtacaaagacttacctgtggccttgagggagggtgccaaccccggcttccatgaggccattggggacgtgctagccctctcagtgtctacgcccaagcacctgcacagtctcaacctgctgagcagtgagggtggcagcgacgagcatgacatcaactttctgatgaagatggcccttgacaagatcgcctttatccccttcagctacctcgtcgatcagtggcgctggagggtatttgatggaagcatcaccaaggagaactataaccaggagtggtggagcctcaggctgaagtaccagggcctctgccccccagtgcccaggactcaaggtgactttgacccaggggccaagttccacattccttctagcgtgccttacatcaggtactttgtcagcttcatcatccagttccagttccacgaggcactgtgccaggcagctggccacacgggccccctgcacaagtgtgacatctaccagtccaaggaggccgggcagcgcctggcgaccgccatgaagctgggcttcagtaggccgtggccggaagccatgcagctgatcacgggccagcccaacatgagcgcctcggccatgttgagctacttcaagccgctgctggactggctccgcacggagaacgagctgcatggggagaagctgggctggccgcagtacaactggacgccgaactccggtaccgccacccaccccacctccagccttgggtcttaaccccctccccaggctgggcagccatgcggctgacctcggagcctggccctgccccgcacccttgccctgccctgccctgccctgcccatgctgtctccttgcttcccgctcagctcgctcagaagggcccctcccagacagcggccgcgtcagcttcctgggcctggacctggatgcgcagcaggcccgcgtgggccagtggctgctgctcttcctgggcatcgccctgctggtagccaccctgggcctcagccagcggctcttcagcatccgccaccgcagcctccaccggcactcccacgggccccagttcggctccgaggtggagctgagacactcctgaggtgacccggctgggtcggccctgcccaagggcctcccaccagagactgggatgggaacactggtgggcagctgaggacacaccccacaccccagcccaccctgctcctcctgccctgtccctgtccccctcccctcccagtcctccagaccaccagccgccccagccccttctcccagcacacggctgcctgacactgagccccacctctccaagtctctctgtgaatacaattaaaggtcctgccctccccatctgagtctgtgtccctcacagggaagccagggacagggacaggctgctttcctgcctcctggcagtcaagtgggtcccgttactaggtttgttcctccatcctccttcaggagccggggaggatccccagagctctgccccagcacctcctggcgctggcgcctgtcttccctccagcccaggcagcccgccactgtcctgccaccgcaggcagcccctgtctggcccaagcactgacccacgcggactctgggaagcagacatcctgggctgctggcctcacatttccactggcagtggagcctttccctgctccacaaatggccaggtccccccaggggaaggcttccggctgttatcggctgcctcagggggcgagtaccttggagggcctgcttcaaggagggtgccccctggagggcacacaccagcctagtgcttaccttggctcctgcctgtaccagctccatgactctgctcgggtgaacagccttggctctcagacagccattctaacactgccagtgcagaggggcctcagacgctggagtgtagcagtggctgcacctgcacagggattagctgccagcagccaccctgctggcgtcccagcacacacctcctcactccctgcattggagggagtgtcattttaagggacatttttatgacttttatgtgtatgtttatgtagaaatttggaaaatacagaaaactgtaaagaaaataaaagccctttatatcaacgtcaagagataa

SEQ ID NO: 107255 - DNA, 982 bp, Homo sapiens
  Payload ID: 1056
  Gene Symbol: ACE
  Gene Name: angiotensin I converting enzyme
  ENST ID: ENST00000582005
  CDS Start-End: 25-462
gcaggactctgctctcctgcggccatgggccagggttgggctactgcaggacttcccagcctcctcttcctgctgctctgctacgggcaccctctgctggtccccagccaggaggcatcccaacaggtgacagtcacccatgggacaagcagccaggcaacaaccagcagccagacaaccacccaccaggcgacggcccaccagacatcagcccagagcccaaacctggtgactgatgaggctgaggccagcaagtttgtggaggaatatgaccggacatcccaggtggtgtggaacgagtatgccgaggccaactggaactacaacaccaacatcaccacagagaccagcaagattctgggcctttacgacacttgggggtcttctcttctctgcccctgcctggatatgtgttgcttgaccgcaggcatccagggaggctgcagaagaacatgcaaatagccaaccacaccctgaagtacggcacccaggccaggaagtttgatgtgaaccagttgcagaacaccactatcaagcggatcataaagaaggttcaggacctagaacgggcagcactgcctgcccaggagctggaggagtacaacaagatcctgttggatatggaaaccacctacagcgtggccactgtgtgccacccgaatggcagctgcctgcagctcgagccagatctgacgaatgtgatggccacgtcccggaaatatgaagacctgttatgggcatgggagggctggcgagacaaggcggggagagccatcctccagttttacccgaaatacgtggaactcatcaaccaggctgcccggctcaatggctatgtagatgcaggggactcgtggaggtctatgtacgagacaccatccctggagcaagacctggagcggctcttccaggagctgcagccactctacctcaacctgcatgcctacgtgcgccgggccctgcaccgtcactacggggccca

SEQ ID NO: 107256 - DNA, 1881 bp, Homo sapiens
  Payload ID: 1056
  Gene Symbol: ACE
  Gene Name: angiotensin I converting enzyme
  ENST ID: ENST00000578839
  CDS Start-End: 23-133
aggactctgctctcctgcggccatgggccagggttgggctactgcaggacttcccagcctcctcttcctgctgctctgctacgggcaccctctgctggtccccagccaggaggcatcccaacagacctggtgactgatgaggctgaggccagcaagtttgtggaggaatatgaccggacatcccaggtggtgtggaacgagtatgccgaggccaactggaactacaacaccaacatcaccacagagaccagcaagattctgctgcagaagaacatgcaaatagccaaccacaccctgaagtacggcacccaggccaggaagtttgatgtgaaccagttgcagaacaccactatcaagcggatcataaagaaggttcaggacctagaacgggcagcactgcctgcccaggagctggaggagtacaacaagatcctgttggatatggaaaccacctacagcgtggccactgtgtgccacccgaatggcagctgcctgcagctcgagccagatctgacgaatgtgatggccacgtcccggaaatatgaagacctgttatgggcatgggagggctggcgagacaaggcggggagagccatcctccagttttacccgaaatacgtggaactcatcaaccaggctgcccggctcaatgggaacatgtgggcgcagacctggtccaacatctatgacttggtggtgcccttcccttcagccccctcgatggacaccacagaggctatgctaaagcagggctggacgcccaggaggatgtttaaggaggctgatgatttcttcacctccctggggctgctgcccgtgcctcctgagttctggaacaagtcgatgctggagaagccaaccgacgggcgggaggtggtctgccacgcctcggcctgggacttctacaacggcaaggacttccggatcaagcagtgcaccaccgtgaacttggaggacctggtggtggcccaccacgaaatgggccacatccagtatttcatgcagtacaaagacttacctgtggccttgagggagggtgccaaccccggcttccatgaggccattggggacgtgctagccctctcagtgtctacgcccaagcacctgcacagtctcaacctgctgagcagtgagggtggcagcgacgagcatgacatcaactttctgatgaagatggcccttgacaagatcgcctttatccccttcagctacctcgtcgatcagtggcgctggagggtatttgatggaagcatcaccaaggagaactataaccaggagtggtggagcctcaggctgaagtaccagggcctctgccccccagtgcccaggactcaaggtgactttgacccaggggccaagttccacattccttctagcgtgccttacatcaggaccgccatgaagctgggcttcagtaggccgtggccggaagccatgcagctgatcacgggccagcccaacatgagcgcctcggccatgttgagctacttcaagccgctgctggactggctccgcacggagaacgagctgcatggggagaagctgggctggccgcagtacaactggacgccgaactccgctcgctcagaagggcccctcccagacagcggccgcgtcagcttcctgggcctggacctggatgcgcagcaggcccgcgtgggccagtggctgctgctcttcctgggcatcgccctgctggtagccaccctgggcctcagccagcggctcttcagcatccgccaccgcagcctccaccggcactcccacgggccccagttcggctccgaggtggagctgagacactcctgaggtgacccggctgggtcggccctgcccaagggcctcccaccagagactgggatgggaacactggtgggcagc

SEQ ID NO: 107257 - DNA, 1002 bp, Homo sapiens
  Payload ID: 1056
  Gene Symbol: ACE
  Gene Name: angiotensin I converting enzyme
  ENST ID: ENST00000582627
  CDS Start-End: 61-1002
ccgcggggcccgagcgccgggctgcgcgcacggcctgcgctcccagcatgcacgagttggatggatgagggtggctgctcccaggccgcgcccgccttcgccgaaggtgctgggcttggctctggggcccccgcgctctcgggcagctgccttctcacctccggacgctgtcgctgtcaccgtcaccgcactgcactgtccatccaccctccactcgcccggcctcttttctggtcccaatttctgctccaccattcccatgaggcagattccctccagaaggaggaagcgcggcttccgcaaactaaggaggaagcagccctgctcagccaggagtttgcggaggcctggggccagaaggccaaggagctgtatgaaccgatctggcagaacttcacggacccgcagctgcgcaggatcatcggagctgtgcgcaccctgggctctgccaacctgcccctggctaagcggcagcagtacaacgccctgctaagcaacatgagcaggatctactccaccgccaaggtctgcctccccaacaagactgccacctgctggtccctggacccagatctcaccaacatcctggcttcctcgcgaagctacgccatgctcctgtttgcctgggagggctggcacaacgctgcgggcatcccgctgaaaccgctgtacgaggatttcactgccctcagcaatgaagcctacaagcaggacggcttcacagacacgggggcctactggcgctcctggtacaactcccccaccttcgaggacgatctggaacacctctaccaacagctagagcccctctacctgaacctccatgccttcgtccgccgcgcactgcatcgccgatacggagacagatacatcaacctcaggggacccatccctgctcatctgctgggagacatgtgggcccagagctgggaaaacatctacgacatggtggtgcctttcccagacaagcccaacctcgatgtcaccagtactatgctgcag

SEQ ID NO: 107258 - DNA, 2551 bp, Homo sapiens
  Payload ID: 1056
  Gene Symbol: ACE
  Gene Name: angiotensin I converting enzyme
  ENST ID: ENST00000579314
  CDS Start-End: 23-649
aggactctgctctcctgcggccatgggccagggttgggctactgcaggacttcccagcctcctcttcctgctgctctgctacgggcaccctctgctggtccccagccaggaggcatcccaacaggtgacagtcacccatgggacaagcagccaggcaacaaccagcagccagacaaccacccaccaggcgacggcccaccagacatcagcccagagcccaaacctggtgactgatgaggctgaggccagcaagtttgtggaggaatatgaccggacatcccaggtggtgtggaacgagtatgccgaggccaactggaactacaacaccaacatcaccacagagaccagcaagattctgctgcagaagaacatgcaaatagccaaccacaccctgaagtacggcacccaggccaggaagtttgatgtgaaccagttgcagaacaccactatcaagcggatcataaagaaggttcaggacctagaacgggcagcactgcctgcccaggagctggaggagtacaacaagatcctgttggatatggaaaccacctacagcgtggccactgtgtgccacccgaatggcagctgcctgcagctcgagccagctctgaaattctctgagctccccttacaagcagaggtgagctaagggctggagctcaaggcattcaaacccctaccagatctgacgaatgtgatggccacgtcccggaaatatgaagacctgttatgggcatgggagggctggcgagacaaggcggggagagccatcctccagttttacccgaaatacgtggaactcatcaaccaggctgcccggctcaatggctatgtagatgcaggggactcgtggaggtctatgtacgagacaccatccctggagcaagacctggagcggctcttccaggagctgcagccactctacctcaacctgcatgcctacgtgcgccgggccctgcaccgtcactacggggcccagcacatcaacctggaggggcccattcctgctcacctgctggggaacatgtgggcgcagacctggtccaacatctatgacttggtggtgcccttcccttcagccccctcgatggacaccacagaggctatgctaaagcagggctggacgcccaggaggatgtttaaggaggctgatgatttcttcacctccctggggctgctgcccgtgcctcctgagttctggaacaagtcgatgctggagaagccaaccgacgggcgggaggtggtctgccacgcctcggcctgggacttctacaacggcaaggacttccggatcaagcagtgcaccaccgtgaacttggaggacctggtggtggcccaccacgaaatgggccacatccagtatttcatgcagtacaaagacttacctgtggccttgagggagggtgccaaccccggcttccatgaggccattggggacgtgctagccctctcagtgtctacgcccaagcacctgcacagtctcaacctgctgagcagtgagggtggcagcgacgagcatgacatcaactttctgatgaagatggcccttgacaagatcgcctttatccccttcagctacctcgtcgatcagtggcgctggagggtatttgatggaagcatcaccaaggagaactataaccaggagtggtggagcctcaggctgaagtaccagggcctctgccccccagtgcccaggactcaaggtgactttgacccaggggccaagttccacattccttctagcgtgccttacatcaggtactttgtcagcttcatcatccagttccagttccacgaggcactgtgccaggcagctggccacacgggccccctgcacaagtgtgacatctaccagtccaaggaggccgggcagcgcctggcgaccgccatgaagctgggcttcagtaggccgtggccggaagccatgcagctgatcacgggccagcccaacatgagcgcctcggccatgttgagctacttcaagccgctgctggactggctccgcacggagaacgagctgcatggggagaagctgggctggccgcagtacaactggacgccgaactccgctcgctcagaagggcccctcccagacagcggccgcgtcagcttcctgggcctggacctggatgcgcagcaggcccgcgtgggccagtggctgctgctcttcctgggcatcgccctgctggtagccaccctgggcctcagccagcggctcttcagcatccgccaccgcagcctccaccggcactcccacgggccccagttcggctccgaggtggagctgagacactcctgaggtgacccggctgggtcggccctgcccaagggcctcccaccagagactgggatgggaacactggtgggcagctgaggacacaccccacaccccagcccaccctgctcctcctgccctgtccctgtccccctcccctcccagtcctccagaccaccagccgccccagccccttctcccagcacacggctgcctgacactgagccccacctctccaagtctctctgtgaatacaattaaaggtcctgccctccc

SEQ ID NO: 107259 - DNA, 846 bp, Homo sapiens
  Payload ID: 1056
  Gene Symbol: ACE
  Gene Name: angiotensin I converting enzyme
  ENST ID: ENST00000582761
  CDS Start-End: 1-846
ttggatatggaaaccacctacagcgtggccactgtgtgccacccgaatggcagctgcctgcagctcgagccagatctgacgaatgtgatggccacgtcccggaaatatgaagacctgttatgggcatgggagggctggcgagacaaggcggggagagccatcctccagttttacccgaaatacgtggaactcatcaaccaggctgcccggctcaatggctatgtagatgcaggggactcgtggaggtctatgtacgagacaccatccctggagcaagacctggagcggctcttccaggagctgcagccactctacctcaacctgcatgcctacgtgcgccgggccctgcaccgtcactacggggcccagcacatcaacctggaggggcccattcctgctcacctgctggggaacatgtgggcgcagacctggtccaacatctatgacttggtggtgcccttcccttcagccccctcgatggacaccacagaggctatgctaaagcagggctggacgcccaggaggatgtttaaggaggctgatgatttcttcacctccctggggctgctgcccgtgcctcctgagttctggaacaagtcgatgctggagaagccaaccgacgggcgggaggtggtctgccacgcctcggcctgggacttctacaacgagcatgacatcaactttctgatgaagatggcccttgacaagatcgcctttatccccttcagctacctcgtcgatcagtggcgctggagggtatttgatggaagcatcaccaaggagaactataaccaggagtggtggagcctcaggctgaagtaccagggcctctgccccccagtgccc

SEQ ID NO: 107260 - DNA, 2398 bp, Homo sapiens
  Payload ID: 1056
  Gene Symbol: ACE
  Gene Name: angiotensin I converting enzyme
  ENST ID: ENST00000582678
  CDS Start-End: 35-541
agaaggggcagagccgagcaccgcgcaccgcgtcatgggggccgcctcgggccgccgggggccggggctgctgctgccgctgccgctgctgttgctgctgccgccgcagcccgccctggcgttggaccccgggctgcagcccggcaacttttctgctgacgaggccggggcgcagctcttcgcgcagagctacaactccagcgccgaacaggtgctgttccagagcgtggccgccagctgggcgcacgacaccaacatcaccgcggagaatgcaaggcgccaggaggaagcagccctgctcagccaggagtttgcggaggcctggggccagaaggccaaggagctgtatgaaccgatctggcagaacttcacggacccgcagctgcgcaggatcatcggagctgtgcgcaccctgggctctgccaacctgcccctggctaagcggcagcagatctcaccaacatcctggcttcctcgcgaagctacgccatgctcctgtttgcctgggagggctggcacaacgctgcgggcatcccgctgaaaccgctgtacgaggatttcactgccctcagcaatgaagcctacaagcaggacggcttcacagacacgggggcctactggcgctcctggtacaactcccccaccttcgaggacgatctggaacacctctaccaacagctagagcccctctacctgaacctccatgccttcgtccgccgcgcactgcatcgccgatacggagacagatacatcaacctcaggggacccatccctgctcatctgctgggagacatgtgggcccagagctgggaaaacatctacgacatggtggtgcctttcccagacaagcccaacctcgatgtcaccagtactatgctgcagcagggctggaacgccacgcacatgttccgggtggcagaggagttcttcacctccctggagctctcccccatgcctcccgagttctgggaagggtcgatgctggagaagccggccgacgggcgggaagtggtgtgccacgcctcggcttgggacttctacaacaggaaagacttcaggatcaagcagtgcacacgggtcacgatggaccagctctccacagtgcaccatgagatgggccatatacagtactacctgcagtacaaggatctgcccgtctccctgcgtcggggggccaaccccggcttccatgaggccattggggacgtgctggcgctctcggtctccactcctgaacatctgcacaaaatcggcctgctggaccgtgtcaccaatgacacggaaagtgacatcaattacttgctaaaaatggcactggaaaaaattgccttcctgccctttggctacttggtggaccagtggcgctggggggtctttagtgggcgtacccccccttcccgctacaacttcgactggtggtatcttcgaaccaagtatcaggggatctgtcctcctgttacccgaaacgaaacccactttgatgctggagctaagtttcatgttccaaatgtgacaccatacatcaggtactttgtgagttttgtcctgcagttccagttccatgaagccctgtgcaaggaggcaggctatgagggcccactgcaccagtgtgacatctaccggtccaccaaggcaggggccaagctccggaaggtgctgcaggctggctcctccaggccctggcaggaggtgctgaaggacatggtcggcttagatgccctggatgcccagccgctgctcaagtacttccagccagtcacccagtggctgcaggagcagaaccagcagaacggcgaggtcctgggctggcccgagtaccagtggcacccgccgttgcctgacaactacccggagggcatagacctggtgactgatgaggctgaggccagcaagtttgtggaggaatatgaccggacatcccaggtggtgtggaacgagtatgccgaggccaactggaactacaacaccaacatcaccacagagaccagcaagattctggtgggagccacctccccacccccaaacctgagcatgtgcatacacacagagatgctgtcccgctcaccacacagtggggctgccaccacattttaaattgaatatttaaaacaatactcaatttcgggccgggcgcggtggctcacgcctgtaatcccagcactttgggagggggaggcgggcggatcacgaggtcagatcaagaccatcctggctaacacggtgaaaccccatctctagtaaaaatacaaaaattagccgggtgtggtggcgagcacctgtagtcccagtactcaggaggctgaggcaggagaatggcatgaacccgggaggcagagcttgcagtgagccgagatggcaccactgcactccagcctgggcgacagagcgagactccatc

SEQ ID NO: 107261 - DNA, 867 bp, Homo sapiens
  Payload ID: 1056
  Gene Symbol: ACE
  Gene Name: angiotensin I converting enzyme
  ENST ID: ENST00000579726
  CDS Start-End: 1-359
tgcaggctggctcctccaggccctggcaggaggtgctgaaggacatggtcggcttagatgccctggatgcccagccgctgctcaagtacttccagccagtcacccagtggctgcaggagcagaaccagcagaacggcgaggtcctgggctggcccgagtaccagtggcacccgccgttgcctgacaactacccggagggcataggtgacagtcacccatgggacaagcagccaggcaacaaccagcagccagacaaccacccaccaggcgacggcccaccagacatcagcccagagcccaagtgggaccatgcaggggaggggcagggtgccaggggtgggagaggcggggccgggtagggacagggcagggtacaagggagtgcgagagggataatggcttctggtgagaccacaaacctggagaggggaggcagaggtttgtctgtttccctgcactctgtcccacagacctggtgactgatgaggctgaggccagcaagtttgtggaggaatatgaccggacatcccaggtggtgtggaacgagtatgccgaggccaactggaactacaacaccaacatcaccacagagaccagcaagattctggcatccagggaggctgcagaagaacatgcaaatagccaaccacaccctgaagtacggcacccaggccaggaagtttgatgtgaaccagttgcagaacaccactatcaagcggatcataaagaaggttcaggacctagaacgggcagcactgcctgcccaggagctggaggagtacaacaagatcctgttggatatggaaaccacctacagcgtggccactgtgtgccacccgaatggcagctgcctgcagctcgagccag

SEQ ID NO: 107262 - DNA, 546 bp, Homo sapiens
  Payload ID: 1056
  Gene Symbol: ACE
  Gene Name: angiotensin I converting enzyme
  ENST ID: ENST00000579409
  CDS Start-End: 1-416
ccaggactcaaggtgactttgacccaggggccaagttccacattccttctagcgtgccttacatcaggtactttgtcagcttcatcatccagttccagttccacgaggcactgtgccaggcagctggccacacgggccccctgcacaagtgtgacatctaccagtccaaggaggccgggcagcgcctggcgaccgccatgaagctgggcttcagtaggccgtggccggaagccatgcagctgatcacgggccagcccaacatgagcgcctcggccatgttgagctacttcaagccgctgctggactggctccgcacggagaacgagctgcatggggagaagctgggctggccgcagtacaactggacgccgaactccggtaccgccacccaccccacctccagccttgggtcttaaccccctccccaggctgggcagccatgcggctgacctcggagcctggccctgccccgcacccttgccctgccctgccctgccctgcccatgctgtctccttgcttcccgctcagctcgctcagaagggccc

SEQ ID NO: 107263 - DNA, 808 bp, Homo sapiens
  Payload ID: 1056
  Gene Symbol: ACE
  Gene Name: angiotensin I converting enzyme
  ENST ID: ENST00000579204
  CDS Start-End: 1-111
atgggccagggttgggctactgcaggacttcccagcctcctcttcctgctgctctgctacgggcaccctctgctggtccccagccaggaggcatcccaacagacctggtgactgatgaggctgaggccagcaagtttgtggaggaatatgaccggacatcccaggtggtgtggaacgagtatgccgaggccaactggaactacaacaccaacatcaccacagagaccagcaagattctgctgcagaagaacatgcaaatagccaaccacaccctgaagtacggcacccaggccaggaagtttgatgtgaaccagttgcagaacaccactatcaagcggatcataaagaaggttcaggacctagaacgggcagcactgcctgcccaggagctggaggagtacaacaagatcctgttggatatggaaaccacctacagcgtggccactgtgtgccacccgaatggcagctgcctgcagctcgagccagctctgaaattctctgagctccccttacaagcagaggtgagctaagggctggagctcaaggcattcaaacccctaccagatctgacgaatgtgatggccacgtcccggaaatatgaagacctgttatgggcatgggagggctggcgagacaaggcggggagagccatcctccagttttacccgaaatacgtggaactcatcaaccaggctgcccggctcaatggctatgtagatgcaggggactcgtggaggtctatgtacgagacaccatccctggagcaagacctggagcggctcttccaggagctgcagccactctacct

SEQ ID NO: 107264 - DNA, 3393 bp, Homo sapiens
  Payload ID: 1057
  Gene Symbol: ACE2
  Gene Name: angiotensin I converting enzyme 2
  Uniprot ID: Q9BYF1
  ENST ID: ENST00000252519
  CDS Start-End: 104-2521
cgcccaacccaagttcaaaggctgataagagagaaaatctcatgaggaggttttagtctagggaaagtcattcagtggatgtgatcttggctcacaggggacgatgtcaagctcttcctggctccttctcagccttgttgctgtaactgctgctcagtccaccattgaggaacaggccaagacatttttggacaagtttaaccacgaagccgaagacctgttctatcaaagttcacttgcttcttggaattataacaccaatattactgaagagaatgtccaaaacatgaataatgctggggacaaatggtctgcctttttaaaggaacagtccacacttgcccaaatgtatccactacaagaaattcagaatctcacagtcaagcttcagctgcaggctcttcagcaaaatgggtcttcagtgctctcagaagacaagagcaaacggttgaacacaattctaaatacaatgagcaccatctacagtactggaaaagtttgtaacccagataatccacaagaatgcttattacttgaaccaggtttgaatgaaataatggcaaacagtttagactacaatgagaggctctgggcttgggaaagctggagatctgaggtcggcaagcagctgaggccattatatgaagagtatgtggtcttgaaaaatgagatggcaagagcaaatcattatgaggactatggggattattggagaggagactatgaagtaaatggggtagatggctatgactacagccgcggccagttgattgaagatgtggaacatacctttgaagagattaaaccattatatgaacatcttcatgcctatgtgagggcaaagttgatgaatgcctatccttcctatatcagtccaattggatgcctccctgctcatttgcttggtgatatgtggggtagattttggacaaatctgtactctttgacagttccctttggacagaaaccaaacatagatgttactgatgcaatggtggaccaggcctgggatgcacagagaatattcaaggaggccgagaagttctttgtatctgttggtcttcctaatatgactcaaggattctgggaaaattccatgctaacggacccaggaaatgttcagaaagcagtctgccatcccacagcttgggacctggggaagggcgacttcaggatccttatgtgcacaaaggtgacaatggacgacttcctgacagctcatcatgagatggggcatatccagtatgatatggcatatgctgcacaaccttttctgctaagaaatggagctaatgaaggattccatgaagctgttggggaaatcatgtcactttctgcagccacacctaagcatttaaaatccattggtcttctgtcacccgattttcaagaagacaatgaaacagaaataaacttcctgctcaaacaagcactcacgattgttgggactctgccatttacttacatgttagagaagtggaggtggatggtctttaaaggggaaattcccaaagaccagtggatgaaaaagtggtgggagatgaagcgagagatagttggggtggtggaacctgtgccccatgatgaaacatactgtgaccccgcatctctgttccatgtttctaatgattactcattcattcgatattacacaaggaccctttaccaattccagtttcaagaagcactttgtcaagcagctaaacatgaaggccctctgcacaaatgtgacatctcaaactctacagaagctggacagaaactgttcaatatgctgaggcttggaaaatcagaaccctggaccctagcattggaaaatgttgtaggagcaaagaacatgaatgtaaggccactgctcaactactttgagcccttatttacctggctgaaagaccagaacaagaattcttttgtgggatggagtaccgactggagtccatatgcagaccaaagcatcaaagtgaggataagcctaaaatcagctcttggagataaagcatatgaatggaacgacaatgaaatgtacctgttccgatcatctgttgcatatgctatgaggcagtactttttaaaagtaaaaaatcagatgattctttttggggaggaggatgtgcgagtggctaatttgaaaccaagaatctcctttaatttctttgtcactgcacctaaaaatgtgtctgatatcattcctagaactgaagttgaaaaggccatcaggatgtcccggagccgtatcaatgatgctttccgtctgaatgacaacagcctagagtttctggggatacagccaacacttggacctcctaaccagccccctgtttccatatggctgattgtttttggagttgtgatgggagtgatagtggttggcattgtcatcctgatcttcactgggatcagagatcggaagaagaaaaataaagcaagaagtggagaaaatccttatgcctccatcgatattagcaaaggagaaaataatccaggattccaaaacactgatgatgttcagacctccttttagaaaaatctatgtttttcctcttgaggtgattttgttgtatgtaaatgttaatttcatggtatagaaaatataagatgataaagatatcattaaatgtcaaaactatgactctgttcagaaaaaaaattgtccaaagacaacatggccaaggagagagcatcttcattgacattgctttcagtatttatttctgtctctggatttgacttctgttctgtttcttaataaggattttgtattagagtatattagggaaagtgtgtatttggtctcacaggctgttcagggataatctaaatgtaaatgtctgttgaatttctgaagttgaaaacaaggatatatcattggagcaagtgttggatcttgtatggaatatggatggatcacttgtaaggacagtgcctgggaactggtgtagctgcaaggattgagaatggcatgcattagctcactttcatttaatccattgtcaaggatgacatgctttcttcacagtaactcagttcaagtactatggtgatttgcctacagtgatgtttggaatcgatcatgctttcttcaaggtgacaggtctaaagagagaagaatccagggaacaggtagaggacattgctttttcacttccaaggtgcttgatcaacatctccctgacaacacaaaactagagccaggggcctccgtgaactcccagagcatgcctgatagaaactcatttctactgttctctaactgtggagtgaatggaaattccaactgtatgttcaccctctgaagtgggtacccagtctcttaaatcttttgtatttgctcacagtgtttgagcagtgctgagcacaaagcagacactcaataaatgctagatttacacactc

SEQ ID NO: 107265 - DNA, 3507 bp, Homo sapiens
  Payload ID: 1057
  Gene Symbol: ACE2
  Gene Name: angiotensin I converting enzyme 2
  Uniprot ID: Q9BYF1
  ENST ID: ENST00000427411
  CDS Start-End: 218-2635
gttgttgtgatcccatggctacagaggatcaggagttgacatagatactctttggatttcataccatgtggaggctttcttacttccacgtgaccttgactgagttttgaatagcgcccaacccaagttcaaaggctgataagagagaaaatctcatgaggaggttttagtctagggaaagtcattcagtggatgtgatcttggctcacaggggacgatgtcaagctcttcctggctccttctcagccttgttgctgtaactgctgctcagtccaccattgaggaacaggccaagacatttttggacaagtttaaccacgaagccgaagacctgttctatcaaagttcacttgcttcttggaattataacaccaatattactgaagagaatgtccaaaacatgaataatgctggggacaaatggtctgcctttttaaaggaacagtccacacttgcccaaatgtatccactacaagaaattcagaatctcacagtcaagcttcagctgcaggctcttcagcaaaatgggtcttcagtgctctcagaagacaagagcaaacggttgaacacaattctaaatacaatgagcaccatctacagtactggaaaagtttgtaacccagataatccacaagaatgcttattacttgaaccaggtttgaatgaaataatggcaaacagtttagactacaatgagaggctctgggcttgggaaagctggagatctgaggtcggcaagcagctgaggccattatatgaagagtatgtggtcttgaaaaatgagatggcaagagcaaatcattatgaggactatggggattattggagaggagactatgaagtaaatggggtagatggctatgactacagccgcggccagttgattgaagatgtggaacatacctttgaagagattaaaccattatatgaacatcttcatgcctatgtgagggcaaagttgatgaatgcctatccttcctatatcagtccaattggatgcctccctgctcatttgcttggtgatatgtggggtagattttggacaaatctgtactctttgacagttccctttggacagaaaccaaacatagatgttactgatgcaatggtggaccaggcctgggatgcacagagaatattcaaggaggccgagaagttctttgtatctgttggtcttcctaatatgactcaaggattctgggaaaattccatgctaacggacccaggaaatgttcagaaagcagtctgccatcccacagcttgggacctggggaagggcgacttcaggatccttatgtgcacaaaggtgacaatggacgacttcctgacagctcatcatgagatggggcatatccagtatgatatggcatatgctgcacaaccttttctgctaagaaatggagctaatgaaggattccatgaagctgttggggaaatcatgtcactttctgcagccacacctaagcatttaaaatccattggtcttctgtcacccgattttcaagaagacaatgaaacagaaataaacttcctgctcaaacaagcactcacgattgttgggactctgccatttacttacatgttagagaagtggaggtggatggtctttaaaggggaaattcccaaagaccagtggatgaaaaagtggtgggagatgaagcgagagatagttggggtggtggaacctgtgccccatgatgaaacatactgtgaccccgcatctctgttccatgtttctaatgattactcattcattcgatattacacaaggaccctttaccaattccagtttcaagaagcactttgtcaagcagctaaacatgaaggccctctgcacaaatgtgacatctcaaactctacagaagctggacagaaactgttcaatatgctgaggcttggaaaatcagaaccctggaccctagcattggaaaatgttgtaggagcaaagaacatgaatgtaaggccactgctcaactactttgagcccttatttacctggctgaaagaccagaacaagaattcttttgtgggatggagtaccgactggagtccatatgcagaccaaagcatcaaagtgaggataagcctaaaatcagctcttggagataaagcatatgaatggaacgacaatgaaatgtacctgttccgatcatctgttgcatatgctatgaggcagtactttttaaaagtaaaaaatcagatgattctttttggggaggaggatgtgcgagtggctaatttgaaaccaagaatctcctttaatttctttgtcactgcacctaaaaatgtgtctgatatcattcctagaactgaagttgaaaaggccatcaggatgtcccggagccgtatcaatgatgctttccgtctgaatgacaacagcctagagtttctggggatacagccaacacttggacctcctaaccagccccctgtttccatatggctgattgtttttggagttgtgatgggagtgatagtggttggcattgtcatcctgatcttcactgggatcagagatcggaagaagaaaaataaagcaagaagtggagaaaatccttatgcctccatcgatattagcaaaggagaaaataatccaggattccaaaacactgatgatgttcagacctccttttagaaaaatctatgtttttcctcttgaggtgattttgttgtatgtaaatgttaatttcatggtatagaaaatataagatgataaagatatcattaaatgtcaaaactatgactctgttcagaaaaaaaattgtccaaagacaacatggccaaggagagagcatcttcattgacattgctttcagtatttatttctgtctctggatttgacttctgttctgtttcttaataaggattttgtattagagtatattagggaaagtgtgtatttggtctcacaggctgttcagggataatctaaatgtaaatgtctgttgaatttctgaagttgaaaacaaggatatatcattggagcaagtgttggatcttgtatggaatatggatggatcacttgtaaggacagtgcctgggaactggtgtagctgcaaggattgagaatggcatgcattagctcactttcatttaatccattgtcaaggatgacatgctttcttcacagtaactcagttcaagtactatggtgatttgcctacagtgatgtttggaatcgatcatgctttcttcaaggtgacaggtctaaagagagaagaatccagggaacaggtagaggacattgctttttcacttccaaggtgcttgatcaacatctccctgacaacacaaaactagagccaggggcctccgtgaactcccagagcatgcctgatagaaactcatttctactgttctctaactgtggagtgaatggaaattccaactgtatgttcaccctctgaagtgggtacccagtctcttaaatcttttgtatttgctcacagtgtttgagcagtgctgagcacaaagcagacactcaataaatgctagatttacacactc

SEQ ID NO: 107266 - DNA, 2356 bp, Homo sapiens
  Payload ID: 1058
  Gene Symbol: AGTR1
  Gene Name: angiotensin II receptor, type 1
  Uniprot ID: P30556
  ENST ID: ENST00000349243
  CDS Start-End: 389-1468
actataaattcggagctgcctcctcgccaatgattccagcgcctgacagccaggaccccaggcagcagcgagtgacaggacgtctggaccggcgcgccgctagcagctctgccgggccgcggcggtgatcgatggggagcggctggagcggacccagcgagtgagggcgcacagccgggacgccgaggcggcgggcgggagacccgcaccagcgcagccggccctcggcgggacgtgacgcagcgcccggggcgcgggtttgatatttgacaaattgatctaaaatggctgggtttttatctgaataactcactgatgccatcccagaaagtcggcaccaggtgtatttgatatagtgtttgcaacaaattcgacccaggtgatcaaaatgattctcaactcttctactgaagatggtattaaaagaatccaagatgattgtcccaaagctggaaggcataattacatatttgtcatgattcctactttatacagtatcatctttgtggtgggaatatttggaaacagcttggtggtgatagtcatttacttttatatgaagctgaagactgtggccagtgtttttcttttgaatttagcactggctgacttatgctttttactgactttgccactatgggctgtctacacagctatggaataccgctggccctttggcaattacctatgtaagattgcttcagccagcgtcagtttcaacctgtacgctagtgtgtttctactcacgtgtctcagcattgatcgatacctggctattgttcacccaatgaagtcccgccttcgacgcacaatgcttgtagccaaagtcacctgcatcatcatttggctgctggcaggcttggccagtttgccagctataatccatcgaaatgtatttttcattgagaacaccaatattacagtttgtgctttccattatgagtcccaaaattcaaccctcccgatagggctgggcctgaccaaaaatatactgggtttcctgtttccttttctgatcattcttacaagttatactcttatttggaaggccctaaagaaggcttatgaaattcagaagaacaaaccaagaaatgatgatatttttaagataattatggcaattgtgcttttctttttcttttcctggattccccaccaaatattcacttttctggatgtattgattcaactaggcatcatacgtgactgtagaattgcagatattgtggacacggccatgcctatcaccatttgtatagcttattttaacaattgcctgaatcctcttttttatggctttctggggaaaaaatttaaaagatattttctccagcttctaaaatatattcccccaaaagccaaatcccactcaaacctttcaacaaaaatgagcacgctttcctaccgcccctcagataatgtaagctcatccaccaagaagcctgcaccatgttttgaggttgagtgacatgttcgaaacctgtccataaagtaattttgtgaaagaaggagcaagagaacattcctctgcagcacttcactaccaaatgagcattagctacttttcagaattgaaggagaaaatgcattatgtggactgaaccgacttttctaaagctctgaacaaaagcttttctttccttttgcaacaagacaaagcaaagccacattttgcattagacagatgacggctgctcgaagaacaatgtcagaaactcgatgaatgtgttgatttgagaaattttactgacagaaatgcaatctccctagcctgcttttgtcctgttattttttatttccacataaaggtatttagaatatattaaatcgttagaggagcaacaggagatgagagttccagattgttctgtccagtttccaaagggcagtaaagttttcgtgccggttttcagctattagcaactgtgctacacttgcacctggtactgcacattttgtacaaagatatgctaagcagtagtcgtcaagttgcagatctttttgtgaaattcaacctgtgtcttataggtttccactgccaaaacaatgcccgtaagatggcttatttgtataatggtgttactaaagtcacatataaaagttaaactacttgtaaaggtgctgcactggtcccaagtagtagtgtcttcctagtatattagtttgatttaatatctgagaagtgtatatagtttgtggtaaaaagattatatatcataaagtatgccttcctgtttaaaaaaagtatatattctacacatatatgtatatgtatatctatatctctaaactgctgttaattgattaaaatctggcaaagttatatttactttaaaataaaataattttattgcaa

SEQ ID NO: 107267 - DNA, 2252 bp, Homo sapiens
  Payload ID: 1058
  Gene Symbol: AGTR1
  Gene Name: angiotensin II receptor, type 1
  Uniprot ID: P30556
  ENST ID: ENST00000404754
  CDS Start-End: 280-1359
agccaggaccccaggcagcagcgagtgacaggacgtctggaccggcgcgccgctagcagctctgccgggccgcggcggtgatcgatggggagcggctggagcggacccagcgagtgagggcgcacagccgggacgccgaggcggcgggcgggagacccgcaccagcgcagccggccctcggcgggacgtgacgcagcgcccggggcgcgggtgagtccgcgcggaccgccaggtgtatttgatatagtgtttgcaacaaattcgacccaggtgatcaaaatgattctcaactcttctactgaagatggtattaaaagaatccaagatgattgtcccaaagctggaaggcataattacatatttgtcatgattcctactttatacagtatcatctttgtggtgggaatatttggaaacagcttggtggtgatagtcatttacttttatatgaagctgaagactgtggccagtgtttttcttttgaatttagcactggctgacttatgctttttactgactttgccactatgggctgtctacacagctatggaataccgctggccctttggcaattacctatgtaagattgcttcagccagcgtcagtttcaacctgtacgctagtgtgtttctactcacgtgtctcagcattgatcgatacctggctattgttcacccaatgaagtcccgccttcgacgcacaatgcttgtagccaaagtcacctgcatcatcatttggctgctggcaggcttggccagtttgccagctataatccatcgaaatgtatttttcattgagaacaccaatattacagtttgtgctttccattatgagtcccaaaattcaaccctcccgatagggctgggcctgaccaaaaatatactgggtttcctgtttccttttctgatcattcttacaagttatactcttatttggaaggccctaaagaaggcttatgaaattcagaagaacaaaccaagaaatgatgatatttttaagataattatggcaattgtgcttttctttttcttttcctggattccccaccaaatattcacttttctggatgtattgattcaactaggcatcatacgtgactgtagaattgcagatattgtggacacggccatgcctatcaccatttgtatagcttattttaacaattgcctgaatcctcttttttatggctttctggggaaaaaatttaaaagatattttctccagcttctaaaatatattcccccaaaagccaaatcccactcaaacctttcaacaaaaatgagcacgctttcctaccgcccctcagataatgtaagctcatccaccaagaagcctgcaccatgttttgaggttgagtgacatgttcgaaacctgtccataaagtaattttgtgaaagaaggagcaagagaacattcctctgcagcacttcactaccaaatgagcattagctacttttcagaattgaaggagaaaatgcattatgtggactgaaccgacttttctaaagctctgaacaaaagcttttctttccttttgcaacaagacaaagcaaagccacattttgcattagacagatgacggctgctcgaagaacaatgtcagaaactcgatgaatgtgttgatttgagaaattttactgacagaaatgcaatctccctagcctgcttttgtcctgttattttttatttccacataaaggtatttagaatatattaaatcgttagaggagcaacaggagatgagagttccagattgttctgtccagtttccaaagggcagtaaagttttcgtgccggttttcagctattagcaactgtgctacacttgcacctggtactgcacattttgtacaaagatatgctaagcagtagtcgtcaagttgcagatctttttgtgaaattcaacctgtgtcttataggtttccactgccaaaacaatgcccgtaagatggcttatttgtataatggtgttactaaagtcacatataaaagttaaactacttgtaaaggtgctgcactggtcccaagtagtagtgtcttcctagtatattagtttgatttaatatctgagaagtgtatatagtttgtggtaaaaagattatatatcataaagtatgccttcctgtttaaaaaaagtatatattctacacatatatgtatatgtatatctatatctctaaactgctgttaattgattaaaatctggcaaagttatatttactttaaaataaaataattttattgcaatgtat

SEQ ID NO: 107268 - DNA, 2172 bp, Homo sapiens
  Payload ID: 1058
  Gene Symbol: AGTR1
  Gene Name: angiotensin II receptor, type 1
  ENST ID: ENST00000402260
  CDS Start-End: 120-1286
agggcatgccattgcaagagaatgctcagccatgttcatctggggacctgctcctggtagagcaataggatctgtgtgcccagcaccactgcccacctagctgtcctggcctgtgcccaatgctgaccttcacctcagagtgtggctgtaccacattcggtgtatttgatatagtgtttgcaacaaattcgacccaggtgatcaaaatgattctcaactcttctactgaagatggtattaaaagaatccaagatgattgtcccaaagctggaaggcataattacatatttgtcatgattcctactttatacagtatcatctttgtggtgggaatatttggaaacagcttggtggtgatagtcatttacttttatatgaagctgaagactgtggccagtgtttttcttttgaatttagcactggctgacttatgctttttactgactttgccactatgggctgtctacacagctatggaataccgctggccctttggcaattacctatgtaagattgcttcagccagcgtcagtttcaacctgtacgctagtgtgtttctactcacgtgtctcagcattgatcgatacctggctattgttcacccaatgaagtcccgccttcgacgcacaatgcttgtagccaaagtcacctgcatcatcatttggctgctggcaggcttggccagtttgccagctataatccatcgaaatgtatttttcattgagaacaccaatattacagtttgtgctttccattatgagtcccaaaattcaaccctcccgatagggctgggcctgaccaaaaatatactgggtttcctgtttccttttctgatcattcttacaagttatactcttatttggaaggccctaaagaaggcttatgaaattcagaagaacaaaccaagaaatgatgatatttttaagataattatggcaattgtgcttttctttttcttttcctggattccccaccaaatattcacttttctggatgtattgattcaactaggcatcatacgtgactgtagaattgcagatattgtggacacggccatgcctatcaccatttgtatagcttattttaacaattgcctgaatcctcttttttatggctttctggggaaaaaatttaaaagatattttctccagcttctaaaatatattcccccaaaagccaaatcccactcaaacctttcaacaaaaatgagcacgctttcctaccgcccctcagataatgtaagctcatccaccaagaagcctgcaccatgttttgaggttgagtgacatgttcgaaacctgtccataaagtaattttgtgaaagaaggagcaagagaacattcctctgcagcacttcactaccaaatgagcattagctacttttcagaattgaaggagaaaatgcattatgtggactgaaccgacttttctaaagctctgaacaaaagcttttctttccttttgcaacaagacaaagcaaagccacattttgcattagacagatgacggctgctcgaagaacaatgtcagaaactcgatgaatgtgttgatttgagaaattttactgacagaaatgcaatctccctagcctgcttttgtcctgttattttttatttccacataaaggtatttagaatatattaaatcgttagaggagcaacaggagatgagagttccagattgttctgtccagtttccaaagggcagtaaagttttcgtgccggttttcagctattagcaactgtgctacacttgcacctggtactgcacattttgtacaaagatatgctaagcagtagtcgtcaagttgcagatctttttgtgaaattcaacctgtgtcttataggtttccactgccaaaacaatgcccgtaagatggcttatttgtataatggtgttactaaagtcacatataaaagttaaactacttgtaaaggtgctgcactggtcccaagtagtagtgtcttcctagtatattagtttgatttaatatctgagaagtgtatatagtttgtggtaaaaagattatatatcataaagtatgccttcctgtttaaaaaaagtatatattctacacatatatgtatatgtatatctatatctctaaactgctgttaattgattaaaatctggcaaagttatatttactttaaaataaaataattttattgc

SEQ ID NO: 107269 - DNA, 2071 bp, Homo sapiens
  Payload ID: 1058
  Gene Symbol: AGTR1
  Gene Name: angiotensin II receptor, type 1
  ENST ID: ENST00000418473
  CDS Start-End: 1-1185
atgaagaaaatgaatcacaagtcaactgacagtccaaaggctccacagctcagaggaggtgtatttgatatagtgtttgcaacaaattcgacccaggtgatcaaaatgattctcaactcttctactgaagatggtattaaaagaatccaagatgattgtcccaaagctggaaggcataattacatatttgtcatgattcctactttatacagtatcatctttgtggtgggaatatttggaaacagcttggtggtgatagtcatttacttttatatgaagctgaagactgtggccagtgtttttcttttgaatttagcactggctgacttatgctttttactgactttgccactatgggctgtctacacagctatggaataccgctggccctttggcaattacctatgtaagattgcttcagccagcgtcagtttcaacctgtacgctagtgtgtttctactcacgtgtctcagcattgatcgatacctggctattgttcacccaatgaagtcccgccttcgacgcacaatgcttgtagccaaagtcacctgcatcatcatttggctgctggcaggcttggccagtttgccagctataatccatcgaaatgtatttttcattgagaacaccaatattacagtttgtgctttccattatgagtcccaaaattcaaccctcccgatagggctgggcctgaccaaaaatatactgggtttcctgtttccttttctgatcattcttacaagttatactcttatttggaaggccctaaagaaggcttatgaaattcagaagaacaaaccaagaaatgatgatatttttaagataattatggcaattgtgcttttctttttcttttcctggattccccaccaaatattcacttttctggatgtattgattcaactaggcatcatacgtgactgtagaattgcagatattgtggacacggccatgcctatcaccatttgtatagcttattttaacaattgcctgaatcctcttttttatggctttctggggaaaaaatttaaaagatattttctccagcttctaaaatatattcccccaaaagccaaatcccactcaaacctttcaacaaaaatgagcacgctttcctaccgcccctcagataatgtaagctcatccaccaagaagcctgcaccatgttttgaggttgagtgacatgttcgaaacctgtccataaagtaattttgtgaaagaaggagcaagagaacattcctctgcagcacttcactaccaaatgagcattagctacttttcagaattgaaggagaaaatgcattatgtggactgaaccgacttttctaaagctctgaacaaaagcttttctttccttttgcaacaagacaaagcaaagccacattttgcattagacagatgacggctgctcgaagaacaatgtcagaaactcgatgaatgtgttgatttgagaaattttactgacagaaatgcaatctccctagcctgcttttgtcctgttattttttatttccacataaaggtatttagaatatattaaatcgttagaggagcaacaggagatgagagttccagattgttctgtccagtttccaaagggcagtaaagttttcgtgccggttttcagctattagcaactgtgctacacttgcacctggtactgcacattttgtacaaagatatgctaagcagtagtcgtcaagttgcagatctttttgtgaaattcaacctgtgtcttataggtttccactgccaaaacaatgcccgtaagatggcttatttgtataatggtgttactaaagtcacatataaaagttaaactacttgtaaaggtgctgcactggtcccaagtagtagtgtcttcctagtatattagtttgatttaatatctgagaagtgtatatagtttgtggtaaaaagattatatatcataaagtatgccttcctgtttaaaaaaagtatatattctacacatatatgtatatgtatatctatatctctaaactgctgttaattgattaaaatctggcaaagttatatttactttaaaataaaataattttattgc

SEQ ID NO: 107270 - DNA, 1795 bp, Homo sapiens
  Payload ID: 1058
  Gene Symbol: AGTR1
  Gene Name: angiotensin II receptor, type 1
  Uniprot ID: P30556
  ENST ID: ENST00000474935
  CDS Start-End: 584-1663
gttttgcaccaaactggacacatgcttgctacttcatcatcctcatcgtgaacattattattattatcatcattttccagatgaagaaaatgaatcacaagtcaactgacagtccaaaggctccacagctcagaggaggtaaatcatgtgcttaattcagaacttttggctcccatcactatgctcttcccactgtcttaactctggttgtcacctgagccattgtgtttcttctcaggtagatcttagttcttcctgagaaggtatgaaggtgggtattccaccctacctgaattataggaatttcagatatctgtgagcagctgcaaaggggattttactagatgacatcctgctgggcacactttacgccagtcctgaatgtgtaatagaaatctgcagtttaatgacactgaactaaagaaccagaaaatagaggggtgtattagtgaactacagaaaattcaagtcccaaaagctgtaaatactctgaggaccaaagaaaatatatacgttgttcagatttgccctgaggggtgtatttgatatagtgtttgcaacaaattcgacccaggtgatcaaaatgattctcaactcttctactgaagatggtattaaaagaatccaagatgattgtcccaaagctggaaggcataattacatatttgtcatgattcctactttatacagtatcatctttgtggtgggaatatttggaaacagcttggtggtgatagtcatttacttttatatgaagctgaagactgtggccagtgtttttcttttgaatttagcactggctgacttatgctttttactgactttgccactatgggctgtctacacagctatggaataccgctggccctttggcaattacctatgtaagattgcttcagccagcgtcagtttcaacctgtacgctagtgtgtttctactcacgtgtctcagcattgatcgatacctggctattgttcacccaatgaagtcccgccttcgacgcacaatgcttgtagccaaagtcacctgcatcatcatttggctgctggcaggcttggccagtttgccagctataatccatcgaaatgtatttttcattgagaacaccaatattacagtttgtgctttccattatgagtcccaaaattcaaccctcccgatagggctgggcctgaccaaaaatatactgggtttcctgtttccttttctgatcattcttacaagttatactcttatttggaaggccctaaagaaggcttatgaaattcagaagaacaaaccaagaaatgatgatatttttaagataattatggcaattgtgcttttctttttcttttcctggattccccaccaaatattcacttttctggatgtattgattcaactaggcatcatacgtgactgtagaattgcagatattgtggacacggccatgcctatcaccatttgtatagcttattttaacaattgcctgaatcctcttttttatggctttctggggaaaaaatttaaaagatattttctccagcttctaaaatatattcccccaaaagccaaatcccactcaaacctttcaacaaaaatgagcacgctttcctaccgcccctcagataatgtaagctcatccaccaagaagcctgcaccatgttttgaggttgagtgacatgttcgaaacctgtccataaagtaattttgtgaaagaaggagcaagagaacattcctctgcagcacttcactaccaaatgagcattagctacttttcagaattgaaggagaaaatgcattatgtggactg

SEQ ID NO: 107271 - DNA, 1545 bp, Homo sapiens
  Payload ID: 1058
  Gene Symbol: AGTR1
  Gene Name: angiotensin II receptor, type 1
  Uniprot ID: P30556
  ENST ID: ENST00000461609
  CDS Start-End: 334-1413
cttgctacttcatcatcctcatcgtgaacattattattattatcatcattttccagatgaagaaaatgaatcacaagtcaactgacagtccaaaggctccacagctcagaggaggtagatcttagttcttcctgagaaggtatgaaggtgggtattccaccctacctgaattataggaatttcagatatctgtgagcagctgcaaaggggattttactagatgacatcctgctgggcacactttacgccagtcctgaatgtgtaatagaaatctgcagtttaatgagtgtatttgatatagtgtttgcaacaaattcgacccaggtgatcaaaatgattctcaactcttctactgaagatggtattaaaagaatccaagatgattgtcccaaagctggaaggcataattacatatttgtcatgattcctactttatacagtatcatctttgtggtgggaatatttggaaacagcttggtggtgatagtcatttacttttatatgaagctgaagactgtggccagtgtttttcttttgaatttagcactggctgacttatgctttttactgactttgccactatgggctgtctacacagctatggaataccgctggccctttggcaattacctatgtaagattgcttcagccagcgtcagtttcaacctgtacgctagtgtgtttctactcacgtgtctcagcattgatcgatacctggctattgttcacccaatgaagtcccgccttcgacgcacaatgcttgtagccaaagtcacctgcatcatcatttggctgctggcaggcttggccagtttgccagctataatccatcgaaatgtatttttcattgagaacaccaatattacagtttgtgctttccattatgagtcccaaaattcaaccctcccgatagggctgggcctgaccaaaaatatactgggtttcctgtttccttttctgatcattcttacaagttatactcttatttggaaggccctaaagaaggcttatgaaattcagaagaacaaaccaagaaatgatgatatttttaagataattatggcaattgtgcttttctttttcttttcctggattccccaccaaatattcacttttctggatgtattgattcaactaggcatcatacgtgactgtagaattgcagatattgtggacacggccatgcctatcaccatttgtatagcttattttaacaattgcctgaatcctcttttttatggctttctggggaaaaaatttaaaagatattttctccagcttctaaaatatattcccccaaaagccaaatcccactcaaacctttcaacaaaaatgagcacgctttcctaccgcccctcagataatgtaagctcatccaccaagaagcctgcaccatgttttgaggttgagtgacatgttcgaaacctgtccataaagtaattttgtgaaagaaggagcaagagaacattcctctgcagcacttcactaccaaatgagcattagctacttttcagaattgaaggagaaaatgcattatgtggactg

SEQ ID NO: 107272 - DNA, 2359 bp, Homo sapiens
  Payload ID: 1058
  Gene Symbol: AGTR1
  Gene Name: angiotensin II receptor, type 1
  Uniprot ID: P30556
  ENST ID: ENST00000497524
  CDS Start-End: 392-1471
cgggagggtctcccggggcggggcggaggaggagggaatgcaaaacagagcctcgtccccggaacccaagaagcagcaacgcccctcactataaattcggagctgcctcctcgccaatgattccagcgcctgacagccaggaccccaggcagcagcgagtgacaggacgtctggaccggcgcgccgctagcagctctgccgggccgcggcggtgatcgatggggagcggctggagcggacccagcgagtgagggcgcacagccgggacgccgaggcggcgggcgggagacccgcaccagcgcagccggccctcggcgggacgtgacgcagcgcccggggcgcgggtgtatttgatatagtgtttgcaacaaattcgacccaggtgatcaaaatgattctcaactcttctactgaagatggtattaaaagaatccaagatgattgtcccaaagctggaaggcataattacatatttgtcatgattcctactttatacagtatcatctttgtggtgggaatatttggaaacagcttggtggtgatagtcatttacttttatatgaagctgaagactgtggccagtgtttttcttttgaatttagcactggctgacttatgctttttactgactttgccactatgggctgtctacacagctatggaataccgctggccctttggcaattacctatgtaagattgcttcagccagcgtcagtttcaacctgtacgctagtgtgtttctactcacgtgtctcagcattgatcgatacctggctattgttcacccaatgaagtcccgccttcgacgcacaatgcttgtagccaaagtcacctgcatcatcatttggctgctggcaggcttggccagtttgccagctataatccatcgaaatgtatttttcattgagaacaccaatattacagtttgtgctttccattatgagtcccaaaattcaaccctcccgatagggctgggcctgaccaaaaatatactgggtttcctgtttccttttctgatcattcttacaagttatactcttatttggaaggccctaaagaaggcttatgaaattcagaagaacaaaccaagaaatgatgatatttttaagataattatggcaattgtgcttttctttttcttttcctggattccccaccaaatattcacttttctggatgtattgattcaactaggcatcatacgtgactgtagaattgcagatattgtggacacggccatgcctatcaccatttgtatagcttattttaacaattgcctgaatcctcttttttatggctttctggggaaaaaatttaaaagatattttctccagcttctaaaatatattcccccaaaagccaaatcccactcaaacctttcaacaaaaatgagcacgctttcctaccgcccctcagataatgtaagctcatccaccaagaagcctgcaccatgttttgaggttgagtgacatgttcgaaacctgtccataaagtaattttgtgaaagaaggagcaagagaacattcctctgcagcacttcactaccaaatgagcattagctacttttcagaattgaaggagaaaatgcattatgtggactgaaccgacttttctaaagctctgaacaaaagcttttctttccttttgcaacaagacaaagcaaagccacattttgcattagacagatgacggctgctcgaagaacaatgtcagaaactcgatgaatgtgttgatttgagaaattttactgacagaaatgcaatctccctagcctgcttttgtcctgttattttttatttccacataaaggtatttagaatatattaaatcgttagaggagcaacaggagatgagagttccagattgttctgtccagtttccaaagggcagtaaagttttcgtgccggttttcagctattagcaactgtgctacacttgcacctggtactgcacattttgtacaaagatatgctaagcagtagtcgtcaagttgcagatctttttgtgaaattcaacctgtgtcttataggtttccactgccaaaacaatgcccgtaagatggcttatttgtataatggtgttactaaagtcacatataaaagttaaactacttgtaaaggtgctgcactggtcccaagtagtagtgtcttcctagtatattagtttgatttaatatctgagaagtgtatatagtttgtggtaaaaagattatatatcataaagtatgccttcctgtttaaaaaaagtatatattctacacatatatgtatatgtatatctatatctctaaactgctgttaattgattaaaatctggcaaagttatatttactttaaaataaaataattttattgcaa

SEQ ID NO: 107273 - DNA, 1669 bp, Homo sapiens
  Payload ID: 1058
  Gene Symbol: AGTR1
  Gene Name: angiotensin II receptor, type 1
  Uniprot ID: P30556
  ENST ID: ENST00000475347
  CDS Start-End: 458-1537
gttttgcaccaaactggacacatgcttgctacttcatcatcctcatcgtgaacattattattattatcatcattttccagatgaagaaaatgaatcacaagtcaactgacagtccaaaggctccacagctcagaggaggtaaatcatgtgcttaattcagaacttttggctcccatcactatgctcttcccactgtcttaactctggttgtcacctgagccattgtgtttcttctcaggtagatcttagttcttcctgagaaggtatgaaggtgggtattccaccctacctgaattataggaatttcagatatctgtgagcagctgcaaaggggattttactagatgacatcctgctgggcacactttacgccagtcctgaatgtgtaatagaaatctgcagtttaatgagtgtatttgatatagtgtttgcaacaaattcgacccaggtgatcaaaatgattctcaactcttctactgaagatggtattaaaagaatccaagatgattgtcccaaagctggaaggcataattacatatttgtcatgattcctactttatacagtatcatctttgtggtgggaatatttggaaacagcttggtggtgatagtcatttacttttatatgaagctgaagactgtggccagtgtttttcttttgaatttagcactggctgacttatgctttttactgactttgccactatgggctgtctacacagctatggaataccgctggccctttggcaattacctatgtaagattgcttcagccagcgtcagtttcaacctgtacgctagtgtgtttctactcacgtgtctcagcattgatcgatacctggctattgttcacccaatgaagtcccgccttcgacgcacaatgcttgtagccaaagtcacctgcatcatcatttggctgctggcaggcttggccagtttgccagctataatccatcgaaatgtatttttcattgagaacaccaatattacagtttgtgctttccattatgagtcccaaaattcaaccctcccgatagggctgggcctgaccaaaaatatactgggtttcctgtttccttttctgatcattcttacaagttatactcttatttggaaggccctaaagaaggcttatgaaattcagaagaacaaaccaagaaatgatgatatttttaagataattatggcaattgtgcttttctttttcttttcctggattccccaccaaatattcacttttctggatgtattgattcaactaggcatcatacgtgactgtagaattgcagatattgtggacacggccatgcctatcaccatttgtatagcttattttaacaattgcctgaatcctcttttttatggctttctggggaaaaaatttaaaagatattttctccagcttctaaaatatattcccccaaaagccaaatcccactcaaacctttcaacaaaaatgagcacgctttcctaccgcccctcagataatgtaagctcatccaccaagaagcctgcaccatgttttgaggttgagtgacatgttcgaaacctgtccataaagtaattttgtgaaagaaggagcaagagaacattcctctgcagcacttcactaccaaatgagcattagctacttttcagaattgaaggagaaaatgcattatgtggactg

SEQ ID NO: 107274 - DNA, 2882 bp, Homo sapiens
  Payload ID: 1059
  Gene Symbol: AGTR2
  Gene Name: angiotensin II receptor, type 2
  Uniprot ID: P50052
  ENST ID: ENST00000371906
  CDS Start-End: 191-1282
agaaggaaaccagagatctggtgctattacgtcccagcgtctgagagaacgagtaagcacagaattcaaagcattctgcagcctgaattttgaaggagtgtgtttaggcactaagcaagctgatttatgataactgctttaaacttcaacaaccaaaggcataagaactaggagctgctgacatttcaatatgaagggcaactccacccttgccactactagcaaaaacattaccagcggtcttcacttcgggcttgtgaacatctctggcaacaatgagtctaccttgaactgttcacagaaaccatcagataagcatttagatgcaattcctattctttactacattatatttgtaattggatttctggtcaatattgtcgtggttacactgttttgttgtcaaaagggtcctaaaaaggtttctagcatatacatcttcaacctcgctgtggctgatttactccttttggctactcttcctctatgggcaacctattattcttatagatatgactggctctttggacctgtgatgtgcaaagtttttggttcttttcttaccctgaacatgtttgcaagcattttttttatcacctgcatgagtgttgataggtaccaatctgtcatctacccctttctgtctcaaagaagaaatccctggcaagcatcttatatagttccccttgtttggtgtatggcctgtttgtcctcattgccaacattttattttcgagacgtcagaaccattgaatacttaggagtgaatgcttgcattatggctttcccacctgagaaatatgcccaatggtcagctgggattgccttaatgaaaaatatccttggttttattatccctttaatattcatagcaacatgctattttggaattagaaaacacttactgaagacgaatagctatgggaagaacaggataacccgtgaccaagtcctgaagatggcagctgctgttgttctggccttcatcatttgctggcttcccttccatgttctgaccttcctggatgctctggcctggatgggtgtcattaatagctgcgaagttatagcagtcattgacctggcacttccttttgccatcctcttgggattcaccaacagctgcgttaatccgtttctgtattgttttgttggaaaccggttccaacagaagctccgcagtgtgtttagggttccaattacttggctccaagggaaaagagagagtatgtcttgccggaaaagcagttctcttagagaaatggagacctttgtgtcttaaacgtgagagcaaaatgcatgtaatcaacatggctacttgctttgaggctcaccagaattatttttaagtggttttaataaaataataaaatttcccctaatcttttctgaatcttctgaaaccaaatgtaactatgttttatcgtccagtgactttcaggaattgcccattgtttttctgatatgtttgtacaagattgtcattagtgagacatatttacaacctagaagtaactggtgatatatctcaaattgtaattaataatagattgtgaataatgatttggggattcagatttctctttgaaacatgcttgtgtttcttagtggggttttatatccatttttatcaggatttcctcttgaaccagaaccagtctttcaactcattgcatcatttacaagacaacattgtaagagagatgagcacttctaagttgagtatattataatagattagtactggattattcaggctttaggcatatgcttctttaaaaaagctataaattatattcctcttgcatttcacttgagtggaggtttatagttaatctataactacatattgaatagggctaggaatatagattaaatcatactcctatgctttagcttatttttacagttatagaaagcaagatgtactataacatagaattgcaatctataatatttgtgtgttcactaaactctgaataagcactttttaaaaaactttctactcattttaatgattgtttaaaggtttctattttctctgatacttttttgaaatcagtaaacactgtgtattgttgtaaaatgtaaaggtcacttttcacatccttgactttttagatgtgctgctttgatatataggacattgatttgatttttattattaatgctttggttctgggttgtttcctaaaatatctgggtggcttaaaaaaaactctttaacttgtaataaacccttaactggcataggaaatggtatccagaatggaattttgctacatggggtctgggtgggggcaaagagacccagtcaattacatgtttggtaccaagaaaggaacctgtcagggcagtacaatgtgactttgaaaatatataccgtgggggtagttttaccctatatctataaacactgtttgttccagaatctgtatgattctatggagctattttaaaccaattgcaggtctagatacctccttctcagcactattaaagctcctaagttagaggagtgcctaaaactgagttacctaaagtttacttacattaaagtatgaatattaattttagaaatttgagactttattctgtaccagccctgtataataacaggttatctaggaccttcctctgaggtaggtctaaatactgatctctgaggcggaactaacgttttggggactcagcatctctgccaggttccaggattatagacagaagagtcctgtcataccactttctggaaaagtcctaatttcatgtaatccttttattttcaataaaaacaaatagctaaatgtataaccaactatgatgttatgttttcaataattttgtaaaacagctcatataaataaaatttttaattggaagaa

SEQ ID NO: 107275 - DNA, 1107 bp, Homo sapiens
  Payload ID: 1060
  Gene Symbol: AGTRAP
  Gene Name: angiotensin II receptor-associated protein
  Uniprot ID: Q6RW13
  ENST ID: ENST00000314340
  CDS Start-End: 55-534
ggagcctaggagccccccgcggctgcggcgcaggtgccctcggcctgagtcgggatggagctgcctgctgtgaacctgaaggtgattctcctaggtcactggctgctgacaacctggggctgcattgtattctcaggctcctatgcctgggccaacttcaccatcctggccttgggcgtgtgggctgtggctcagcgggactccatcgacgccataagcatgtttctgggtggcttgctggccaccatcttcctggacatcgtgcacatcagcatcttctacccgcgggtcagcctcacggacacgggccgctttggcgtgggcatggccatcctcagcttgctgctcaagccgctctcctgctgcttcgtctaccacatgtaccgggagcgcgggggtgagctcctggtccacactggtttccttgggtcttctcaggaccgtagtgcctaccagacgattgactcagcagaggcgcccgcagatccctttgcagtcccagagggcaggagtcaagatgcccgagggtactgaagccagccacgctgcgcccggccctgccccgggccttcctcgtgcctgggaggtcgttctagggatgctcctgacctccgtctcttggacctaagatggaatgtgtccccagctcagggattgcctgaaccaagaggccaggagcccccatgggccgcccagtaccatgcacactcctgtcccgaactccctgaggcctcccctcccttcagggcacccactggttcccaggctggaaccagggtctctctttacctcctaccccatggtggcaccacagaggccctcagccgagtcctgcctgagtgttgcaagctcaggcctttaaggactgctgatgccccctcaggcctcccccaagtttgctgggctttggtggaagccctgagagcttcaggtcctgctcagcccgaggagcagtctggcatgggagtgaggccccgtccttctcactgcctggtcacatggtgcctagggatgcagggctggaggccagaggtgtcagcaacactgtgtcccaccacaacctccagcctcccttttcagagcacagcattaaagtttggggaattc

SEQ ID NO: 107276 - DNA, 1055 bp, Homo sapiens
  Payload ID: 1060
  Gene Symbol: AGTRAP
  Gene Name: angiotensin II receptor-associated protein
  ENST ID: ENST00000376627
  CDS Start-End: 57-536
tcggagcctaggagccccccgcggctgcggcgcaggtgccctcggcctgagtcgggatggagctgcctgctgtgaacctgaagtgcgccagctccagtgtcccaagaaatcaccctcacgtgattctcctaggtcactggctgctgacaacctgcttctggagacatttctctgccaaaccaagactggaaaccattgagctcacctgtgcactttgcaaacttcgaagtgcagcgcacagggcaacagctgggctgcattgtattctcaggctcctatgcctgggccaacttcaccatcctggccttgggcgtgtgggctgtggctcagcgggactccatcgacgccataagcatgtttctgggtggcttgctggccaccatcttcctggacatcgtgcacatcagcatcttctacccgcgggtcagcctcacggacacgggccgctttggcgtgggcatggccatcctcagcttgctgctcaagccgctctcctgctgcttcgtctaccacatgtaccgggagcgcgggggtgagctcctggtccacactggtttccttgggtcttctcaggaccgtagtgcctaccagacgattgactcagcagaggcgcccgcagatccctttgcagtcccagagggcaggagtcaagatgcccgagggtactgaagccagccacgctgcgcccggccctgccccgggccttcctcgtgcctgggaggtcgttctagggatgctcctgacctccgtctcttggacctaagatggaatgtgtccccagctcagggattgcctgaaccaagaggccaggagcccccatgggccgcccagtaccatgcacactcctgtcccgaactccctgaggcctcccctcccttcagggcacccactggttcccaggctggaaccagggtctctctttacctcctaccccatggtggcaccacagaggccctcagccgagtcctgcctgagtgttgcaagctcaggcctttaaggactgctgatgccccctcaggcctcccccaagtttgctgggctttggtggaagccct

SEQ ID NO: 107277 - DNA, 1100 bp, Homo sapiens
  Payload ID: 1060
  Gene Symbol: AGTRAP
  Gene Name: angiotensin II receptor-associated protein
  Uniprot ID: Q6RW13
  ENST ID: ENST00000376629
  CDS Start-End: 63-521
ccgagttcggagcctaggagccccccgcggctgcggcgcaggtgccctcggcctgagtcgggatggagctgcctgctgtgaacctgaaggtgattctcctaggtcactggctgctgacaacctggggctgcattgtattctcaggctcctatgcctgggccaacttcaccatcctggccttgggcgtgtgggctgtggctcagcgggactccatcgacgccataagcatgtttctgggtggcttgctggccaccatcttcctggacatcgtgcacatcagcatcttctacccgcgggtcagcctcacggacacgggccgctttggcgtgggcatggccatcctcagcttgctgctcaagccgctctcctgctgcttcgtctaccacatgtaccgggagcgcgggggtttccttgggtcttctcaggaccgtagtgcctaccagacgattgactcagcagaggcgcccgcagatccctttgcagtcccagagggcaggagtcaagatgcccgagggtactgaagccagccacgctgcgcccggccctgccccgggccttcctcgtgcctgggaggtcgttctagggatgctcctgacctccgtctcttggacctaagatggaatgtgtccccagctcagggattgcctgaaccaagaggccaggagcccccatgggccgcccagtaccatgcacactcctgtcccgaactccctgaggcctcccctcccttcagggcacccactggttcccaggctggaaccagggtctctctttacctcctaccccatggtggcaccacagaggccctcagccgagtcctgcctgagtgttgcaagctcaggcctttaaggactgctgatgccccctcaggcctcccccaagtttgctgggctttggtggaagccctgagagcttcaggtcctgctcagcccgaggagcagtctggcatgggagtgaggccccgtccttctcactgcctggtcacatggtgcctagggatgcagggctggaggccagaggtgtcagcaacactgtgtcccaccacaacctccagcctcccttttcagagcacagcattaaagtttggggaattctgtaga

SEQ ID NO: 107278 - DNA, 1067 bp, Homo sapiens
  Payload ID: 1060
  Gene Symbol: AGTRAP
  Gene Name: angiotensin II receptor-associated protein
  Uniprot ID: Q6RW13
  ENST ID: ENST00000376637
  CDS Start-End: 126-461
gctgcgctggggttggagtggccgcaacgggcggggcggggcggggccgggcaagtttgttccccgagttcggagcctaggagccccccgcggctgcggcgcaggtgccctcggcctgagtcgggatggagctgcctgctgtgaacctgaaggggctgcattgtattctcaggctcctatgcctgggccaacttcaccatcctggccttgggcgtgtgggctgtggctcagcgggactccatcgacgccataagcatgtttctgggtggcttgctggccaccatcttcctggacatcgtgcacatcagcatcttctacccgcgggtcagcctcacggacacgggccgctttggcgtgggcatggccatcctcagcttgctgctcaagccgctctcctgctgcttcgtctaccacatgtaccgggagcgcgggggtttccttgggtcttctcaggaccgtagtgcctaccagacgattgactcagcagaggcgcccgcagatccctttgcagtcccagagggcaggagtcaagatgcccgagggtactgaagccagccacgctgcgcccggccctgccccgggccttcctcgtgcctgggaggtcgttctagggatgctcctgacctccgtctcttggacctaagatggaatgtgtccccagctcagggattgcctgaaccaagaggccaggagcccccatgggccgcccagtaccatgcacactcctgtcccgaactccctgaggcctcccctcccttcagggcacccactggttcccaggctggaaccagggtctctctttacctcctaccccatggtggcaccacagaggccctcagccgagtcctgcctgagtgttgcaagctcaggcctttaaggactgctgatgccccctcaggcctcccccaagtttgctgggctttggtggaagccctgagagcttcaggtcctgctcagcccgaggagcagtctggcatgggagtgaggccccgtccttctcactgcctggtcacatggtgcctagggatgcagggctggaggccagaggtgtcagcaacactgtgtcc

SEQ ID NO: 107279 - DNA, 786 bp, Homo sapiens
  Payload ID: 1060
  Gene Symbol: AGTRAP
  Gene Name: angiotensin II receptor-associated protein
  Uniprot ID: Q6RW13
  ENST ID: ENST00000400895
  CDS Start-End: 86-529
gcggggccgggcaagtttgttccccgagttcggagcctaggagccccccgcggctgcggcgcaggtgccctcggcctgagtcgggatggagctgcctgctgtgaacctgaaggtgattctcctaggtcactggctgctgacaacctgcttctggagacatttctctgccaaaccaagactggaaaccattgagctcacctgtgcactttgcaaacttcgaagtgcagcgcacagggcaacagctgggctgcattgtattctcaggctcctatgcctgggccaacttcaccatcctggccttgggcgtgtgggctgtggctcagcgggactccatcgacgccataagcatgtttctgggtggcttgctggccaccatcttcctggacatcgtgcacatcagcatcttctacccgcgggtcagcctcacggacacgggccgctttggcgtgggcatggccatcctcagcttgctgctcaagccgctctcctgctgcttcgtctaccacatgtaccgggagcgcgggggtgagctcctggtccacactggtttccttgggtcttctcaggaccgtagtgcctaccagacgattgactcagcagaggcgcccgcagatccctttgcagtcccagagggcaggagtcaagatgcccgagggtactgaagccagccacgctgcgcccggccctgccccgggccttcctcgtgcctgggaggtcgttctagggatgctcctgacctccgtctcttggacctaagatggaatgtgtccccagctcagggattgc

SEQ ID NO: 107280 - DNA, 809 bp, Homo sapiens
  Payload ID: 1060
  Gene Symbol: AGTRAP
  Gene Name: angiotensin II receptor-associated protein
  Uniprot ID: Q6RW13
  ENST ID: ENST00000452018
  CDS Start-End: 37-504
gcggctgcggcgcaggtgccctcggcctgagtcgggatggagctgcctgctgtgaacctgaaggtgattctcctaggtcactggctgctgacaacctgcttctggagacatttctctgccaaaccaagactggaaaccattgagctcacctgtgcactttgcaaacttcgaagtgcagcgcacagggcaacagctgggctgcattgtattctcaggctcctatgcctgggccaacttcaccatcctggccttgggcgtgtgggctgtggctcagcgggactccatcgacgccataagcatgtttctgggtggcttgctggccaccatcttcctggacatcgtgcacatcagcatcttctacccgcgggtcagcctcacggacacgggccgctttggcgtgggcatggccatcctcagcttgctgctcaagccgctctcctgctgcttcgtctaccacatgtaccgggagcgcgggggtttccttgggtcttctcaggaccgtagtgcctaccagacgattgactcagcagaggcgcccgcagatccctttgcagtcccagagggcaggagtcaagatgcccgagggtactgaagccagccacgctgcgcccggccctgccccgggccttcctcgtgcctgggaggtcgttctagggatgctcctgacctccgtctcttggacctaagatggaatgtgtccccagctcagggattgcctgaaccaagaggccaggagcccccatgggccgcccagtaccatgcacactcctgtcccgaactccctgaggcctcccctcccttcagggcac

SEQ ID NO: 107281 - DNA, 849 bp, Homo sapiens
  Payload ID: 1060
  Gene Symbol: AGTRAP
  Gene Name: angiotensin II receptor-associated protein
  ENST ID: ENST00000510878
  CDS Start-End: 35-502
ggctgcggcgcaggtgccctcggcctgagtcgggatggagctgcctgctgtgaacctgaaggtgattctcctaggtcactggctgctgacaacctgtttctgggtggcttgctggccaccatcttcctggacatcgtgcacatcagcatcttctacccgcgggtcagcctcacggacacgggccgctttggcgtgggcatggccatcctcagcttgctgctcaagccgctctcctgctgcttcgtctaccacatgtaccgggagcgcgggggtgagctcctggtccacactggtttccttgggtcttctcaggaccgtagtgcctaccagacgattgactcagcagaggcgcccgcagatccctttgcagtcccagagggcaggagtcaagatgcccgagggtactgaagccagccacgctgcgcccggccctgccccgggccttcctcgtgcctgggaggtcgttctagggatgctcctgacctccgtctcttggacctaagatggaatgtgtccccagctcagggattgcctgaaccaagaggccaggagcccccatgggccgcccagtaccatgcacactcctgtcccgaactccctgaggcctcccctcccttcagggcacccactggttcccaggctggaaccagggtctctctttacctcctaccccatggtggcaccacagaggccctcagccgagtcctgcctgagtgttgcaagctcaggcctttaaggactgctgatgccccctcaggcctcccccaagtttgctgggctttggtggaagccctgagagcttcaggtcctgctcagcccgaggagcagtctggcatgggagtgaggccc

SEQ ID NO: 107282 - DNA, 942 bp, Homo sapiens
  Payload ID: 1060
  Gene Symbol: AGTRAP
  Gene Name: angiotensin II receptor-associated protein
  ENST ID: ENST00000476512
  CDS Start-End: 93-284
gggcggggcggggccgggcaagtttgttccccgagttcggagcctaggagccccccgcggctgcggcgcaggtgccctcggcctgagtcgggatggagctgcctgctgtgaacctgaaggtgattctcctaggtcactggctgctgacaacctggcataaggattgcacaccctgcaggagctgggagggagacgtggaagtgctcatcagagctccccagggcctgccccacagtgaggcctcagcactgcagcttgattttcacctttaccatctcttttaatctgttgagcttctggagacatttctctgccaaaccaagactggaaaccattgagctcacctgtgcactttgcaaacttcgaagtgcagcgcacagggcaacagctgggctgcattgtattctcaggctcctatgcctgggccaacttcaccatcctggccttgggcgtgtgggctgtggctcagcgggactccatcgacgccataagcatgtttctgggtggcttgctggccaccatcttcctggacatcgtgcacatcagcatcttctacccgcgggtcagcctcacggacacgggccgctttggcgtgggcatggccatcctcagcttgctgctcaagccgctctcctgctgcttcgtctaccacatgtaccgggagcgcgggggtgagctcctggtccacactggtttccttgggtcttctcaggaccgtagtgcctaccagacgattgactcagcagaggcgcccgcagatccctttgcagtcccagagggcaggagtcaagatgcccgagggtactgaagccagccacgctgcgcccggccctgccccgggccttcctcgtgcctgggaggtcgttctagggatgctcctgacctccgtctcttggacctaagatggaatgtgtccccagctcagggattgcctgaaccaag

SEQ ID NO: 107283 - DNA, 2291 bp, Homo sapiens
  Payload ID: 1061
  Gene Symbol: AGT
  Gene Name: angiotensinogen (serpin peptidase inhibitor, clade A, member 8)
  Uniprot ID: P01019
  ENST ID: ENST00000366667
  CDS Start-End: 216-1673
aagacttcctggaagaggtcccagcgtgagtgtcgcttctggcatctgtccttctggccagcctgtggtctggccaagtgatgtaaccctcctctccagcctgtgcacaggcagcctgggaacagctccatccccacccctcagctataaatagggcatcgtgacccggccgggggaagaagctgccgttgttctgggtactacagcagaagggtatgcggaagcgagcaccccagtctgagatggctcctgccggtgtgagcctgagggccaccatcctctgcctcctggcctgggctggcctggctgcaggtgaccgggtgtacatacaccccttccacctcgtcatccacaatgagagtacctgtgagcagctggcaaaggccaatgccgggaagcccaaagaccccaccttcatacctgctccaattcaggccaagacatcccctgtggatgaaaaggccctacaggaccagctggtgctagtcgctgcaaaacttgacaccgaagacaagttgagggccgcaatggtcgggatgctggccaacttcttgggcttccgtatatatggcatgcacagtgagctatggggcgtggtccatggggccaccgtcctctccccaacggctgtctttggcaccctggcctctctctatctgggagccttggaccacacagctgacaggctacaggcaatcctgggtgttccttggaaggacaagaactgcacctcccggctggatgcgcacaaggtcctgtctgccctgcaggctgtacagggcctgctagtggcccagggcagggctgatagccaggcccagctgctgctgtccacggtggtgggcgtgttcacagccccaggcctgcacctgaagcagccgtttgtgcagggcctggctctctatacccctgtggtcctcccacgctctctggacttcacagaactggatgttgctgctgagaagattgacaggttcatgcaggctgtgacaggatggaagactggctgctccctgatgggagccagtgtggacagcaccctggctttcaacacctacgtccacttccaagggaagatgaagggcttctccctgctggccgagccccaggagttctgggtggacaacagcacctcagtgtctgttcccatgctctctggcatgggcaccttccagcactggagtgacatccaggacaacttctcggtgactcaagtgcccttcactgagagcgcctgcctgctgctgatccagcctcactatgcctctgacctggacaaggtggagggtctcactttccagcaaaactccctcaactggatgaagaaactatctccccggaccatccacctgaccatgccccaactggtgctgcaaggatcttatgacctgcaggacctgctcgcccaggctgagctgcccgccattctgcacaccgagctgaacctgcaaaaattgagcaatgaccgcatcagggtgggggaggtgctgaacagcattttttttgagcttgaagcggatgagagagagcccacagagtctacccaacagcttaacaagcctgaggtcttggaggtgaccctgaaccgcccattcctgtttgctgtgtatgatcaaagcgccactgccctgcacttcctgggccgcgtggccaacccgctgagcacagcatgaggccagggccccagaacacagtgcctggcaaggcctctgcccctggcctttgaggcaaaggccagcagcagataacaaccccggacaaatcagcgatgtgtcacccccagtctcccaccttttcttctaatgagtcgactttgagctggaaagcagccgtttctccttggtctaagtgtgctgcatggagtgagcagtagaagcctgcagcggcacaaatgcacctcccagtttgctgggtttattttagagaatgggggtggggaggcaagaaccagtgtttagcgcgggactactgttccaaaaagaattccaaccgaccagcttgtttgtgaaacaaaaaagtgttcccttttcaagttgagaacaaaaattgggttttaaaattaaagtatacatttttgcattgccttcggtttgtatttagtgtcttgaatgtaagaacatgacctccgtgtagtgtctgtaataccttagttttttccacagatgcttgtgatttttgaacaatacgtgaaagatgcaagcacctgaatttctgtttgaatgcggaaccatagctggttatttctcccttgtgttagtaataaacgtcttgccacaataagcctccaaaaa

SEQ ID NO: 107284 - DNA, 4787 bp, Homo sapiens
  Payload ID: 1062
  Gene Symbol: ANLN
  Gene Name: anillin actin binding protein
  Uniprot ID: Q9NQW6
  ENST ID: ENST00000265748
  CDS Start-End: 222-3596
agcgcgcatgctcgcggctcggcgctgaaattcaaatttgaacggctgcagaggccgagtccgtcactggaagccgagaggagaggacagctggttgtgggagagttcccccgcctcagactcctggttttttccaggagacacactgagctgagactcacttttctcttcctgaatttgaaccaccgtttccatcgtctcgtagtccgacgcctggggcgatggatccgtttacggagaaactgctggagcgaacccgtgccaggcgagagaatcttcagagaaaaatggctgagaggcccacagcagctccaaggtctatgactcatgctaagcgagctagacagccactttcagaagcaagtaaccagcagcccctctctggtggtgaagagaaatcttgtacaaaaccatcgccatcaaaaaaacgctgttctgacaacactgaagtagaagtttctaacttggaaaataaacaaccagttgagtcgacatctgcaaaatcttgttctccaagtcctgtgtctcctcaggtgcagccacaagcagcagataccatcagtgattctgttgctgtcccggcatcactgctgggcatgaggagagggctgaactcaagattggaagcaactgcagcctcctcagttaaaacacgtatgcaaaaacttgcagagcaacggcgccgttgggataatgatgatatgacagatgacattcctgaaagctcactcttctcaccaatgccatcagaggaaaaggctgcttcccctcccagacctctgctttcaaatgcctcggcaactccagttggcagaaggggccgtctggccaatcttgctgcaactatttgctcctgggaagatgatgtaaatcactcatttgcaaaacaaaacagtgtacaagaacagcctggtaccgcttgtttatccaaattttcctctgcaagtggagcatctgctaggatcaatagcagcagtgttaagcaggaagctacattctgttcccaaagggatggcgatgcctctttgaataaagccctatcctcaagtgctgatgatgcgtctttggttaatgcctcaatttccagctctgtgaaagctacttctccagtgaaatctactacatctatcactgatgctaaaagttgtgagggacaaaatcctgagctacttccaaaaactcctattagtcctctgaaaacgggggtatcgaaaccaattgtgaagtcaactttatcccagacagttccatccaagggagaattaagtagagaaatttgtctgcaatctcaatctaaagacaaatctacgacaccaggaggaacaggaattaagcctttcctggaacgctttggagagcgttgtcaagaacatagcaaagaaagtccagctcgtagcacaccccacagaacccccattattactccaaatacaaaggccatccaagaaagattattcaagcaagacacatcttcatctactacccatttagcacaacagctcaagcaggaacgtcaaaaagaactagcatgtcttcgtggccgatttgacaagggcaatatatggagtgcagaaaaaggcggaaactcaaaaagcaaacaactagaaaccaaacaggaaactcactgtcagagcactcccctcaaaaaacaccaaggtgtttcaaaaactcagtcacttccagtaacagaaaaggtgaccgaaaaccagataccagccaaaaattctagtacagaacctaaaggtttcactgaatgcgaaatgacgaaatctagccctttgaaaataacattgtttttagaagaggacaaatccttaaaagtaacatcagacccaaaggttgagcagaaaattgaagtgatacgtgaaattgagatgagtgtggatgatgatgatatcaatagttcgaaagtaattaatgacctcttcagtgatgtcctagaggaaggtgaactagatatggagaagagccaagaggagatggatcaagcattagcagaaagcagcgaagaacaggaagatgcactgaatatctcctcaatgtctttacttgcaccattggcacaaacagttggtgtggtaagtccagagagtttagtgtccacacctagactggaattgaaagacaccagcagaagtgatgaaagtccaaaaccaggaaaattccaaagaactcgtgtccctcgagctgaatctggtgatagccttggttctgaagatcgtgatcttctttacagcattgatgcatatagatctcaaagattcaaagaaacagaacgtccatcaataaagcaggtgattgttcggaaggaagatgttacttcaaaactggatgaaaaaaataatgcctttccttgtcaagttaatatcaaacagaaaatgcaggaactcaataacgaaataaatatgcaacagacagtgatctatcaagctagccaggctcttaactgctgtgttgatgaagaacatggaaaagggtccctagaagaagctgaagcagaaagacttcttctaattgcaactgggaagagaacacttttgattgatgaattgaataaattgaagaacgaaggacctcagaggaagaataaggctagtccccaaagtgaatttatgccatccaaaggatcagttactttgtcagaaatccgcttgcctctaaaagcagattttgtctgcagtacggttcagaaaccagatgcagcaaattactattacttaattatactaaaagcaggagctgaaaatatggtagccacaccattagcaagtacttcaaactctcttaacggtgatgctctgacattcactactacatttactctgcaagatgtatccaatgactttgaaataaatattgaagtttacagcttggtgcaaaagaaagatccctcaggccttgataagaagaaaaaaacatccaagtccaaggctattactccaaagcgactcctcacatctataaccacaaaaagcaacattcattcttcagtcatggccagtccaggaggtcttagtgctgtgcgaaccagcaacttcgcccttgttggatcttacacattatcattgtcttcagtaggaaatactaagtttgttctggacaaggtcccctttttatcttctttggaaggtcatatttatttaaaaataaaatgtcaagtgaattccagtgttgaagaaagaggttttctaaccatatttgaagatgttagtggttttggtgcctggcatcgaagatggtgtgttctttctggaaactgtatatcttattggacttatccagatgatgagaaacgcaagaatcccataggaaggataaatctggctaattgtaccagtcgtcagatagaaccagccaacagagaattttgtgcaagacgcaacacttttgaattaattactgtccgaccacaaagagaagatgaccgagagactcttgtcagccaatgcagggacacactctgtgttaccaagaactggctgtctgcagatactaaagaagagcgggatctctggatgcaaaaactcaatcaagttcttgttgatattcgcctctggcaacctgatgcttgctacaaacctattggaaagccttaaaccgggaaatttccatgctatctagaggtttttgatgtcatcttaagaaacacacttaagagcatcagatttactgattgcattttatgctttaagtacgaaagggtttgtgccaatattcactacgtattatgcagtatttatatcttttgtatgtaaaactttaactgatttctgtcattcatcaatgagtagaagtaaatacattatagttgattttgctaaatcttaatttaaaagcctcattttcctagaaatctaattattcagttattcatgacaatatttttttaaaagtaagaaattctgagttgtcttcttggagctgtaggtcttgaagcagcaacgtctttcaggggttggagacagaaacccattctccaatctcagtagttttttcgaaaggctgtgatcatttattgatcgtgatatgacttgttactagggtactgaaaaaaatgtctaaggcctttacagaaacatttttagtaatgaggatgagaactttttcaaatagcaaatatatattggcttaaagcatgaggctgtcttcagaaaagtgatgtggacataggaggcaatgtgtgagacttgggggttcaatattttatatagaagagttaataagcacatggtttacatttactcagctactatatatgcagtgtggtgcacattttcacagaattctggcttcattaagatcattatttttgctgcgtagcttacagacttagcatattagttttttctactcctacaagtgtaaattgaaaaatctttatattaaaaaagtaaactgttatgaagctgctatgtactaataatactttgcttgccaaagtgtttgggttttgttgttgtttgtttgtttgtttgtttttggttcatgaacaacagtgtctagaaacccattttgaaagtggaaaattattaagtcacctatcacctttaaacgcctttttttaaaattataaaatattgtaaagcagggtctcaacttttaaatacactttgaacttcttctctgaattattaaagttctttatgacctcatttataaacactaaattctgtcacctcctgtcattttattttttattcattcaaatgtattttttcttgtgcatattataaaaatatattttatgagctcttactcaaataaatacctgtaaatgtctaaaggaa

SEQ ID NO: 107285 - DNA, 4661 bp, Homo sapiens
  Payload ID: 1062
  Gene Symbol: ANLN
  Gene Name: anillin actin binding protein
  Uniprot ID: Q9NQW6
  ENST ID: ENST00000396068
  CDS Start-End: 207-3470
ggctcggcgctgaaattcaaatttgaacggctgcagaggccgagtccgtcactggaagccgagaggagaggacagctggttgtgggagagttcccccgcctcagactcctggttttttccaggagacacactgagctgagactcacttttctcttcctgaatttgaaccaccgtttccatcgtctcgtagtccgacgcctggggcgatggatccgtttacggagaaactgctggagcgaacccgtgccaggcgagagaatcttcagagaaaaatggctgagaggcccacagcagctccaaggtctatgactcatgctaagcgagctagacagccactttcagaagcaagtaaccagcagcccctctctggtggtgaagagaaatcttgtacaaaaccatcgccatcaaaaaaacgctgttctgacaacactgaagtagaagtttctaacttggaaaataaacaaccagttgagtcgacatctgcaaaatcttgttctccaagtcctgtgtctcctcaggtgcagccacaagcagcagataccatcagtgattctgttgctgtcccggcatcactgctgggcatgaggagagggctgaactcaagattggaagcaactgcagcctcctcagttaaaacacgtatgcaaaaacttgcagagcaacggcgccgttgggataatgatgatatgacagatgacattcctgaaagctcactcttctcaccaatgccatcagaggaaaaggctgcttcccctcccagacctctgctttcaaatgcctcggcaactccagttggcagaaggggccgtctggccaatcttgctgcaactatttgctcctgggaagatgatgtaaatcactcatttgcaaaacaaaacagtgtacaagaacagcctggtaccgcttgtttatccaaattttcctctgcaagtggagcatctgctaggatcaatagcagcagtgttaagcaggaagctacattctgttcccaaagggatggcgatgcctctttgaataaagccctatcctcaagtgctgatgatgcgtctttggttaatgcctcaatttccagctctgtgaaagctacttctccagtgaaatctactacatctatcactgatgctaaaagttgtgagggacaaaatcctgagctacttccaaaaactcctattagtcctctgaaaacgggggtatcgaaaccaattgtgaagtcaactttatcccagacagttccatccaagggagaattaagtagagaaatttgtctgcaatctcaatctaaagacaaatctacgacaccaggaggaacaggaattaagcctttcctggaacgctttggagagcgttgtcaagaacatagcaaagaaagtccagctcgtagcacaccccacagaacccccattattactccaaatacaaaggccatccaagaaagattattcaagcaagacacatcttcatctactacccatttagcacaacagctcaagcaggaacgtcaaaaagaactagcatgtcttcgtggccgatttgacaagggcaatatatggagtgcagaaaaaggcggaaactcaaaaagcaaacaactagaaaccaaacaggaaactcactgtcagagcactcccctcaaaaaacaccaaggtgtttcaaaaactcagtcacttccagtaacagaaaaggtgaccgaaaaccagataccagccaaaaattctagtacagaacctaaagaagtgatacgtgaaattgagatgagtgtggatgatgatgatatcaatagttcgaaagtaattaatgacctcttcagtgatgtcctagaggaaggtgaactagatatggagaagagccaagaggagatggatcaagcattagcagaaagcagcgaagaacaggaagatgcactgaatatctcctcaatgtctttacttgcaccattggcacaaacagttggtgtggtaagtccagagagtttagtgtccacacctagactggaattgaaagacaccagcagaagtgatgaaagtccaaaaccaggaaaattccaaagaactcgtgtccctcgagctgaatctggtgatagccttggttctgaagatcgtgatcttctttacagcattgatgcatatagatctcaaagattcaaagaaacagaacgtccatcaataaagcaggtgattgttcggaaggaagatgttacttcaaaactggatgaaaaaaataatgcctttccttgtcaagttaatatcaaacagaaaatgcaggaactcaataacgaaataaatatgcaacagacagtgatctatcaagctagccaggctcttaactgctgtgttgatgaagaacatggaaaagggtccctagaagaagctgaagcagaaagacttcttctaattgcaactgggaagagaacacttttgattgatgaattgaataaattgaagaacgaaggacctcagaggaagaataaggctagtccccaaagtgaatttatgccatccaaaggatcagttactttgtcagaaatccgcttgcctctaaaagcagattttgtctgcagtacggttcagaaaccagatgcagcaaattactattacttaattatactaaaagcaggagctgaaaatatggtagccacaccattagcaagtacttcaaactctcttaacggtgatgctctgacattcactactacatttactctgcaagatgtatccaatgactttgaaataaatattgaagtttacagcttggtgcaaaagaaagatccctcaggccttgataagaagaaaaaaacatccaagtccaaggctattactccaaagcgactcctcacatctataaccacaaaaagcaacattcattcttcagtcatggccagtccaggaggtcttagtgctgtgcgaaccagcaacttcgcccttgttggatcttacacattatcattgtcttcagtaggaaatactaagtttgttctggacaaggtcccctttttatcttctttggaaggtcatatttatttaaaaataaaatgtcaagtgaattccagtgttgaagaaagaggttttctaaccatatttgaagatgttagtggttttggtgcctggcatcgaagatggtgtgttctttctggaaactgtatatcttattggacttatccagatgatgagaaacgcaagaatcccataggaaggataaatctggctaattgtaccagtcgtcagatagaaccagccaacagagaattttgtgcaagacgcaacacttttgaattaattactgtccgaccacaaagagaagatgaccgagagactcttgtcagccaatgcagggacacactctgtgttaccaagaactggctgtctgcagatactaaagaagagcgggatctctggatgcaaaaactcaatcaagttcttgttgatattcgcctctggcaacctgatgcttgctacaaacctattggaaagccttaaaccgggaaatttccatgctatctagaggtttttgatgtcatcttaagaaacacacttaagagcatcagatttactgattgcattttatgctttaagtacgaaagggtttgtgccaatattcactacgtattatgcagtatttatatcttttgtatgtaaaactttaactgatttctgtcattcatcaatgagtagaagtaaatacattatagttgattttgctaaatcttaatttaaaagcctcattttcctagaaatctaattattcagttattcatgacaatatttttttaaaagtaagaaattctgagttgtcttcttggagctgtaggtcttgaagcagcaacgtctttcaggggttggagacagaaacccattctccaatctcagtagttttttcgaaaggctgtgatcatttattgatcgtgatatgacttgttactagggtactgaaaaaaatgtctaaggcctttacagaaacatttttagtaatgaggatgagaactttttcaaatagcaaatatatattggcttaaagcatgaggctgtcttcagaaaagtgatgtggacataggaggcaatgtgtgagacttgggggttcaatattttatatagaagagttaataagcacatggtttacatttactcagctactatatatgcagtgtggtgcacattttcacagaattctggcttcattaagatcattatttttgctgcgtagcttacagacttagcatattagttttttctactcctacaagtgtaaattgaaaaatctttatattaaaaaagtaaactgttatgaagctgctatgtactaataatactttgcttgccaaagtgtttgggttttgttgttgtttgtttgtttgtttgtttttggttcatgaacaacagtgtctagaaacccattttgaaagtggaaaattattaagtcacctatcacctttaaacgcctttttttaaaattataaaatattgtaaagcagggtctcaacttttaaatacactttgaacttcttctctgaattattaaagttctttatgacctcatttataaacactaaattctgtcacctcctgtcattttattttttattcattcaaatgtattttttcttgtgcatattataaaaatatattttatgagctcttactcaaataaatacctgtaaatgtctaaaggaa

SEQ ID NO: 107286 - DNA, 716 bp, Homo sapiens
  Payload ID: 1062
  Gene Symbol: ANLN
  Gene Name: anillin actin binding protein
  ENST ID: ENST00000441696
  CDS Start-End: 1-209
aattttcctctgcaagtggagcatctgctaggatcaatagcagcagtgttaagcaggaagctacattctgttcccaaagggatggcgatgcctctttgaataaagccctatcctcaagtgctgatgatgcgtctttggttaatgcctcaatttccagctctgtggtaaaaagctacttctccagtgaaatctactacatctatcactgatgctaaaagttgtgagggacaaaatcctgagctacttccaaaaactcctattagtcctctgaaaacgggggtatcgaaaccaattgtgaagtcaactttatcccagacagttccatccaagggagaattaagtagagaaatttgtctgcaatctcaatctaaagacaaatctacgacaccaggaggaacaggaattaagcctttcctggaacgctttggagagcgttgtcaagaacatagcaaagaaagtccagctcgtagcacaccccacagaacccccattattactccaaatacaaaggccatccaagaaagattattcaagcaagacacatcttcatctactacccatttagcacaacagctcaagcaggaacgtcaaaaagaactagcatgtcttcgtggccgatttgacaagggcaatatatggagtgcagaaaaaggcggaaactcaaaaagcaaacaactagaaaccaaacaggaaactcactgtcagagcactcccct

SEQ ID NO: 107287 - DNA, 557 bp, Homo sapiens
  Payload ID: 1062
  Gene Symbol: ANLN
  Gene Name: anillin actin binding protein
  ENST ID: ENST00000429082
  CDS Start-End: 1-222
aaattttcctctgcaagtggagcatctgctaggatcaatagcagcagtgttaagcaggaagctacattctgttcccaaagggatggcgatgcctctttgaataaagccctatcctcaagtgctgatgatgcgtctttggttaatgcctcaatttccagctctgtgtgttttcatgtttcagaaagctacttctccagtgaaatctactacatctatcactgatgctaaaagttgtgagggacaaaatcctgagctacttccaaaaactcctattagtcctctgaaaacgggggtatcgaaaccaattgtgaagtcaactttatcccagacagttccatccaagggagaattaagtagagaaatttgtctgcaatctcaatctaaagacaaatctacgacaccaggaggaacaggaattaagcctttcctggaacgctttggagagcgttgtcaagaacatagcaaagaaagtccagctcgtagcacaccccacagaacccccattattactccaaatacaaaggccatccaagaaagattattcaagcaagacacat

SEQ ID NO: 107288 - DNA, 757 bp, Homo sapiens
  Payload ID: 1062
  Gene Symbol: ANLN
  Gene Name: anillin actin binding protein
  ENST ID: ENST00000457743
  CDS Start-End: 1-757
ttatgccatccaaaggatcagttactttgtcagaaatccgcttgcctctaaaagcagattttgtctgcagtacggttcagaaaccagatgcagcaaattactattacttaattatactaaaagcaggagctgaaaatatggtagccacaccattagcaagtacttcaaactctcttaacggtgatgctctgacattcactactacatttactctgcaagatgtatccaatgactttgaaataaatattgaagtttacagcttggtgcaaaagaaagatccctcaggccttgataagaagaaaaaaacatccaagtccaaggctattactccaaagcgactcctcacatctataaccacaaaaagcaacattcattcttcagtcatggccagtccaggaggtcttagtgctgtgcgaaccagcaacttcgcccttgttggatcttacacattatcattgtcttcagtaggaaatactaagtttgttctggacaagataaattatgatgtaagagagcgagagctactgggctatttgttccaggaaaaggtcccctttttatcttctttggaaggtcatatttatttaaaaataaaatgtcaagtgaattccagtgttgaagaaagaggttttctaaccatatttgaagatgttagtggttttggtgcctggcatcgaagatggtgtgttctttctggaaactgtatatcttattggacttatccagatgatgagaaacgcaagaatcccataggaag

SEQ ID NO: 107289 - DNA, 829 bp, Homo sapiens
  Payload ID: 1062
  Gene Symbol: ANLN
  Gene Name: anillin actin binding protein
  ENST ID: ENST00000446635
  CDS Start-End: 1-829
gtccaaaaccaggaaaattccaaagaactcgtgtccctcgagctgaatctggtgatagccttggttctgaagatcgtgatcttctttacagatctcaaagattcaaagaaacagaacgtccatcaataaagcaggtgattgttcggaaggaagatgttacttcaaaactggatgaaaaaaataatgcctttccttgtcaagttaatatcaaacagaaaatgcaggaactcaataacgaaataaatatgcaacagacagtgatctatcaagctagccaggctcttaactgctgtgttgatgaagaacatggaaaagggtccctagaagaagctgaagcagaaagacttcttctaattgcaactgggaagagaacacttttgattgatgaattgaataaattgaagaacgaaggacctcagaggaagaataaggctagtccccaaagtgaatttatgccatccaaaggatcagttactttgtcagaaatccgcttgcctctaaaagcagattttgtctgcagtacggttcagaaaccagatgcagcaaattactattacttaattatactaaaagcaggagctgaaaatatggtagccacaccattagcaagtacttcaaactctcttaacggtgatgctctgacattcactactacatttactctgcaagatgtatccaatgactttgaaataaatattgaagtttacagcttggtgcaaaagaaagatccctcaggccttgataagaagaaaaaaacatccaagtccaaggctattactccaaagcgactcctcacatctataaccacaaaaagcaacattcattcttc

SEQ ID NO: 107290 - DNA, 596 bp, Homo sapiens
  Payload ID: 1062
  Gene Symbol: ANLN
  Gene Name: anillin actin binding protein
  ENST ID: ENST00000424865
  CDS Start-End: 90-596
gtgcgggccggggtcgccgcggctgcggcctgctgtggttgaaactgctggagcgaacccgtgccaggcgagagaatcttcagagaaaaatggctgagaggcccacagcagctccaaggtctatgactcatgctaagcgagctagacagccactttcagaagcaagtaaccagcagcccctctctggtggtgaagagaaatcttgtacaaaaccatcgccatcaaaaaaacgctgttctgacaacactgaagtagaagtttctaacttggaaaataaacaaccagttgagtcgacatctgcaaaatcttgttctccaagtcctgtgtctcctcaggtgcagccacaagcagcagataccatcagtgattctgttgctgtcccggcatcactgctgggcatgaggagagggctgaactcaagattggaagcaactgcagcctcctcagttaaaacacgtatgcaaaaacttgcagagcaacggcgccgttgggataatgatgatatgacagatgacattcctgaaagctcactcttctcaccaatgccatcagaggaaaaggctgcttcccctcccagacctctgctttcaaatgcc

SEQ ID NO: 107291 - DNA, 463 bp, Homo sapiens
  Payload ID: 1062
  Gene Symbol: ANLN
  Gene Name: anillin actin binding protein
  ENST ID: ENST00000418118
  CDS Start-End: 356-463
gtttcggtcctacagataaaactcagggaggaaggctttgagtctgtcctaaaaggctgttgcgagaggtctttcagcccccgtttttaccatgtccctctgcagtcctggcgcagcaagagtgaggcgcaggcctgcggaacgggtcctgctggaagcagctggaatgccctgcagggcggggtccggggccggtgactcagtgcggctgccgccgggaaaggcagtaggatgtgtgatttgcggagttcacgcagcccgcaggggagatgctaatgaaatgacagcaaaacgttaaaataagcagaaactgctggagcgaacccgtgccaggcgagagaatcttcagagaaaaatggctgagaggcccacagcagctccaaggtctatgactcatgctaagcgagctagacagccactttcagaagcaagtaaccagcagcccctctctggtggtgaaggt

SEQ ID NO: 107292 - DNA, 580 bp, Homo sapiens
  Payload ID: 1062
  Gene Symbol: ANLN
  Gene Name: anillin actin binding protein
  ENST ID: ENST00000452877
  CDS Start-End: 1-79
gtctttggttaatgcctcaatttccagctctgtggtaaaaagctacttctccagtgaaatctactacatctatcactgatgctaaaagttgtgagggacaaaatcctgagctacttccaaaaactcctattagtcctctgaaaacgggggtatcgaaaccaattgtgaagtcaactttatcccagacagttccatccaagggagaattaagtagagaaatttgtctgcaatctcaatctaaagacaaatctacgacaccaggaggaacaggaattaagcctttcctggaacgctttggagagcgttgtcaagaacatagcaaagaaagtccagctcgtagcacaccccacagaacccccattattactccaaatacaaaggccatccaagaaagattattcaagcaagacacatcttcatctactacccatttagcacaacagctcaagcaggaaactcactgtcagagcactcccctcaaaaaacaccaaggtgtttcaaaaactcagtcacttccagtaacagaaaaggtgaccgaaaaccagataccagccaaaaattctagtacagaacctaaagg

SEQ ID NO: 107293 - DNA, 707 bp, Homo sapiens
  Payload ID: 1062
  Gene Symbol: ANLN
  Gene Name: anillin actin binding protein
  ENST ID: ENST00000428612
  CDS Start-End: 1-707
tcaagaacatagcaaagaaagtccagctcgtagcacaccccacagaacccccattattactccaaatacaaaggccatccaagaaagattattcaagcaagatgtatccaatgactttgaaataaatattgaagtttacagcttggtgcaaaagaaagatccctcaggccttgataagaagaaaaaaacatccaagtccaaggctattactccaaagcgactcctcacatctataaccacaaaaagcaacattcattcttcagtcatggccagtccaggaggtcttagtgctgtgcgaaccagcaacttcgcccttgttggatcttacacattatcattgtcttcagtaggaaatactaagtttgttctggacaaggtcccctttttatcttctttggaaggtcatatttatttaaaaataaaatgtcaagtgaattccagtgttgaagaaagaggttttctaaccatatttgaagatgttagtggttttggtgcctggcatcgaagatggtgtgttctttctggaaactgtatatcttattggacttatccagatgatgagaaacgcaagaatcccataggaaggataaatctggctaattgtaccagtcgtcagatagaaccagccaacagagaattttgtgcaagacgcaacacttttgaattaattactgtccgaccacaaagagaagatgaccgagagactc

SEQ ID NO: 107294 - DNA, 8203 bp, Homo sapiens
  Payload ID: 1063
  Gene Symbol: ANKH
  Gene Name: ANKH inorganic pyrophosphate transport regulator
  Uniprot ID: Q9HCJ1
  ENST ID: ENST00000284268
  CDS Start-End: 332-1810
agagcgcttataatggagccgctgtcagcagaaccttctgccgccgccgccgccgccgccgtccctcctcttttttttcccggcagatctttgttgtgtgggagggcagcagggatggacttgagcttgcggatcccctgctagagcagccgcgctcggagaaggcgccgcagccgcgaggaggagccgccgccgccgcgcccgaggccccgccgcccgcggcctctgtcggcccgcgccccgctcgccccgtcgccccgtcgcccctcgcctccccgcagagtcccctcgcggcagcagatgtgtgtggggtcagcccacggcggggactatggtgaaattcccggcgctcacgcactactggcccctgatccggttcttggtgcccctgggcatcaccaacatagccatcgacttcggggagcaggccttgaaccggggcattgctgctgtcaaggaggatgcagtcgagatgctggccagctacgggctggcgtactccctcatgaagttcttcacgggtcccatgagtgacttcaaaaatgtgggcctggtgtttgtgaacagcaagagagacaggaccaaagccgtcctgtgtatggtggtggcaggggccatcgctgccgtctttcacacactgatagcttatagtgatttaggatactacattatcaataaactgcaccatgtggacgagtcggtggggagcaagacgagaagggccttcctgtacctcgccgcctttcctttcatggacgcaatggcatggacccatgctggcattctcttaaaacacaaatacagtttcctggtgggatgtgcctcaatctcagatgtcatagctcaggttgtttttgtagccattttgcttcacagtcacctggaatgccgggagcccctgctcatcccgatcctctccttgtacatgggcgcacttgtgcgctgcaccaccctgtgcctgggctactacaagaacattcacgacatcatccctgacagaagtggcccggagctggggggagatgcaacaataagaaagatgctgagcttctggtggcctttggctctaattctggccacacagagaatcagtcggcctattgtcaacctctttgtttcccgggaccttggtggcagttctgcagccacagaggcagtggcgattttgacagccacataccctgtgggtcacatgccatacggctggttgacggaaatccgtgctgtgtatcctgctttcgacaagaataaccccagcaacaaactggtgagcacgagcaacacagtcacggcagcccacatcaagaagttcaccttcgtctgcatggctctgtcactcacgctctgtttcgtgatgttttggacacccaacgtgtctgagaaaatcttgatagacatcatcggagtggactttgcctttgcagaactctgtgttgttcctttgcggatcttctccttcttcccagttccagtcacagtgagggcgcatctcaccgggtggctgatgacactgaagaaaaccttcgtccttgcccccagctctgtgctgcggatcatcgtcctcatcgccagcctcgtggtcctaccctacctgggggtgcacggtgcgaccctgggcgtgggctccctcctggcgggctttgtgggagaatccaccatggtcgccatcgctgcgtgctatgtctaccggaagcagaaaaagaagatggagaatgagtcggccacggagggggaagactctgccatgacagacatgcctccgacagaggaggtgacagacatcgtggaaatgagagaggagaatgaataaggcacgggacgccatgggcactgcagggacagtcagtcaggatgacacttcggcatcatctcttccctctcccatcgtattttgttcccttttttttgttttgttttggtaatgaaagaggccttgatttaaaggtttcgtgtcaattctctagcatactgggtatgctcacactgacggggggacctagtgaatggtctttactgttgctatgtaaaaacaaacgaaacaactgacttcatacccctgcctcacgaaaacccaaaagacacagctgcctcacggttgacgttgtgtcctcctcccctggacaatctcctcttggaaccaaaggactgcagctgtgccatcgcgcctcggtcaccctgcacagcaggccacagactctcctgtcccccttcatcgctcttaagaatcaacaggttaaaactcggcttcctttgatttgcttcccagtcacatggccgtacaaagagatggagccccggtggcctcttaaatttcccttccgccacggagttcgaaaccatctactccacacatgcaggaggcgggtggcacgctgcagcccggagtccccgttcacactgaggaacggagacctgtgaccacagcaggctgacagatggacagaatctcccgtagaaaggtttggtttgaaatgccccgggggcagcaaactgacatggttgaatgatagcatttcactctgcgttctcctagatctgagcaagctgtcagttctcacccccaccgtgtatatacatgagctaacttttttaaattgtcacaaaagcgcatctccagattccagaccctgccgcatgacttttcctgaaggcttgcttttccctcgcctttcctgaaggtcgcattagagcgagtcacatggagcatcctaactttgcattttagtttttacagtgaactgaagctttaagtctcatccagcattctaatgccaggttgctgtagggtaacttttgaagtagatatattacctggttctgctatccttagtcataactctgcggtacaggtaattgagaatgtactacggtacttccctcccacaccatacgataaagcaagacattttataacgataccagagtcactatgtggtcctccctgaaataacgcattcgaaatccatgcagtgcagtatatttttctaagttttggaaagcaggttttttcctttaaaaaaattatagacacggttcactaaattgatttagtcagaattcctagactgaaagaacctaaaaaaaaaaatattttaaagatataaatatatgctgtatatgttatgtaatttattttaggctataatacatttcctattttcgcattttcaataaaatgtctctaatacaatacggtgattgcttgtgtgctcaacatacctgcagttgaaacgtattgtatcaatgaacattgtaccttattggcagcagttttataaagtccgtcatttgcatttgaatgtaaggctcagtaaatgacagaactatttttcattatgggtaactggggaataaatgggtcactggagtaggaatagaagtgcaagctggaaaggcaaaaatgagaaagaaaaaggcaggccctttgtgtctaccgttttcagtgctgtgtgatcatattgttcctcacagcaaaaaagaatgcaagggcataatgttagctgtgaacatgccagggttgcattcacattcctgggtacccagtgctgatggggtgtgcccacgtggggacatgtccttggcgtgcttcctcagagtggcttttcctccattaatacatatatgagtactgaaaaattaagttgcatagctgctttgcagtggtttcagaggcagatctgagaagattaaaaaaaaatctcaatgtatcagctttttttaaaggacattactagaaaattaaacagtattttttaacatgtgtgactttcatgcttctggggttggagcttaaagatccaaactgagaaagcaggccgggcatggtggctcatgcctgtaatcccaacactttgggaggccaaggagggtggatcacttaaggtcaggagtttgagaccagcctggccaacatggcaaaaccctgtctctactaaaaacataaaaattagctgggggtggtagcacatacctgtaatcccagctactcaggaggctgaggcaggagaatttgcttgatcctgggaggcagaggttgtagtgagccgagatcgcgccatcgcactccagcctgggtgacaagagcaaaactccatctcaaaaaaaaaaaaaatcctttccctctaaatccaggaaggatcagcaagggcctcctcattatgagatgaggaaatacaactccagagattccttcagtgatcaagatcagtgggccataatatttggttagagtttctgagaacacaggaagcaatgccacactcaggccaccacaatggagctgatttggcaggacttgttcaaacctttcaccttaaagcacgtgatccttcttcgtacattttcttcacttgggctgcttaagtcacagcctaacaactttgaggcaaaactgagaactggcatattctcctgcgtttcttctaatcgagtcccatcatccagctagacatgagagatcaaaccagggagggtgacctttctccttcccacttttcagagtcattggggcaactttttgacttttgtgaccaaagaaacattcccccaaaacatttatttttcattgtagggcattcagctgacagctgcattttagaaagttaccatgcctgtgagattctcatgtcaaagaccagggaaagaccaggtgtgactttctccaaaactgagtgattgcttgtggatgaatacaatctaaaaatacaaggccatgaagtagtttttcatttagatgctgagaaataataggtttgggcagctcaaagcataggaaatagtaagggttttctagagctcctcctttggtggcctgtttgagtagcacaagggacgtcatcctaaatgtgcagttgccatttgttctgtagtgacttacagggatctcagtggcaaagggcgtcagtgagacaacaactgagcaaaaagaactagacgaggcttgcgcttggaaagtcacggtaggattggacctgccggccacatggctcagggagtattgacggatttgcacattggcaggaaactctcccgtttgggattctttaaatggggcacagaaggccacttgtttgcatttctgggtaaaaaacagtcatcccccatgactgcctgcatcgggtttgtcttgtgccaaagttactcttcctttgtttttactttgccttgatttttagcattagctggtagtttggcttggaaatgtcctggatagccgattccctaagaaactgaaacatttaatattggcttaggatgtatcagatggggccaaataaagcttctttacaatagtaaaagcactttatacttcactctctgagtcttcccaataaataaccttgggaggtgcagggggtggggggcccaggatggggaggcctgggagctcccagggtagtgacagagttgggctgagttctccagacgccaggatgcgtcgcagcggggccagctcaggagtgctcactcccagccctctggatctctctcctggttggaataatcattacatatcgtaactctcaaaatttattcacttatattttcagaataagaagtgtgaaatgttaacagctctctgctctcttacttgttccccatttggggatcttctggagggaaggggcagggggagagtaacttttctatatccttggtttctaggaacacatcgatttgaagactcagtagctgactggtttttttttttcccccttcaaactgaagtgcgagtgtgcgtgtgttccacaaaatagcaagtatttatagtgttgtaattacatttccttgagaaatattttcttgtatttaaaaatctttctacttcagtaactcccagcagaacagtgcccaggacagcatgtgccggttagtaccagctttgcaggtgagctgacttctaaacttaggacgacgtcttcatcaatcaaactagtgcacagtccagaaaaaggggtcctttatcttctaagttctgctcctcacctttctttggaaccaaaattgcagtggagtgtgaggaagagctttgaaagacgtggagtgttgagatgtctgcattgcacattcagccggttcaaagccagcagctcctgcctgcattctgtagacatcgccctcacacacagtcctctgatggctctcatataaagcactcaaaccgtaggaaagcatgtttttgagcaacgtgtctgggatactcctctgtgtggttattttgaatctctatttctgtcattgaagcagcaaaaaacatcatgtgactcatcaactgatctaatcacacttaaaacaggatgtagagaaaaatctgatgagaaacgtaaaagggcctgttgcctgcccttttaaaggcaaaatgtctaaaatcatgcaaatgttcaaaatgagagaaattgcattgtggaatcaaaataacccaaactccactcagaaaagtcacaaatatatagtatactatctgatctcaaaagggaaaaacgagatgataagaccttaagtttagactttattttcttctcaagagtggacattaaatctattaacttgcaactttctgctgggaagagcatcaaaggtgggcctcctaaatcatttttgaaaaacctctgtcaagtccaagtggttccaggagaattatagccagtatcttttaaaatatttcattttagtgataatgtttttctctgcttcatttgcaatcaaccaggatctctaaaagactgcataagatatatgcacttttataggtggctgtcagctacacatagattcagcaaattttttttatatagtacctgtttttaagttaggctacataacttaaagtgcactttactaacaagacttgacattagcgtctacaatatgtatatgtaaacaaaagcacacaagaactaggcaccctttctctctccaagagtttaagtggtttccttaggttaaagaaggggacagaccagctaaaaatggttgtaccactcactgtacaacctcatggaaattctcactataagatttagaggcaatgttccctagctataagccagggcaagaaatggcgcctctggagttggggaacattaggggaacattacaaccgggtagatgctggttccctgaagtgtggggccatgaacatgcagggacccacggtttgaatgaaacagctactgaaagctaagttcaaaccacccttgcgtaacaaaggagtacagggtacacatcaacaccaatcacccagcaccccacagcgatggtcatgtcaccgtgcagcaggtcccttaccccagggctgccacatccacaagccttgcagtggcaaatacgctgctccttggatttaatgagatattttggttgcttaatgatgtactgatcagggaactgtctaaagctagtagggccaaggagttaatcaaagggcttcgggaaagtggacaagagccacacacgtgattctgttccatgccgacactcattcatttaagaagtgtattcaagctggaggcttccatatcactcacgcttcttggcctcaccttgctcatctgtccaatgggaggcttgagccattattgctaaggccccttcctgatctaacattctgtttatgatctaggatttagaacgtcgtatgagatcctacaatggaagaataaaatcacctcattcttcatttcagatctgaacattagcagtgatctagatttttttttttttaaacaaaattaagtgtgcttagagtcattcctctacatgggctgtggctgtcagcccataggtttgtcagtttcacatcaaaactgtgggtataaactgttgaaaccaatcacattaaaatatttagctgggcacagtggtgtgcatctgtagtcccagctacttgggaggctgaggcaggaggatcgcttaagcacaggagttggaatccagcctgagcaacagagcaaaaccccgtctctaaaatacaaataaaatatttgtgtagtttttgattaaaattgactacagcggtcagtataaaatacatgtcgcttttaaggaagtgctctttatgtatctaacagatggaagtttttgcattggtaagagcatttatatatgctttgtttcagggtttatggatttgtattcatatattgtcaaataggtttcatactctaattttactttaagtaaagcttaaacacttggcatacaa

SEQ ID NO: 107295 - DNA, 1866 bp, Homo sapiens
  Payload ID: 1063
  Gene Symbol: ANKH
  Gene Name: ANKH inorganic pyrophosphate transport regulator
  ENST ID: ENST00000505140
  CDS Start-End: 280-660
ccgccgccgtccctcctcttttttttcccggcagatctttgttgtgtgggagggcagcagggatggacttgagcttgcggatcccctgctagagcagccgcgctcggagaaggcgccgcagccgcgaggaggagccgccgccgccgcgcccgaggccccgccgcccgcggcctctgtcggcccgcgccccgctcgccccgtcgccccgtcgcccctcgcctccccgcagagtcccctcgcggcagcagatgtgtgtggggtcagcccacggcggggactatggtgaaattcccggcgctcacgcactactggcccctgatccggttcttggtgcccctgggcatcaccaacatagccatcgacttcggggagcaggtaagccccggccccgcgccccacgcccgctcgccctgccttggccttacacgcccggacacgggggcggaggggagtcacctgctccgagtccctctttatcctgaaacatttggtcgggtgtgcagcttgtcaagggtgacttttccagcaccccattccctccctccctcccctcaattattcagcagacttttccagccctctctggaaaatgttaaaaagactggatggtgtgaagcttcacctatggaagggtttttagtgcacggcagtattatgtaatttgcgattatgtaaacctcagctctaattaaaatgtagtttctagtagcttaagtgctgggtttttatttacccatggctggtggtaatggtgacggtggggagattctgttttataatgcgtccaagttgatttcccaggtacttccatttttaaacatttgtttcgtagtccaggtaaggattaggggtatcccgaatgtgtcctgataagccggtcttgaccatttatttctagtttgggatttcttttttttccttttccttttctttttttttctttctttctttctttcttttttttttttcatggaccactaaagaaggggagcacatttttgtttggggtcgccttctcgtccttgtttcttttcacgttttctccatgtggcgtcattgaaaatctagcgctgcaagctctccagcgatggggcattggcaccctgcactttgcatgtggggaccgttttggcagggccaccagcgggatgcagctgcgttctaaggccggggagaggatttggtgatggggaggcagtgacatgccaccctgatgggcaggtgtcccaagtggccagagcgtgtgacgagcggcactcctgtattgtggtactgtctttcttctttccttttaagtcaagagacttaaacggatatttatctagaatatgcacctattttgatgcagtactcattgtaaaagtaaaacagctttcaggaggcagttacaaatcggagatttgtgtgactccttcgtttgacgaatatctgtttggatttgtctttctgtgctcaaaacttttgaataattgcaactctgtaagctctctaatatgtagcccacattgtaagctactttttactttgaattttgttggtgataggtgtattacaccttgctgggagtgaatgatggcttatttgtcagcgatttacaaatcctaagatggagaggtagcacgggagtacaaaggccaatgcagcctcaggttcacgtgcttttgagatgattaagaaatgcaaagttaggctgggcaaggtggctcatgcctatgatcgtagcacttggggagatcaatcctagcactttgggaggcttaggctagaggattgcttaggctaaggtgggaggatcgcttgagctcaggagttcaaaaccagcctgggcaacatagtgaaacctcgtctctattaaaaaaaaaaaaa

SEQ ID NO: 107296 - DNA, 2243 bp, Homo sapiens
  Payload ID: 1064
  Gene Symbol: ANKHD1-EIF4EBP3
  Gene Name: ANKHD1-EIF4EBP3 readthrough
  ENST ID: ENST00000437495
  CDS Start-End: 1-1911
tcctctgcacctatcactagcgggcaagctcccaccacatttctacctgcaagtacttctcaagcacagctttcttcacaaaagatggagtctttctctgctgtgccacccaccaaagagaaagtgtccacacaggaccagcccatggcaaacctatgtaccccatcttcaactgcaaacagttgcagtagctctgccagcaacaccccgggagctccagaaactcacccatccagtagtcccactcctacttccagtaacacacaagaggaggcacagccatccagtgtgtctgatttaagtcctatgtcaatgccttttgcatctaactcagaacctgctccattgactttgacatcacccagaatggttgctgctgataatcaggacaccagtaatttacctcagttagctgtaccagcacctcgagtttctcatcgaatgcagcccagaggttctttttactccatggtaccaaatgcaactattcaccaggatccccagtctatttttgttacgaatccagttactttaacaccacctcaaggcccaccagctgcagtgcagctttcttcagctgtgaacattatgaatggttctcagatgcacataaacccagcaaataagtctttgccacctacatttggcccagccacacttttcaatcacttcagcagtctttttgatagtagtcaggtgccagctaaccagggctggggagatggtccactgtcctcacgagttgctacagatgcctctttcactgttcagtcagcgttcctgggtaactcagtgcttggacacttggaaaacatgcaccctgataactcaaaggcacctggcttcagaccaccttcccagcgagtttctactagtccagttgggttaccatccattgacccatcaggcagctccccatcttcctcttctgctcctctggcaagtttttccggcataccaggaacaagggttttcctgcaagggccagctcctgttgggactcctagtttcaacagacaacatttttctccccatccttggacaagcgcctcaaactcatgtgactctcctattccatctgtttcttcgggatcatcttcacctctttcagccacttctgccccaccaacgttgggccaaccaaaaggagtcagtgccagtcaagatcgaaagatacctcccccaattggaacagagagactggcccgaattcggcaaggagggtctgttgcacaagccccggcggggaccagttttgtcgctcccgttggacacagtggaatctggtcatttggtgtcaatgctgtgtcagaaggcttatcaggttggtcgcaatctgtgatggggaaccatccaatgcatcaacaattatcagacccaagcacattctcccaacatcagccaatggagagagatgattctggaatggtagccccctctaacatttttcatcagcctatgggtctgccaatttccatgtatggaggcaccataataccctctcatcctcagcttgctgatgttccaggaggccctctgtttaatggacttcacaatccagatcctgcttggaaccctatgataaaagttatccaaaattcaactgaatgcactgatgcccagcaggccagtctgcttccttcagtccctgctctcaaaggggaaatcccatcacctcagctaaccagaccgaagaagagaattggacggccgatggtggcctctcctaaccagaggcaccaggatcatctacgaccgaaagttcctgctggagtgcaagaactcacccattgcccggacacccccctgctgcctccctcagattcccggggtcacaactcctccaacagcccctctctccaagctggaggagctgaaggagcaggagacagaggaagagatacccgatgacgcacaatttgaaatggacatctaatccagtgcagatgacctggcatgtggagttacagagggatccctcatgccactgctgccaccacctcttcctggggcatccaaaggccagctggcctcatctaatctggaagggagtgacttgttagttccaggcctcctttagttctgaggcagctagaccagggataggagtgggcaacttgccaagcccttaactctacttcctcttcagtctgtggtactcctcctaaccctaaaccctctatgctcaggggctggaactggggaatggagtaagtcaccttctgactgcttagtaaacattc

SEQ ID NO: 107297 - DNA, 8246 bp, Homo sapiens
  Payload ID: 1064
  Gene Symbol: ANKHD1-EIF4EBP3
  Gene Name: ANKHD1-EIF4EBP3 readthrough
  ENST ID: ENST00000532219
  CDS Start-End: 61-7914
gatcagcggcggcggtgaccgcgagtgggtcggcaccgtctccggctccgggtgcgaacaatgctgactgatagcggaggcggcggcacctcctttgaggaggacctggactctgtggctccgcgatccgccccagctggggcctcggagccgcctccgccgggaggggtcggtctggggatccgcaccgtgaggctctttggggaggccgggccagcgtcgggagtcggcagcagcggcggcggcggcagcggcagcggtacgggcggaggggacgcggcgctggatttcaagttggcggctgccgtgctgaggaccgggggtggaggtggtgcctctggcagtgacgaggacgaagtgtccgaggttgaatcatttattttggaccaagaagatctggataacccagtgcttaaaacaacatcagagatattcttatcaagtactgcagaaggagcagacttacgcactgtggatccagagacacaggcacgactagaagcattgctagaagcagcaggaattggcaaattgtcaactgctgatggtaaagcttttgcagatcctgaggtactccggagactgacatcctcagttagttgtgcactggatgaagctgctgctgcactgacacggatgaaagcagaaaacagccacaatgcaggacaagtggacactcgcagtctagcagaagcttgttcagatggggatgttaatgctgttcgtaaattgctagatgaaggcagaagtgtaaatgaacatacagaagaaggagaaagcctgctgtgtttggcttgttcagcagggtattatgaattagcacaagtattgcttgctatgcatgctaatgttgaagatcgagggaataaaggagacataactcccctgatggcagcttccagtggaggttacttagatattgtgaaattattacttcttcatgatgctgatgtcaactcccagtctgcaacaggaaacactgcgctaacttatgcatgtgctggaggatttgttgacattgttaaagtgctccttaatgaaggtgcaaatatagaagatcataatgaaaatggacatactcccttaatggaagcagccagtgcaggtcatgtggaagttgcaagagttcttttagatcatggtgcaggcatcaacactcattctaatgaattcaaagaaagtgctctaacacttgcttgctacaaaggccatttggatatggttcgctttctacttgaagctggtgcagatcaagagcacaaaacagatgagatgcacactgccttaatggaggcctgcatggatggacatgtagaggtggcacgtttgcttttggatagtggtgctcaagtgaacatgcctgcagattcatttgaatctccattgacgctagctgcctgtggaggacatgttgaattggcagctctacttattgaaaggggagcaaatcttgaagaagttaatgatgaaggatacactcccttgatggaagctgcccgggaaggacatgaagaaatggtggcactactcttagcacaaggagcaaatataaatgcccagacagaagaaactcaagaaactgctcttactttggcttgctgtggaggattttctgaagttgcagactttcttattaaggcaggggctgatatagaacttggctgctccacacctctgatggaggcatctcaggagggacacctggaattggttaaatatttgctggcttctggcgctaatgtgcatgctacaacagcaacaggagacacagccttaacctatgcttgtgaaaatggacatacggatgttgcagatgttttacttcaagcaggggctgatttagaacatgaatctgaaggtggaagaacacctttgatgaaagctgcaagagctggtcatttgtgcactgtgcagtttcttattagcaaaggtgccaatgttaacagggctacagccaataatgatcatacagtagtgtcgctggcatgtgcaggaggccacctggcagttgttgagcttctcttggctcatggggctgaccctactcatcgactcaaggatggttcaacaatgctcattgaagctgcaaagggtggccatactaatgtagtttcttatctgttggattatccaaataatgttctgtcagttcccaccacagatgtgtctcagctccctccaccttctcaagatcagtctcaggtgccacgtgtgccaacgcatacacttgccatggttgtacctccccaggaacctgacagaacttcacaggagaactctcctgcccttttaggagtgcaaaaaggtacatccaagcagaagtccagttccctccaggtagcagatcaggacctactgccatcttttcacccataccagcctttggagtgcatagtagaggagactgaaggcaagctgaatgaactgggacaaagaattagtgctattgaaaaagcacagcttaagtcactggagttaattcaaggtgaacctctgaacaaagataagatagaagaacttaaaaagaacagagaagagcaagtccagaagaagaagaaaatattgaaagaactgcagaaagtggaaaggcagttgcagatgaaaacacagcagcaatttaccaaagaatacttggaaaccaaaggtcagaaagacacagtgtctctacaccaacagtgctctcatagaggagtcttcccagaaggggaaggagatggtagtctcccagaggatcacttttcagagttacctcaggttgacacaatcttatttaaagataatgatgttgatgatgagcaacagtctccaccatcggcagaacagattgattttgtcccagtccagcctttatcatctccacagtgtaacttttccagtgacttaggttctaatgggacaaattctcttgaacttcagaaagtatcaggtaatcagcagattgtaggacagcctcagattgctattactggacatgatcaggggctgttagttcaagaaccagatggactaatggttgcaactccagctcagacgcttaccgacactcttgatgacctgatagcagctgtgagtaccagagtgcccactggttccaacagttcttctcagaccacagagtgtcttacacctgaatcctgttcgcagactacaagcaatgtggcttcccaatcgatgcctcctgtgtatccttcagttgacattgatgcacatactgagagcaatcatgacacagcattaacactagcttgtgcaggtggtcatgaagaacttgtatctgtgctcattgcacgggatgccaaaattgaacacagagacaaaaaaggtttcacaccactaatcctggcagcaacagcagggcatgttggagttgttgaaatccttttggataaaggtggagatatagaagcacagtctgaacgaactaaggatactccgctttcattggcatgttctggtggacgtcaggaggtggtagacttgctgctggctcgaggtgcaaataaagaacataggaacgtatctgattatacaccactgagtctagctgcgtctggaggatatgttaatatcattaagattctgcttaatgctggggcagaaattaattcaaggactgggagtaaactaggtatttctcccctgatgttggctgcaatgaatggacatgttcctgcagtaaaattgctgctcgatatgggttcagacattaatgcccaaatagagaccaatcggaacacggctctcaccctggcctgtttccagggccgagcagaagtagtgagtttgcttctggaccgaaaagccaatgttgaacatagggcaaagacgggtcttacccccttgatggaagcagcttctggagggtatgcagaggttggaagagttcttcttgataaaggagcagatgttaatgctccccctgtgccttcctcaagagatactgctttaacaatagcagcagacaaaggtcactacaaattttgtgaactcctgattcataggggagcccacattgatgttcgtaacaaaaagggaaatacgccactttggctggcatccaatggaggtcattttgatgttgtgcagttgctagtgcaagcaggtgctgatgtggatgcagcagataaccggaaaatcacacctcttatgtcagcatttcgcaagggtcatgtaaaagttgttcaatatttggtaaaggaagtaaatcagttcccttctgatatagaatgcatgagatacatagcaacaattacagataaggaactgttgaaaaaatgtcatcaatgtgtcgaaaccattgtgaaggctaaagaccagcaagctgcagaagcaaataagaatgcgagtattcttttaaaggaacttgatctggaaaagtcaagagaagagagcagaaagcaggctcttgctgctaaaagagaaaaaagaaaagaaaagagaaaaaagaaaaaagaggaacagaaaaggaaacaggaagaagatgaagaaaacaaacctaaggagaattcggaactaccagaggatgaagatgaagaggagaatgatgaagatgtggagcaagaagttcccatagaacctcctagtgcaaccaccaccactacgattggaatctctgcaacatctgcaacattcacaaatgtgtttgggaaaaaaagggccaatgtggtgacaactcccagcaccaatcggaaaaataagaagaacaaaacaaaagaaacccctcctacagcacatttaattttaccagaacaacatatgtctttagcccaacaaaaggcagataaaaataaaataaatggagaacctagaggtggtggtgcaggtgggaatagtgattcagataacttggacagcacagactgcaacagtgagagtagcagtggtggtaaaagccaagagttaaattttgtgatggatgtgaattcctctaaatacccctcactgctccttcattcccaagaagaaaagacaagtactgctacttccaaaactcagacacgacttgaaggtgaagtgactcctaattccttgtcaaccagctacaagacagtgtcattgccattaagctctccaaacataaagctgaatctcactagccctaaaaggggtcagaaaagagaagaagggtggaaagaagttgtacgaaggtcaaagaaattgtctgttccagcctcagtggtgtcgaggataatgggaagaggaggatgcaacatcactgcaatacaggatgttactggtgcccatattgatgtggataaacaaaaagataagaatggcgagagaatgatcacaataaggggtggcacagaatcaacaagatatgcagttcaactaatcaatgcactcattcaagatcctgctaaggaactggaagacttgattcctaaaaatcatatcagaacacctgccagcaccaaatcaattcatgctaacttctcatctggagtaggtaccacagcagcttccagtaaaaatgcatttcctttgggtgctccaactcttgtaacttcacaggcaacaacgttatctacgttccagcccgctaataaacttaataagaatgttccaacaaatgtacgttcttctttcccagtttctctacccttagcttatcctcaccctcattttgccctgctggctgctcaaactatgcaacagattcggcatcctcgcttacccatggcccagtttggaggaaccttctcaccttctcctaacacatggggaccattcccagtgagacctgtgaatcctggcaacacaaatagctctccaaagcataataacacaagccgtctacctaaccagaacgggactgttttaccctcagagtctgctggactagctactgccagttgtcctatcactgtctcttctgtagttgctgccagtcagcaactgtgtgtcactaatacccggactccttcatcagtcagaaagcagttgtttgcctgtgtgcctaagacaagtcctccagcaacagtgatttcttctgtgacaagcacttgtagttccctgccttctgtctcctctgcacctatcactagcgggcaagctcccaccacatttctacctgcaagtacttctcaagcacagctttcttcacaaaagatggagtctttctctgctgtgccacccaccaaagagaaagtgtccacacaggaccagcccatggcaaacctatgtaccccatcttcaactgcaaacagttgcagtagctctgccagcaacaccccgggagctccagaaactcacccatccagtagtcccactcctacttccagtaacacacaagaggaggcacagccatccagtgtgtctgatttaagtcctatgtcaatgccttttgcatctaactcagaacctgctccattgactttgacatcacccagaatggttgctgctgataatcaggacaccagtaatttacctcagttagctgtaccagcacctcgagtttctcatcgaatgcagcccagaggttctttttactccatggtaccaaatgcaactattcaccaggatccccagtctatttttgttacgaatccagttactttaacaccacctcaaggcccaccagctgcagtgcagctttcttcagctgtgaacattatgaatggttctcagatgcacataaacccagcaaataagtctttgccacctacatttggcccagccacacttttcaatcacttcagcagtctttttgatagtagtcaggtgccagctaaccagggctggggagatggtccactgtcctcacgagttgctacagatgcctctttcactgttcagtcagcgttcctgggtaactcagtgcttggacacttggaaaacatgcaccctgataactcaaaggcacctggcttcagaccaccttcccagcgagtttctactagtccagttgggttaccatccattgacccatcaggcagctccccatcttcctcttctgctcctctggcaagtttttccggcataccaggaacaagggttttcctgcaagggccagctcctgttgggactcctagtttcaacagacaacatttttctccccatccttggacaagcgcctcaaactcatccacttctgccccaccaacgttgggccaaccaaaaggagtcagtgccagtcaagatcgaaagatacctcccccaattggaacagagagactggcccgaattcggcaaggagggtctgttgcacaagccccggcggggaccagttttgtcgctcccgttggacacagtggaatctggtcatttggtgtcaatgctgtgtcagaaggcttatcaggttggtcgcaatctgtgatggggaaccatccaatgcatcaacaattatcagacccaagcacattctcccaacatcagccaatggagagagatgattctggaatggtagccccctctaacatttttcatcagcctatggcaagtggttttgtggatttttctaaaggtctgccaatttccatgtatggaggcaccataataccctctcatcctcagcttgctgatgttccaggaggccctctgtttaatggacttcacaatccagatcctgcttggaaccctatgataaaagttatccaaaattcaactgaatgcactgatgcccagcaggccagtctgcttccttcagtccctgctctcaaaggggaaatcccatcacctcagctaaccagaccgaagaagagaattggacggccgatggtggcctctcctaaccagaggcaccaggatcatctacgaccgaaagttcctgctggagtgcaagaactcacccattgcccggacacccccctgctgcctccctcagattcccggggtcacaactcctccaacagcccctctctccaagctggaggagctgaaggagcaggagacagaggaagagatacccgatgacgcacaatttgaaatggacatctaatccagtgcagatgacctggcatgtggagttacagagggatccctcatgccactgctgccaccacctcttcctggggcatccaaaggccagctggcctcatctaatctggaagggagtgacttgttagttccaggcctcctttagttctgaggcagctagaccagggataggagtgggcaacttgccaagcccttaactctacttcctcttcagtctgtggtactcctcctaaccctaaaccctctatgctcaggggctggaactggggaatggagtaagtcaccttctgactgcttagtaaacattc

SEQ ID NO: 107298 - DNA, 6379 bp, Homo sapiens
  Payload ID: 1065
  Gene Symbol: ANK1
  Gene Name: ankyrin 1, erythrocytic
  Uniprot ID: P16157
  ENST ID: ENST00000265709
  CDS Start-End: 283-5976
gggaggcggcgggccctgcccagagcccgtcccgggcgccggcaagcgagctccggccgcggcggcagcgccatcccgggccgcgggcagccgcccctcgccctccgcgtccggaactgccttcgccttcccgcgaccccgcagcagccggccctcggggcgccacgaacgctgtcccctctgtggagcagagacccccttccccttcttagggggtgtcgcctcggggatcgctgagcgctaggggtccaggaggcggggacgggagcgccgtgacccgccatggctcaagcggccaaacagctgaagaaaatcaaagacatcgaggcgcaggccctccaggagcagaaggagaaggaggaatccaacaggaagcggagaaaccgctcccgtgaccgaaagaagaaggccgatgctgctaccagctttctgagagcagcaagatcaggtaacttggacaaagctttggatcacctgcggaatggggtagatattaacacctgtaaccagaatgggttgaatggcttgcatctggcttctaaggaaggccatgtgaaaatggtggttgaacttctgcacaaagaaatcattctagaaacgacaaccaagaaggggaacacggccctgcacatcgctgctctagccgggcaggatgaggtggtccgggagcttgtcaactatggagccaacgtcaacgcccagtcacagaaaggttttacacccctgtacatggcagcacaagagaaccacttggaagtggttaagtttttactggaaaatggagctaaccagaatgtagccacagaagacggcttcacgcctctggcggtagccctgcagcagggccatgagaacgtcgtcgcgcacctcatcaactacggcaccaaggggaaggtgcgcctcccggccctgcacatcgcggcccgcaacgacgacacgcgcacggctgcggtgctgctgcagaacgaccccaacccggacgtgctttccaagacgggattcacgcccctgcacattgcggctcactacgagaacctcaacgtggcccagttgctcctcaacagaggagccagcgtcaatttcacaccacagaacggcatcacgccactgcacatcgcctcccgcaggggcaacgtgatcatggtgcggctgctgctggatcggggagcccagatagaaaccaagaccaaggacgaattgacacctctccactgtgcagctcgaaatgggcacgtgcgaatctcagagatcctgctggaccacggggcaccaatccaagccaaaaccaagaacggcctgtccccaattcacatggcggctcagggagaccacctcgactgtgtccggctcctgttgcaatacgacgcagagatagacgacatcaccctggaccacctgaccccactccacgtggctgcccactgtggacaccacagggtggctaaggtccttctggataaaggggccaaacccaactccagagccctgaatggctttacccccttacacatcgcctgcaaaaagaaccacgtccgtgtcatggagctgctgctgaagacgggagcctcgatcgacgcggtcaccgagtctggcctgacacctctccacgtggcctccttcatggggcaccttcccatcgtgaagaacctcctgcagcggggggcgtcgcccaacgtctccaacgtgaaagtggagaccccgctacacatggcagccagagccgggcacacggaagtggccaaatatttactccagaacaaagccaaagtcaatgccaaggccaaggatgaccagaccccacttcactgtgcagctcgcatcggccacacaaacatggtgaagctcctgctggaaaataacgccaaccccaacctggccaccaccgccgggcacacccccctgcacattgcagcccgtgagggccatgtggaaacagtcctggcccttctggaaaaggaagcatcccaggcctgcatgaccaagaaaggatttacccctctgcacgtggcggccaagtacgggaaggtgcgggtggcagagctgctgctggagcgggacgcacacccgaatgctgccggaaaaaatggcctgacccccctgcacgtggccgtccatcacaacaacctggacatcgtcaagctgctgcttccccggggcggctccccgcacagccctgcctggaatggctacacccctttgcacatcgctgccaagcagaaccaggtggaggtggcccgtagtctgctgcagtatgggggctcagcaaacgccgagtcggtgcaaggtgtgacgccccttcacctggccgcccaggagggccacgcagagatggtggctctgctgctctcgaaacaagccaatggcaacctggggaacaagagcggactcactcccctccatctggtagcacaagaaggccacgttccagtggcagatgtgctgatcaaacacggcgtcatggtggacgccaccacccggatgggctacactcccctccatgtggccagtcactatggaaacatcaagctggtgaagtttctgctgcagcaccaggcagatgtcaatgccaagaccaagctaggatacagccccctgcaccaggcagcccagcagggacacacagacatcgtgactctgcttctgaaaaacggtgcttccccaaacgaggtcagctcggatggaaccacacctctggccatagccaagcgcttgggctacatttctgtcaccgacgtgctcaaggtcgtcacggatgaaaccagtttcgtgttagtcagtgataagcatcgaatgagtttccctgagacagttgatgagatcctggatgtctcggaagatgaaggaactgctcatataactataatgggggaagaactcatcagcttcaaggctgagaggcgggattccagggatgttgatgaagagaaggagctgctggattttgtgccgaagctagaccaagtggtggaatctccagccatccccaggattccctgtgccatgcctgagacagtggtgatcaggtcagaagagcaggagcaggcatctaaagagtatgatgaggactccctcatccccagcagcccggccaccgagacctcagacaacatcagcccggtggccagcccggtgcatacagggtttctggtgagcttcatggttgacgcccggggtggttccatgagaggaagtcgccacaacggcctgcgagtggtgatcccgccacggacgtgcgcagcgcccacccgcatcacctgccgcctggtcaagccccagaagctcagcacgccgcccccactggccgaggaggagggcctggccagcaggatcatagcactggggcccacgggggcacagttcctgagccctgtaatcgtggagatcccgcactttgcctcccatggccgtggagaccgcgagctcgtggttctgaggagcgaaaacggctccgtgtggaaggagcacaggagccgctatggagagagctacctggatcagatcctcaacgggatggacgaagagctggggagcctggaggagctagagaagaagagggtgtgccgaatcatcaccaccgacttcccgctgtacttcgtgatcatgtcacggctctgccaggactacgacaccatcggtcccgaagggggctccctgaagagcaagctggtgcccctggtacaggcaacgttcccggagaatgccgtcaccaagagagtgaagctggctctgcaggcccagcctgtcccggatgagcttgtcactaagctcctgggcaaccaggccacattcagccccattgtcaccgtggagccccggcgccggaagttccaccgccccattgggcttcggatcccactacctccttcctggaccgacaacccgagggacagcggggagggagacaccaccagcctgcgcctgctttgcagcgtcattggaggaacagaccaagcccagtgggaagacataacaggaaccaccaaacttgtatatgccaacgagtgcgccaacttcaccaccaatgtctctgccaggttttggctgtcggactgtcctcggactgctgaggctgtgaactttgccaccctgctgtacaaagagctcactgcagtgccctacatggccaaattcgtcatctttgccaagatgaatgacccccgagaggggcgcctgcgctgctactgcatgacagatgataaagtggacaagaccctggagcagcatgagaacttcgtggaggtggcccggagcagggacatagaggtgttggaaggaatgtccctgtttgcagaactctctgggaacctggtgcctgtgaagaaagctgcccagcagcggagcttccacttccagtcatttcgggagaaccgtctggccatgcctgtaaaggtgagggacagcagtcgagagccgggagggtccctgtcgtttctgcgcaaggcgatgaagtacgaggacacccagcacattctctgccacctgaacatcaccatgcccccctgcgccaagggaagtggagccgaagataggagaaggaccccgacgcccctggccctgcgatacagcattctcagtgagtccacaccaggttctctcagtgggacagagcaggcagagatgaagatggctgttatctcagagcacctcggtctcagctgggcagagttggcccgggagctgcagttcagtgtggaagacatcaacaggatccgagtggaaaatcccaactccctgttggagcagagtgtggccttgctgaacctctgggtcatccgtgaaggccaaaacgcaaacatggagaatctgtacacagccctgcagagcattgaccgtggcgagatcgtgaacatgctggagggttccggccgacagagccgcaacttgaagccagacaggcggcacaccgaccgcgactactcgctgtcaccctcccagatgaatggttactcctcactgcaggacgagctgctgtcccctgcctccctgggctgtgcactttcctctccgctacgtgcagaccagtactggaatgaggtggccgtcctagacgccatccccttggcggccacggagcatgacaccatgctggagatgtctgacatgcaggtgtggtctgcgggcctcacgccttctctggtcactgctgaggactcctctctggagtgtagcaaggctgaggactctgatgccacaggtcacgagtggaagttggagggggcactctcagaggaaccgcggggccccgagttgggctctctggaacttgtggaggacgacacagtggattcagatgccacaaatggccttatcgatttgcttgaacaggaggaaggtcagaggtcagaagagaagctgccaggttctaagaggcaggatgacgcgacaggtgcagggcaggactcagagaatgaagtgtctcttgtttcaggccatcagagggggcaagcccgaatcacacattcccccaccgtgagtcaggtgacggagaggagtcaggacagactgcaggactgggatgcagacggctcgattgtctcatacctgcaagatgctgcacaaggttcctggcaagaggaggtcacgcaaggtccacactcattccagggaacaagtaccatgactgaagggctagagcccggtggatctcaggagtacgagaaggtcctggtgtctgtaagtgagcacacgtggacagaacagcccgaggctgagagctcccaggccgacagggaccggaggcagcaaggccaagaagagcaggtgcaggaggccaagaacaccttcacccaagtggtgcaggggaatgagtttcagaatattccaggggagcaggtgacagaggagcaattcacggatgagcagggcaacattgtcaccaagaagatcattcgcaaggtggttcgacagatagacttgtccagcgccgatgccgcccaggagcacgaggaggatcacacctcgacacccaacccctgaaccccacacactctgccatgcacacaggaggagagctggacctgagggccaccgcagcggtgcacacattcctctgggctgacggcatgacctctgtaagggactcctgctagtcccctcttggcatgaatgactgactgtagacgcatgacctccaggcttcaatcctgcctcttgcaatgacagctgatctgtcggaaccaggacacaaaagcagcaagaagcggggagagagagggatagaaaacaagcgcaggagagcctgcgaacgcaaaagtgaatgagggctttttgtggctggggatgggttttggttttggggttttttttttaaattgttttgacttcgtacagggtactttttcccaacctcatctgtcagaaatccatgtgggcttcctgg

SEQ ID NO: 107299 - DNA, 8297 bp, Homo sapiens
  Payload ID: 1065
  Gene Symbol: ANK1
  Gene Name: ankyrin 1, erythrocytic
  Uniprot ID: P16157
  ENST ID: ENST00000289734
  CDS Start-End: 85-5727
agaggctgcggtgagtccgccagccccagctgctcctcctcaagcccccaaggcccttcggcgggcccctgctgaaagaccggcatgccctattctgtgggcttccgcgaagccgatgctgctaccagctttctgagagcagcaagatcaggtaacttggacaaagctttggatcacctgcggaatggggtagatattaacacctgtaaccagaatgggttgaatggcttgcatctggcttctaaggaaggccatgtgaaaatggtggttgaacttctgcacaaagaaatcattctagaaacgacaaccaagaaggggaacacggccctgcacatcgctgctctagccgggcaggatgaggtggtccgggagcttgtcaactatggagccaacgtcaacgcccagtcacagaaaggttttacacccctgtacatggcagcacaagagaaccacttggaagtggttaagtttttactggaaaatggagctaaccagaatgtagccacagaagacggcttcacgcctctggcggtagccctgcagcagggccatgagaacgtcgtcgcgcacctcatcaactacggcaccaaggggaaggtgcgcctcccggccctgcacatcgcggcccgcaacgacgacacgcgcacggctgcggtgctgctgcagaacgaccccaacccggacgtgctttccaagacgggattcacgcccctgcacattgcggctcactacgagaacctcaacgtggcccagttgctcctcaacagaggagccagcgtcaatttcacaccacagaacggcatcacgccactgcacatcgcctcccgcaggggcaacgtgatcatggtgcggctgctgctggatcggggagcccagatagaaaccaagaccaaggacgaattgacacctctccactgtgcagctcgaaatgggcacgtgcgaatctcagagatcctgctggaccacggggcaccaatccaagccaaaaccaagaacggcctgtccccaattcacatggcggctcagggagaccacctcgactgtgtccggctcctgttgcaatacgacgcagagatagacgacatcaccctggaccacctgaccccactccacgtggctgcccactgtggacaccacagggtggctaaggtccttctggataaaggggccaaacccaactccagagccctgaatggctttacccccttacacatcgcctgcaaaaagaaccacgtccgtgtcatggagctgctgctgaagacgggagcctcgatcgacgcggtcaccgagtctggcctgacacctctccacgtggcctccttcatggggcaccttcccatcgtgaagaacctcctgcagcggggggcgtcgcccaacgtctccaacgtgaaagtggagaccccgctacacatggcagccagagccgggcacacggaagtggccaaatatttactccagaacaaagccaaagtcaatgccaaggccaaggatgaccagaccccacttcactgtgcagctcgcatcggccacacaaacatggtgaagctcctgctggaaaataacgccaaccccaacctggccaccaccgccgggcacacccccctgcacattgcagcccgtgagggccatgtggaaacagtcctggcccttctggaaaaggaagcatcccaggcctgcatgaccaagaaaggatttacccctctgcacgtggcggccaagtacgggaaggtgcgggtggcagagctgctgctggagcgggacgcacacccgaatgctgccggaaaaaatggcctgacccccctgcacgtggccgtccatcacaacaacctggacatcgtcaagctgctgcttccccggggcggctccccgcacagccctgcctggaatggctacacccctttgcacatcgctgccaagcagaaccaggtggaggtggcccgtagtctgctgcagtatgggggctcagcaaacgccgagtcggtgcaaggtgtgacgccccttcacctggccgcccaggagggccacgcagagatggtggctctgctgctctcgaaacaagccaatggcaacctggggaacaagagcggactcactcccctccatctggtagcacaagaaggccacgttccagtggcagatgtgctgatcaaacacggcgtcatggtggacgccaccacccggatgggctacactcccctccatgtggccagtcactatggaaacatcaagctggtgaagtttctgctgcagcaccaggcagatgtcaatgccaagaccaagctaggatacagccccctgcaccaggcagcccagcagggacacacagacatcgtgactctgcttctgaaaaacggtgcttccccaaacgaggtcagctcggatggaaccacacctctggccatagccaagcgcttgggctacatttctgtcaccgacgtgctcaaggtcgtcacggatgaaaccagtttcgtgttagtcagtgataagcatcgaatgagtttccctgagacagttgatgagatcctggatgtctcggaagatgaaggggaagaactcatcagcttcaaggctgagaggcgggattccagggatgttgatgaagagaaggagctgctggattttgtgccgaagctagaccaagtggtggaatctccagccatccccaggattccctgtgccatgcctgagacagtggtgatcaggtcagaagagcaggagcaggcatctaaagagtatgatgaggactccctcatccccagcagcccggccaccgagacctcagacaacatcagcccggtggccagcccggtgcatacagggtttctggtgagcttcatggttgacgcccggggtggttccatgagaggaagtcgccacaacggcctgcgagtggtgatcccgccacggacgtgcgcagcgcccacccgcatcacctgccgcctggtcaagccccagaagctcagcacgccgcccccactggccgaggaggagggcctggccagcaggatcatagcactggggcccacgggggcacagttcctgagccctgtaatcgtggagatcccgcactttgcctcccatggccgtggagaccgcgagctcgtggttctgaggagcgaaaacggctccgtgtggaaggagcacaggagccgctatggagagagctacctggatcagatcctcaacgggatggacgaagagctggggagcctggaggagctagagaagaagagggtgtgccgaatcatcaccaccgacttcccgctgtacttcgtgatcatgtcacggctctgccaggactacgacaccatcggtcccgaagggggctccctgaagagcaagctggtgcccctggtacaggcaacgttcccggagaatgccgtcaccaagagagtgaagctggctctgcaggcccagcctgtcccggatgagcttgtcactaagctcctgggcaaccaggccacattcagccccattgtcaccgtggagccccggcgccggaagttccaccgccccattgggcttcggatcccactacctccttcctggaccgacaacccgagggacagcggggagggagacaccaccagcctgcgcctgctttgcagcgtcattggaggaacagaccaagcccagtgggaagacataacaggaaccaccaaacttgtatatgccaacgagtgcgccaacttcaccaccaatgtctctgccaggttttggctgtcggactgtcctcggactgctgaggctgtgaactttgccaccctgctgtacaaagagctcactgcagtgccctacatggccaaattcgtcatctttgccaagatgaatgacccccgagaggggcgcctgcgctgctactgcatgacagatgataaagtggacaagaccctggagcagcatgagaacttcgtggaggtggcccggagcagggacatagaggtgttggaaggaatgtccctgtttgcagaactctctgggaacctggtgcctgtgaagaaagctgcccagcagcggagcttccacttccagtcatttcgggagaaccgtctggccatgcctgtaaaggtgagggacagcagtcgagagccgggagggtccctgtcgtttctgcgcaaggcgatgaagtacgaggacacccagcacattctctgccacctgaacatcaccatgcccccctgcgccaagggaagtggagccgaagataggagaaggaccccgacgcccctggccctgcgatacagcattctcagtgagtccacaccaggttctctcagtgggacagagcaggcagagatgaagatggctgttatctcagagcacctcggtctcagctgggcagagttggcccgggagctgcagttcagtgtggaagacatcaacaggatccgagtggaaaatcccaactccctgttggagcagagtgtggccttgctgaacctctgggtcatccgtgaaggccaaaacgcaaacatggagaatctgtacacagccctgcagagcattgaccgtggcgagatcgtgaacatgctggagggttccggccgacagagccgcaacttgaagccagacaggcggcacaccgaccgcgactactcgctgtcaccctcccagatgaatggttactcctcactgcaggacgagctgctgtcccctgcctccctgggctgtgcactttcctctccgctacgtgcagaccagtactggaatgaggtggccgtcctagacgccatccccttggcggccacggagcatgacaccatgctggagatgtctgacatgcaggtgtggtctgcgggcctcacgccttctctggtcactgctgaggactcctctctggagtgtagcaaggctgaggactctgatgccacaggtcacgagtggaagttggagggggcactctcagaggaaccgcggggccccgagttgggctctctggaacttgtggaggacgacacagtggattcagatgccacaaatggccttatcgatttgcttgaacaggaggaaggtcagaggtcagaagagaagctgccaggttctaagaggcaggatgacgcgacaggtgcagggcaggactcagagaatgaagtgtctcttgtttcaggccatcagagggggcaagcccgaatcacacattcccccaccgtgagtcaggtgacggagaggagtcaggacagactgcaggactgggatgcagacggctcgattgtctcatacctgcaagatgctgcacaaggttcctggcaagaggaggtcacgcaaggtccacactcattccagggaacaagtaccatgactgaagggctagagcccggtggatctcaggagtacgagaaggtcctggtgtctgtaagtgagcacacgtggacagaacagcccgaggctgagagctcccaggccgacagggaccggaggcagcaaggccaagaagagcaggtgcaggaggccaagaacaccttcacccaagtggtgcaggggaatgagtttcagaatattccaggggagcaggtgacagaggagcaattcacggatgagcagggcaacattgtcaccaagaagatcattcgcaaggtggttcgacagatagacttgtccagcgccgatgccgcccaggagcacgaggaggtggagctgagagggagtggcctacagccggacctgatagagggcaggaagggggcgcagatagtgaagcgggccagcctgaaaagggggaaacagtgaccccgagccgctctccttggagtagcctctcgggaggatcacacctcgacacccaacccctgaaccccacacactctgccatgcacacaggaggagagctggacctgagggccaccgcagcggtgcacacattcctctgggctgacggcatgacctctgtaagggactcctgctagtcccctcttggcatgaatgactgactgtagacgcatgacctccaggcttcaatcctgcctcttgcaatgacagctgatctgtcggaaccaggacacaaaagcagcaagaagcggggagagagagggatagaaaacaagcgcaggagagcctgcgaacgcaaaagtgaatgagggctttttgtggctggggatgggttttggttttggggttttttttttaaattgttttgacttcgtacagggtactttttcccaacctcatctgtcagaaatccatgtgggcttcctggaaagaaaaaaaaaaaaaagaaaactaggcatgaaatcagtttaacaccttaatcttaagccatgtcctcatctgcccaccctccccaacccacatacctccattccacttgtgacaccccctcgactccctggtgacgctcctcccagatcgctctacatgacattcaggacacacacacacacacacacacaccactcgcctccactgaatctacacacagattttactgtgacttctgaagctgtatagactctgctgtggataaattggaattttttatgttgtctctctctctgccaatttcaatacgaatcatcttccaatggaaaatcattaccttgaagagtgcattcggggttccttgtgttagggacttaagaatctgaggcgaggacccccaggcttacctgtaggactcaaagggagccaggaccccatctgaaagggtctcctctctcagttgggggacaggccggtggctgacccaggattgcaccagcatgtccatagagaagaggttttctatgtcttcaagcactatatcatagtccgtgttcaaagtgtaaactgtacagtaatcagccttgtgtatatgaaaaacaataaatactatgcaaaccaatagaaacatttagcagtacgtacagagcctgacagcgcagctcctgaggacttctgcggctgcaggagaaggagctgtggcctgtctttcagtgaaagaggaaggaaaggagtagggctagtgaatgtatctgccaggtcttagaagtcaggaccacccagggtctcccagagtgaacttggtgctctaagtccaggcagcctgcaggctggggaccctgggtgcaggtgccaggctcgaggctgttccctgtcctgcctcagtgcctcccctctgcccagcccctgtggcctcttggagaggcgagccagggggctccccggaccgcatggccggtgagagtagagtcggaggcggagagcctggacgcccagaggccggggccaggctctgggtcaaggcaggaaggagacagacagctggcagttcctcgcctcggtgccatcagggaggagccttaagttccactagagcctccggcccagggaggccagaatcagcacaatcccggccccgccctcgcggcgggcgcccccagggccaggagagagagacagggctggctcctctcgcccctggagccgcggtgtggacggcccggccccgtccgccccgccgctctgcgggagtgtcctcgggacacacttaaaccttccaagtagcacagaagccccctccacgtcagaggccccctggccgcggggcctgtgagcggagaggggccctgcttcccacacaaatccgccccggtgcacccccggccaggcaggccccggggcggcctaggcgccttgtcggccgggggtggggctgcttttgcttcctttagaggggcgggcagggagaggaagctctagctccgggcctgagtttccccgaggctgcgtcggaggagctgcagggcgagcccggacggctgccgtctccgccagaggccaccccggcccggcctccagggcgcagaggcgcccccctccatcctcccccatcccgggggccacggcaggggggccgcacagcgcggctgggaccgattcggtgacggcccaaggaagctgggctcagggctcgcctctcccgcctcgatcctgcaccttcctctcccaggtcgctgctgcagccaacccagtagcccccttagcgcccccgcggaccccgcagctccagactccgctttggcacctctgctccggctggcatggctgcacgctccggctgctagtaggagccgttaggggaggagtttggggtctccacacgatgcctagagaatgctgcagtctgcacattagacgctttttagaagttttgaaattaccttgatttttttaattgttatgaaaatggatcttttcttgactctcccacatgctctgttatgggagagaatcccctaccctactctgatgtatagaccattctcccttcaccagccgaaccaatgtcaaaattaataaagaaatggactaatggcacaggg

SEQ ID NO: 107300 - DNA, 622 bp, Homo sapiens
  Payload ID: 1065
  Gene Symbol: ANK1
  Gene Name: ankyrin 1, erythrocytic
  Uniprot ID: P16157
  ENST ID: ENST00000348036
  CDS Start-End: 252-581
actcagggcagagcctggctgctgggcagaagggcacttgggccgggctgcttcagccgagagggccattcggtgtcctgcccacagagagagaaacagtgagagaccaagagagcaaaccagagagatagggagggggaatgcaaggggtccctgggggactcaggagtcccagtggagaatgagaggcaggccccccgtggtggccggggccctggctgccagaggaccgggctggtgaggaggcgaggatgtggactttcgtcacccagctgttggtcacgctggtgctgctgagcttcttcctggtcagctgtcagaacgtgatgcacattgtcagggggtccctgtgctttgtgctaaagcacatccaccaggagctggacaaggagctgggggagagcgagggcctcagtgacgacgaggagaccatctccaccagggtggtccggcggcgggtcttcctgaaggggaatgagtttcagaatattccaggggagcaggtgacagaggagcaattcacggatgagcagggcaacattgtcaccaagaaggatcacacctcgacacccaacccctgaaccccacacactctgccatgcacacaggaggagagctggac

SEQ ID NO: 107301 - DNA, 1185 bp, Homo sapiens
  Payload ID: 1065
  Gene Symbol: ANK1
  Gene Name: ankyrin 1, erythrocytic
  Uniprot ID: P16157
  ENST ID: ENST00000314214
  CDS Start-End: 252-719
actcagggcagagcctggctgctgggcagaagggcacttgggccgggctgcttcagccgagagggccattcggtgtcctgcccacagagagagaaacagtgagagaccaagagagcaaaccagagagatagggagggggaatgcaaggggtccctgggggactcaggagtcccagtggagaatgagaggcaggccccccgtggtggccggggccctggctgccagaggaccgggctggtgaggaggcgaggatgtggactttcgtcacccagctgttggtcacgctggtgctgctgagcttcttcctggtcagctgtcagaacgtgatgcacattgtcagggggtccctgtgctttgtgctaaagcacatccaccaggagctggacaaggagctgggggagagcgagggcctcagtgacgacgaggagaccatctccaccagggtggtccggcggcgggtcttcctgaaggggaatgagtttcagaatattccaggggagcaggtgacagaggagcaattcacggatgagcagggcaacattgtcaccaagaagatcattcgcaaggtggttcgacagatagacttgtccagcgccgatgccgcccaggagcacgaggaggtggagctgagagggagtggcctacagccggacctgatagagggcaggaagggggcgcagatagtgaagcgggccagcctgaaaagggggaaacagtgaccccgagccgctctccttggagtagcctctcgggaggatcacacctcgacacccaacccctgaaccccacacactctgccatgcacacaggaggagagctggacctgagggccaccgcagcggtgcacacattcctctgggctgacggcatgacctctgtaagggactcctgctagtcccctcttggcatgaatgactgactgtagacgcatgacctccaggcttcaatcctgcctcttgcaatgacagctgatctgtcggaaccaggacacaaaagcagcaagaagcggggagagagagggatagaaaacaagcgcaggagagcctgcgaacgcaaaagtgaatgagggctttttgtggctggggatgggttttggttttggggttttttttttaaattgttttgacttcgtacagggtactttttcccaacctcatctgtcagaaatccatgtgggcttcctgg

SEQ ID NO: 107302 - DNA, 525 bp, Homo sapiens
  Payload ID: 1065
  Gene Symbol: ANK1
  Gene Name: ankyrin 1, erythrocytic
  ENST ID: ENST00000335651
  CDS Start-End: 185-525
attcggtgtcctgcccacagagagagaaacagtgagagaccaagagagcaaaccagagagatagggagggggaatgcaaggggtccctgggggactcaggagtcccagtggagaatgagaggcaggccccccgtggtggccggggccctggctgccagaggaccgggctggtgaggaggcgaggatgtggactttcgtcacccagctgttggtcacgctggtgctgctgagcttcttcctggtcagctgtcagaacgtgatgcacattgtcagggggtccctgtgctttgtgctaaagcacatccaccaggagctggacaaggagctgggggagagcgagggcctcagtgacgacgaggagaccatctccaccagggtggtccggcggcgggtcttcctgaaggggaatgagtttcagaatattccaggggagcaggtgacagaggagcaattcacggatgagcagggcaacattgtcaccaagaaggtggagctgagagggagtggcctacagccggacctgat

SEQ ID NO: 107303 - DNA, 8237 bp, Homo sapiens
  Payload ID: 1065
  Gene Symbol: ANK1
  Gene Name: ankyrin 1, erythrocytic
  Uniprot ID: P16157
  ENST ID: ENST00000347528
  CDS Start-End: 85-5730
agaggctgcggtgagtccgccagccccagctgctcctcctcaagcccccaaggcccttcggcgggcccctgctgaaagaccggcatgccctattctgtgggcttccgcgaagccgatgctgctaccagctttctgagagcagcaagatcaggtaacttggacaaagctttggatcacctgcggaatggggtagatattaacacctgtaaccagaatgggttgaatggcttgcatctggcttctaaggaaggccatgtgaaaatggtggttgaacttctgcacaaagaaatcattctagaaacgacaaccaagaaggggaacacggccctgcacatcgctgctctagccgggcaggatgaggtggtccgggagcttgtcaactatggagccaacgtcaacgcccagtcacagaaaggttttacacccctgtacatggcagcacaagagaaccacttggaagtggttaagtttttactggaaaatggagctaaccagaatgtagccacagaagacggcttcacgcctctggcggtagccctgcagcagggccatgagaacgtcgtcgcgcacctcatcaactacggcaccaaggggaaggtgcgcctcccggccctgcacatcgcggcccgcaacgacgacacgcgcacggctgcggtgctgctgcagaacgaccccaacccggacgtgctttccaagacgggattcacgcccctgcacattgcggctcactacgagaacctcaacgtggcccagttgctcctcaacagaggagccagcgtcaatttcacaccacagaacggcatcacgccactgcacatcgcctcccgcaggggcaacgtgatcatggtgcggctgctgctggatcggggagcccagatagaaaccaagaccaaggacgaattgacacctctccactgtgcagctcgaaatgggcacgtgcgaatctcagagatcctgctggaccacggggcaccaatccaagccaaaaccaagaacggcctgtccccaattcacatggcggctcagggagaccacctcgactgtgtccggctcctgttgcaatacgacgcagagatagacgacatcaccctggaccacctgaccccactccacgtggctgcccactgtggacaccacagggtggctaaggtccttctggataaaggggccaaacccaactccagagccctgaatggctttacccccttacacatcgcctgcaaaaagaaccacgtccgtgtcatggagctgctgctgaagacgggagcctcgatcgacgcggtcaccgagtctggcctgacacctctccacgtggcctccttcatggggcaccttcccatcgtgaagaacctcctgcagcggggggcgtcgcccaacgtctccaacgtgaaagtggagaccccgctacacatggcagccagagccgggcacacggaagtggccaaatatttactccagaacaaagccaaagtcaatgccaaggccaaggatgaccagaccccacttcactgtgcagctcgcatcggccacacaaacatggtgaagctcctgctggaaaataacgccaaccccaacctggccaccaccgccgggcacacccccctgcacattgcagcccgtgagggccatgtggaaacagtcctggcccttctggaaaaggaagcatcccaggcctgcatgaccaagaaaggatttacccctctgcacgtggcggccaagtacgggaaggtgcgggtggcagagctgctgctggagcgggacgcacacccgaatgctgccggaaaaaatggcctgacccccctgcacgtggccgtccatcacaacaacctggacatcgtcaagctgctgcttccccggggcggctccccgcacagccctgcctggaatggctacacccctttgcacatcgctgccaagcagaaccaggtggaggtggcccgtagtctgctgcagtatgggggctcagcaaacgccgagtcggtgcaaggtgtgacgccccttcacctggccgcccaggagggccacgcagagatggtggctctgctgctctcgaaacaagccaatggcaacctggggaacaagagcggactcactcccctccatctggtagcacaagaaggccacgttccagtggcagatgtgctgatcaaacacggcgtcatggtggacgccaccacccggatgggctacactcccctccatgtggccagtcactatggaaacatcaagctggtgaagtttctgctgcagcaccaggcagatgtcaatgccaagaccaagctaggatacagccccctgcaccaggcagcccagcagggacacacagacatcgtgactctgcttctgaaaaacggtgcttccccaaacgaggtcagctcggatggaaccacacctctggccatagccaagcgcttgggctacatttctgtcaccgacgtgctcaaggtcgtcacggatgaaaccagtttcgtgttagtcagtgataagcatcgaatgagtttccctgagacagttgatgagatcctggatgtctcggaagatgaaggggaagaactcatcagcttcaaggctgagaggcgggattccagggatgttgatgaagagaaggagctgctggattttgtgccgaagctagaccaagtggtggaatctccagccatccccaggattccctgtgccatgcctgagacagtggtgatcaggtcagaagagcaggagcaggcatctaaagagtatgatgaggactccctcatccccagcagcccggccaccgagacctcagacaacatcagcccggtggccagcccggtgcatacagggtttctggtgagcttcatggttgacgcccggggtggttccatgagaggaagtcgccacaacggcctgcgagtggtgatcccgccacggacgtgcgcagcgcccacccgcatcacctgccgcctggtcaagccccagaagctcagcacgccgcccccactggccgaggaggagggcctggccagcaggatcatagcactggggcccacgggggcacagttcctgagccctgtaatcgtggagatcccgcactttgcctcccatggccgtggagaccgcgagctcgtggttctgaggagcgaaaacggctccgtgtggaaggagcacaggagccgctatggagagagctacctggatcagatcctcaacgggatggacgaagagctggggagcctggaggagctagagaagaagagggtgtgccgaatcatcaccaccgacttcccgctgtacttcgtgatcatgtcacggctctgccaggactacgacaccatcggtcccgaagggggctccctgaagagcaagctggtgcccctggtacaggcaacgttcccggagaatgccgtcaccaagagagtgaagctggctctgcaggcccagcctgtcccggatgagcttgtcactaagctcctgggcaaccaggccacattcagccccattgtcaccgtggagccccggcgccggaagttccaccgccccattgggcttcggatcccactacctccttcctggaccgacaacccgagggacagcggggagggagacaccaccagcctgcgcctgctttgcagcgtcattggaggaacagaccaagcccagtgggaagacataacaggaaccaccaaacttgtatatgccaacgagtgcgccaacttcaccaccaatgtctctgccaggttttggctgtcggactgtcctcggactgctgaggctgtgaactttgccaccctgctgtacaaagagctcactgcagtgccctacatggccaaattcgtcatctttgccaagatgaatgacccccgagaggggcgcctgcgctgctactgcatgacagatgataaagtggacaagaccctggagcagcatgagaacttcgtggaggtggcccggagcagggacatagaggtgttggaaggaatgtccctgtttgcagaactctctgggaacctggtgcctgtgaagaaagctgcccagcagcggagcttccacttccagtcatttcgggagaaccgtctggccatgcctgtaaaggtgagggacagcagtcgagagccgggagggtccctgtcgtttctgcgcaaggcgatgaagtacgaggacacccagcacattctctgccacctgaacatcaccatgcccccctgcgccaagggaagtggagccgaagataggagaaggaccccgacgcccctggccctgcgatacagcattctcagtgagtccacaccaggttctctcagtgggacagagcaggcagagatgaagatggctgttatctcagagcacctcggtctcagctgggcagagttggcccgggagctgcagttcagtgtggaagacatcaacaggatccgagtggaaaatcccaactccctgttggagcagagtgtggccttgctgaacctctgggtcatccgtgaaggccaaaacgcaaacatggagaatctgtacacagccctgcagagcattgaccgtggcgagatcgtgaacatgctggagggttccggccgacagagccgcaacttgaagccagacaggcggcacaccgaccgcgactactcgctgtcaccctcccagatgaatggttactcctcactgcaggacgagctgctgtcccctgcctccctgggctgtgcactttcctctccgctacgtgcagaccagtactggaatgaggtggccgtcctagacgccatccccttggcggccacggagcatgacaccatgctggagatgtctgacatgcaggtgtggtctgcgggcctcacgccttctctggtcactgctgaggactcctctctggagtgtagcaaggctgaggactctgatgccacaggtcacgagtggaagttggagggggcactctcagaggaaccgcggggccccgagttgggctctctggaacttgtggaggacgacacagtggattcagatgccacaaatggccttatcgatttgcttgaacaggaggaaggtcagaggtcagaagagaagctgccaggttctaagaggcaggatgacgcgacaggtgcagggcaggactcagagaatgaagtgtctcttgtttcaggccatcagagggggcaagcccgaatcacacattcccccaccgtgagtcaggtgacggagaggagtcaggacagactgcaggactgggatgcagacggctcgattgtctcatacctgcaagatgctgcacaaggttcctggcaagaggaggtcacgcaaggtccacactcattccagggaacaagtaccatgactgaagggctagagcccggtggatctcaggagtacgagaaggtcctggtgtctgtaagtgagcacacgtggacagaacagcccgaggctgagagctcccaggccgacagggaccggaggcagcaaggccaagaagagcaggtgcaggaggccaagaacaccttcacccaagtggtgcaggggaatgagtttcagaatattccaggggagcaggtgacagaggagcaattcacggatgagcagggcaacattgtcaccaagaagatcattcgcaaggtggttcgacagatagacttgtccagcgccgatgccgcccaggagcacgaggaggtgactgtagaggggcccctggaggatcccagtgagctggaggtcgatattgattactttatgaaacactccaaggatcacacctcgacacccaacccctgaaccccacacactctgccatgcacacaggaggagagctggacctgagggccaccgcagcggtgcacacattcctctgggctgacggcatgacctctgtaagggactcctgctagtcccctcttggcatgaatgactgactgtagacgcatgacctccaggcttcaatcctgcctcttgcaatgacagctgatctgtcggaaccaggacacaaaagcagcaagaagcggggagagagagggatagaaaacaagcgcaggagagcctgcgaacgcaaaagtgaatgagggctttttgtggctggggatgggttttggttttggggttttttttttaaattgttttgacttcgtacagggtactttttcccaacctcatctgtcagaaatccatgtgggcttcctggaaagaaaaaaaaaaaaaagaaaactaggcatgaaatcagtttaacaccttaatcttaagccatgtcctcatctgcccaccctccccaacccacatacctccattccacttgtgacaccccctcgactccctggtgacgctcctcccagatcgctctacatgacattcaggacacacacacacacacacacacaccactcgcctccactgaatctacacacagattttactgtgacttctgaagctgtatagactctgctgtggataaattggaattttttatgttgtctctctctctgccaatttcaatacgaatcatcttccaatggaaaatcattaccttgaagagtgcattcggggttccttgtgttagggacttaagaatctgaggcgaggacccccaggcttacctgtaggactcaaagggagccaggaccccatctgaaagggtctcctctctcagttgggggacaggccggtggctgacccaggattgcaccagcatgtccatagagaagaggttttctatgtcttcaagcactatatcatagtccgtgttcaaagtgtaaactgtacagtaatcagccttgtgtatatgaaaaacaataaatactatgcaaaccaatagaaacatttagcagtacgtacagagcctgacagcgcagctcctgaggacttctgcggctgcaggagaaggagctgtggcctgtctttcagtgaaagaggaaggaaaggagtagggctagtgaatgtatctgccaggtcttagaagtcaggaccacccagggtctcccagagtgaacttggtgctctaagtccaggcagcctgcaggctggggaccctgggtgcaggtgccaggctcgaggctgttccctgtcctgcctcagtgcctcccctctgcccagcccctgtggcctcttggagaggcgagccagggggctccccggaccgcatggccggtgagagtagagtcggaggcggagagcctggacgcccagaggccggggccaggctctgggtcaaggcaggaaggagacagacagctggcagttcctcgcctcggtgccatcagggaggagccttaagttccactagagcctccggcccagggaggccagaatcagcacaatcccggccccgccctcgcggcgggcgcccccagggccaggagagagagacagggctggctcctctcgcccctggagccgcggtgtggacggcccggccccgtccgccccgccgctctgcgggagtgtcctcgggacacacttaaaccttccaagtagcacagaagccccctccacgtcagaggccccctggccgcggggcctgtgagcggagaggggccctgcttcccacacaaatccgccccggtgcacccccggccaggcaggccccggggcggcctaggcgccttgtcggccgggggtggggctgcttttgcttcctttagaggggcgggcagggagaggaagctctagctccgggcctgagtttccccgaggctgcgtcggaggagctgcagggcgagcccggacggctgccgtctccgccagaggccaccccggcccggcctccagggcgcagaggcgcccccctccatcctcccccatcccgggggccacggcaggggggccgcacagcgcggctgggaccgattcggtgacggcccaaggaagctgggctcagggctcgcctctcccgcctcgatcctgcaccttcctctcccaggtcgctgctgcagccaacccagtagcccccttagcgcccccgcggaccccgcagctccagactccgctttggcacctctgctccggctggcatggctgcacgctccggctgctagtaggagccgttaggggaggagtttggggtctccacacgatgcctagagaatgctgcagtctgcacattagacgctttttagaagttttgaaattaccttgatttttttaattgttatgaaaatggatcttttcttgactctcccacatgctctgttatgggagagaatcccctaccctactctgatgtatagaccattctcccttcaccagccgaaccaatgtcaaaattaataaagaaatggactaatggcacaggg

SEQ ID NO: 107304 - DNA, 892 bp, Homo sapiens
  Payload ID: 1065
  Gene Symbol: ANK1
  Gene Name: ankyrin 1, erythrocytic
  ENST ID: ENST00000518061
  CDS Start-End: 1-533
acgaggacacccagcacattctctgccacctgaacatcaccatgcccccctgcgccaagggaagtggagccgaagataggagaaggaccccgacgcccctggccctgcgatacagcattctcagtgagtccacaccaggttctctcagtgggacagagcaggcagagatgaagatggctgttatctcagagcacctcggtctcagctgggcagagttggcccgggagctgcagttcagtgtggaagacatcaacaggatccgagtggaaaatcccaactccctgttggagcagagtgtggccttgctgaacctctgggtcatccgtgaaggccaaaacgcaaacatggagaatctgtacacagccctgcagagcattgaccgtggcgagatcgtgaacatgctggagggttccggccgacagagccgcaacttgaagccagacaggcggcacaccgaccgcgactactcgctgtcaccctcccagatgaatggaggaaggtcagaggtcagaagagaagctgccaggttctaagaggcaggatgacgcgacaggtgcagggcaggactcagagaatgaagtgtctcttgtttcaggccatcagagggggcaagcccgaatcacacattcccccaccgtgagtcaggtgacggagaggagtcaggacagactgcaggactgggatgcagacggctcgattgtctcatacctgcaagatgctgcacaaggttcctggcaagaggaggtcacgcaaggtccacactcattccagggaacaagtaccatgactgaagggctagagcccggtggatctcaggagtacgagaaggtcctggtgtctgtaagtgagcacacgtggacagaacagcccgaggctgagagctcccaggccg

SEQ ID NO: 107305 - DNA, 1060 bp, Homo sapiens
  Payload ID: 1065
  Gene Symbol: ANK1
  Gene Name: ankyrin 1, erythrocytic
  ENST ID: ENST00000522231
  CDS Start-End: 239-634
cctggctgctgggcagaagggcacttgggccgggctgcttcagccgagagggccattcggtgtcctgcccacagagagagaaacagtgagagaccaagagagcaaaccagagagatagggagggggaatgcaaggggtccctgggggactcaggagtcccagtggagaatgagaggcaggccccccgtggtggccggggccctggctgccagaggaccgggctggtgaggaggcgaggatgtggactttcgtcacccagctgttggtcacgctggtgctgctgagcttcttcctggtcagctgtcagaacgtgatgcacattgtcagggggtccctgtgctttgtgctaaagcacatccaccaggagctggacaaggagctgggggagagcgagggcctcagtgacgacgaggagaccatctccaccagggtggtccggcggcgggtcttcctgaaggggaatgagtttcagaatattccaggggagcaggtgacagaggagcaattcacggatgagcagggcaacattgtcaccaagaagatcattcgcaaggtggttcgacagatagacttgtccagcgccgatgccgcccaggagcacgaggaggatcacacctcgacacccaacccctgaaccccacacactctgccatgcacacaggaggagagctggacctgagggccaccgcagcggtgcacacattcctctgggctgacggcatgacctctgtaagggactcctgctagtcccctcttggcatgaatgactgactgtagacgcatgacctccaggcttcaatcctgcctcttgcaatgacagctgatctgtcggaaccaggacacaaaagcagcaagaagcggggagagagagggatagaaaacaagcgcaggagagcctgcgaacgcaaaagtgaatgagggctttttgtggctggggatgggttttggttttggggttttttttttaaattgttttgacttcgtacagggtactttttcccaacctcatctgtcagaaatccatgtgggcttcctggaaagaaaaaaaaaaaaaagaaaa

SEQ ID NO: 107306 - DNA, 3587 bp, Homo sapiens
  Payload ID: 1065
  Gene Symbol: ANK1
  Gene Name: ankyrin 1, erythrocytic
  ENST ID: ENST00000520299
  CDS Start-End: 1-3121
gatcaaacacggcgtcatggtggacgccaccacccggatgggctacactcccctccatgtggccagtcactatggaaacatcaagctggtgaagtttctgctgcagcaccaggcagatgtcaatgccaagaccaagctaggatacagccccctgcaccaggcagcccagcagggacacacagacatcgtgactctgcttctgaaaaacggtgcttccccaaacgaggtcagctcggatggaaccacacctctggccatagccaagcgcttgggctacatttctgtcaccgacgtgctcaaggtcgtcacggatgaaaccagtttcgtgttagtcagtgataagcatcgaatgagtttccctgagacagttgatgagatcctggatgtctcggaagatgaaggaactgctcatataactataatgggggaagaactcatcagcttcaaggctgagaggcgggattccagggatgttgatgaagagaaggagctgctggattttgtgccgaagctagaccaagtggtggaatctccagccatccccaggattccctgtgccatgcctgagacagtggtgatcaggtcagaagagcaggagcaggcatctaaagagtatgatgaggactccctcatccccagcagcccggccaccgagacctcagacaacatcagcccggtggccagcccggtgcatacagggtttctggtgagcttcatggttgacgcccggggtggttccatgagaggaagtcgccacaacggcctgcgagtggtgatcccgccacggacgtgcgcagcgcccacccgcatcacctgccgcctggtcaagccccagaagctcagcacgccgcccccactggccgaggaggagggcctggccagcaggatcatagcactggggcccacgggggcacagttcctgagccctgtaatcgtggagatcccgcactttgcctcccatggccgtggagaccgcgagctcgtggttctgaggagcgaaaacggctccgtgtggaaggagcacaggagccgctatggagagagctacctggatcagatcctcaacgggatggacgaagagctggggagcctggaggagctagagaagaagagggtgtgccgaatcatcaccaccgacttcccgctgtacttcgtgatcatgtcacggctctgccaggactacgacaccatcggtcccgaagggggctccctgaagagcaagctggtgcccctggtacaggcaacgttcccggagaatgccgtcaccaagagagtgaagctggctctgcaggcccagcctgtcccggatgagcttgtcactaagctcctgggcaaccaggccacattcagccccattgtcaccgtggagccccggcgccggaagttccaccgccccattgggcttcggatcccactacctccttcctggaccgacaacccgagggacagcggggagggagacaccaccagcctgcgcctgctttgcagcgtcattggaggaacagaccaagcccagtgggaagacataacaggaaccaccaaacttgtatatgccaacgagtgcgccaacttcaccaccaatgtctctgccaggttttggctgtcggactgtcctcggactgctgaggctgtgaactttgccaccctgctgtacaaagagctcactgcagtgccctacatggccaaattcgtcatctttgccaagatgaatgacccccgagaggggcgcctgcgctgctactgcatgacagatgataaagtggacaagaccctggagcagcatgagaacttcgtggaggtggcccggagcagggacatagaggtgttggaaggaatgtccctgtttgcagaactctctgggaacctggtgcctgtgaagaaagctgcccagcagcggagcttccacttccagtcatttcgggagaaccgtctggccatgcctgtaaaggtgagggacagcagtcgagagccgggagggtccctgtcgtttctgcgcaaggcgatgaagtacgaggacacccagcacattctctgccacctgaacatcaccatgcccccctgcgccaagggaagtggagccgaagataggagaaggaccccgacgcccctggccctgcgatacagcattctcagtgagtccacaccaggttctctcagtgggacagagcaggcagagatgaagatggctgttatctcagagcacctcggtctcagctgggcagagttggcccgggagctgcagttcagtgtggaagacatcaacaggatccgagtggaaaatcccaactccctgttggagcagagtgtggccttgctgaacctctgggtcatccgtgaaggccaaaacgcaaacatggagaatctgtacacagccctgcagagcattgaccgtggcgagatcgtgaacatgctggagggttccggccgacagagccgcaacttgaagccagacaggcggcacaccgaccgcgactactcgctgtcaccctcccagatgaatggccatcagagggggcaagcccgaatcacacattcccccaccgtgagtcaggtgacggagaggagtcaggacagactgcaggactgggatgcagacggctcgattgtctcatacctgcaagatgctgcacaaggttcctggcaagaggaggtcacgcaaggtccacactcattccagggaacaagtaccatgactgaagggctagagcccggtggatctcaggagtacgagaaggtcctggtgtctgtaagtgagcacacgtggacagaacagcccgaggctgagagctcccaggccgacagggaccggaggcagcaaggccaagaagagcaggtgcaggaggccaagaacaccttcacccaagtggtgcaggggaatgagtttcagaatattccaggggagcaggtgacagaggagcaattcacggatgagcagggcaacattgtcaccaagaagatcattcgcaaggtggttcgacagatagacttgtccagcgccgatgccgcccaggagcacgaggaggtggagctgagagggagtggcctacagccggacctgatagagggcaggaagggggcgcagatagtgaagcgggccagcctgaaaagggggaaacagtgaccccgagccgctctccttggagtagcctctcgggaggatcacacctcgacacccaacccctgaaccccacacactctgccatgcacacaggaggagagctggacctgagggccaccgcagcggtgcacacattcctctgggctgacggcatgacctctgtaagggactcctgctagtcccctcttggcatgaatgactgactgtagacgcatgacctccaggcttcaatcctgcctcttgcaatgacagctgatctgtcggaaccaggacacaaaagcagcaagaagcggggagagagagggatagaaaacaagcgcaggagagcctgcgaacgcaaaagtgaatgagggctttttgtggctggggatgggttttggttttggggttttttttttaaattgttttgacttcgtacagggtactttttcccaacctcatctgtcagaaatccatgtgggcttcctgg

SEQ ID NO: 107307 - DNA, 1160 bp, Homo sapiens
  Payload ID: 1065
  Gene Symbol: ANK1
  Gene Name: ankyrin 1, erythrocytic
  Uniprot ID: P16157
  ENST ID: ENST00000522543
  CDS Start-End: 264-734
gtcacccgggccactcagggcagagcctggctgctgggcagaagggcacttgggccgggctgcttcagccgagagggccattcggtgtcctgcccacagagagagaaacagtgagagaccaagagagcaaaccagagagatagggagggggaatgcaaggggtccctgggggactcaggagtcccagtggagaatgagaggcaggccccccgtggtggccggggccctggctgccagaggaccgggctggtgaggaggcgaggatgtggactttcgtcacccagctgttggtcacgctggtgctgctgagcttcttcctggtcagctgtcagaacgtgatgcacattgtcagggggtccctgtgctttgtgctaaagcacatccaccaggagctggacaaggagctgggggagagcgagggcctcagtgacgacgaggagaccatctccaccagggtggtccggcggcgggtcttcctgaaggggaatgagtttcagaatattccaggggagcaggtgacagaggagcaattcacggatgagcagggcaacattgtcaccaagaagatcattcgcaaggtggttcgacagatagacttgtccagcgccgatgccgcccaggagcacgaggaggtgactgtagaggggcccctggaggatcccagtgagctggaggtcgatattgattactttatgaaacactccaaggatcacacctcgacacccaacccctgaaccccacacactctgccatgcacacaggaggagagctggacctgagggccaccgcagcggtgcacacattcctctgggctgacggcatgacctctgtaagggactcctgctagtcccctcttggcatgaatgactgactgtagacgcatgacctccaggcttcaatcctgcctcttgcaatgacagctgatctgtcggaaccaggacacaaaagcagcaagaagcggggagagagagggatagaaaacaagcgcaggagagcctgcgaacgcaaaagtgaatgagggctttttgtggctggggatgggttttggttttggggttttttttttaaattgttttgacttcgtacagggtactttttcccaacctcatctgtcagaaatccatgtgggcttcctggaaagaaaaaaaaaaaaaagaaaa

SEQ ID NO: 107308 - DNA, 11775 bp, Homo sapiens
  Payload ID: 1066
  Gene Symbol: ANK2
  Gene Name: ankyrin 2, neuronal
  ENST ID: ENST00000264366
  CDS Start-End: 1-11775
atgatgaacgaagatgcagctcagaaaagcgacagtggagagaagttcaacggcagtagtcagaggagaaaaagacccaagaagtctgacagcaatgcaagcttcctccgtgctgccagagcaggcaacctggacaaagttgtggaatatctgaaggggggcatagacatcaatacctgcaatcagaatggactcaacgctctccatctggctgccaaggaaggccacgtggggctggtgcaggagctgctgggaagagggtcctctgtggattctgccactaagaagggaaataccgctcttcacattgcatctttggctggacaagcagaagttgtcaaagttcttgttaaggaaggagccaatattaatgcacagtctcagaatggctttactcctttatacatggctgcccaagagaatcacattgatgttgtaaaatatttgctggaaaatggagctaatcagagcactgctacagaggatggctttactcctctagctgtggcactccagcaaggacacaaccaggcggtggccatcctcttggagaatgacaccaaagggaaagtgaggctgccagctctgcatattgccgctaggaaagacgacaccaaatctgccgcacttctgcttcagaatgaccacaatgctgacgtacaatccaagatgatggtgaataggacaactgagagtggttttacccctttgcacatagctgcacattacggaaatgtcaacgtggcaactcttcttctaaaccggggagctgctgtggacttcacagccaggaatggaatcactcctctgcatgtggcttccaaaagaggaaatacaaacatggtgaagctcttactggatcgaggcggtcagatcgatgccaaaactagggatgggttgacaccacttcactgtgctgcacgaagtgggcatgaccaagtggtggaacttctgttggaacggggtgcccccttgctggcaaggactaagaatgggctgtctccactacacatggctgcccagggagaccacgtggaatgtgtgaagcacctgttacagcacaaggcacctgttgatgatgtcaccctagactacctgacagccctccacgttgctgcgcactgtggccactaccgtgtaaccaaactccttttagacaagagagccaatccgaacgccagagccctgaatggttttactccactgcacattgcctgcaagaaaaaccgcatcaaagtcatggaactgctggtgaaatatggggcttcaatccaagctataacagagtctggcctcacaccaatacatgtggctgccttcatgggccacttgaacattgtcctccttctgctgcagaacggagcctctccagatgtcactaacattcgtggtgagacggcactacacatggcagcccgagccgggcaggtggaagtggtccgatgcctcctgagaaatggtgcccttgttgatgccagagccagggaggaacagacacctttacatattgcctcccgcctgggtaagacagaaattgtccagctgcttctacaacatatggctcatccagatgcggccactacaaatgggtacacaccactgcacatctctgcccgggagggccaggtggatgtggcatcagtcctattggaagcaggagcagcccactccttagctaccaagaagggttttactcccctgcatgtagcagccaagtatggaagcctggatgtggcaaaacttctcttgcaacgccgtgctgccgcagattctgcagggaagaacggccttaccccgctccatgttgctgctcattatgacaaccagaaggtggcgctgctgttactggagaagggtgcttcccctcatgccactgccaagaatggctatactccgttacatattgctgccaagaagaatcaaatgcagatagcttccacactcctgaactatggagcagagacaaacattgtgacaaagcaaggagtaactccactccatctggcctcgcaggaggggcacacagatatggttaccttgcttctggataagggagccaatatccacatgtcaactaagagtggactcacatccttacaccttgcagcccaggaagataaagtgaatgttgctgatattctcaccaagcatggagctgatcaggatgctcatacaaagcttggttacacacctttaattgtggcctgtcactatggaaatgtgaaaatggtcaactttcttctgaagcagggagcaaatgttaacgcaaaaaccaagaacggctacacgcctttgcaccaggccgctcagcagggtcacacgcacatcatcaacgtcctgctccagcatggggccaagcccaacgccaccactgcgaatggcaacactgccttggcgattgctaagcgtctgggctacatctccgtggtcgacaccctgaaggttgtgactgaggaggtcaccaccaccaccacaactattacagaaaaacacaaactaaatgtacctgagacgatgactgaggttcttgatgtttctgatgaagagggtgatgacacaatgactggtgatgggggagaataccttaggcctgaggacctaaaagaactgggtgatgactcactacccagcagtcagttcctggatggtatgaattacctgcgatacagcttggagggaggacgatctgacagccttcgatccttcagttccgacaggtctcacactctgagccatgcctcctacctgagggacagtgccgtgatggatgactcagttgtgattcccagtcaccaggtgtcaactctagccaaggaggcagaaaggaattcttatcgcctaagctggggcactgagaacttagacaacgtggctctttcttctagtcctattcattcaggtttcctggttagttttatggtggatgcccgaggtggtgctatgcgaggatgcagacacaatgggctccgaatcattattccacctcggaaatgtactgctccaacgcgagtcacctgccgactggtcaagcgccacagactggcaacaatgcctccaatggtggaaggagaaggcctggccagtcgcctgatcgaagttggaccttctggtgctcagttccttgggcctgtgatcgtggagatccctcactttgcggcccttcgaggaaaggaaagggaactggtggtcctgcgcagtgagaatggggacagctggaaagagcatttctgtgactacactgaagatgaattgaatgaaattcttaacggcatggatgaagtactggatagcccagaagacctagaaaagaaacgaatctgccgcatcatcacccgagacttcccacagtactttgcagtggtgtctcgtatcaaacaggacagcaatctgattggcccagaaggaggtgtactgagcagcacagtggtgccccaggtgcaggccgtcttcccagagggggcactcaccaagcggatccgcgtaggcctgcaggctcaacctatgcacagtgagctggttaagaagatcctaggcaacaaagctaccttcagccctatagtcactttggaacctagaagaagaaaattccacaaaccaattaccatgaccattcctgtccccaaagcttcaagtgatgtcatgttgaatggttttgggggagatgcaccaaccttaagattactatgcagcataacaggtggaaccacccctgcccagtgggaagatattacaggaactacgccattaacatttgtcaatgaatgtgtttcctttacaacaaacgtgtctgccaggttctggctgatagattgtcgacagatccaggaatccgttacttttgcatcacaagtatacagagaaattatctgcgtaccttatatggccaaatttgtagtgtttgccaaatcacatgaccccattgaagccaggttgaggtgtttctgcatgactgatgataaagtggataagacccttgaacaacaagaaaattttgctgaggtggccagaagcagggatgtggaggtgttagaaggaaaacccatctacgttgattgtttcggcaacttggtaccattaactaaaagtggccagcatcatatattcagtttttttgccttcaaagaaaatagacttcctctatttgtcaaggtacgcgatacgactcaggaaccttgcggacgactatcatttatgaaggagccaaaatccacgagaggcctggtgcatcaagctatttgcaacttaaacatcactttgccgatttatacaaaggaatcagagtcagatcaagaacaggaggaagagatcgatatgacatcagaaaaaaatgatgagacagaatctacagaaacatctgtcctgaaaagtcacctggttaatgaagttcctgtcctagcaagtccggacttgctctctgaagtttctgagatgaaacaagatttgatcaaaatgaccgccatcttgaccacagatgtgtctgataaggcaggttctattaaagtgaaggagctggtgaaggctgctgaggaagagccaggagagccttttgaaatcgttgaaagagttaaagaggacttagagaaagtgaatgaaatcctgagaagtggaacctgcacaagagatgaaagcagtgtgcagagctctcggtctgagagaggattagttgaagaggaatgggttattgtcagtgatgaggaaatagaagaggctaggcaaaaagcacctttagaaatcactgaatatccatgtgtagaagttagaatagataaagagatcaaaggaaaagtagagaaagactcaactgggctagtgaactaccttactgatgatctgaatacctgtgtgcctcttcccaaagagcagctgcagacagttcaagataaggcagggaagaaatgtgaggctctggctgttggcaggagctctgaaaaggaagggaaagacatacccccagatgagacacagagtacacagaaacagcacaaaccaagcttgggaataaagaagccagtaagaaggaaattaaaagaaaagcagaaacaaaaagaggaaggtttacaagctagtgcagagaaagctgaacttaaaaaaggtagttcagaagagtcattaggtgaagacccaggtttagcccctgaaccccttcccactgtcaaggccacatctcctttgatagaagaaactcccattggttccataaaggacaaagtaaaggcccttcagaagcgagtggaagatgaacagaaaggtcgaagcaagttgcccatcagagtcaaaggcaaggaggacgtgccaaaaaagaccacccacaggccacatccagctgcgtcaccctctctgaagtcagagagacatgcgccagggtctccctcccctaaaacagaaagacactctactctttcctcttccgcaaaaactgaaaggcaccctccagtatcaccatcaagtaaaactgagaaacactcacctgtgtcaccctctgcaaaaacggaaagacattcacctgcgtcatcatcgagtaaaactgagaaacactcacctgtatcaccctcgacaaaaactgaaaggcactctcctgtgtcatctacaaaaacagaaagacacccacctgtttcgccttcaggcaaaacagacaaacgtccacctgtatcgccctccgggaggacagaaaaacacccgccagtatcgcctgggagaacagaaaaacgcttgcctgtttcaccctccggaagaacggacaagcaccaacctgtatcaacagctgggaaaactgagaagcacctgcctgtgtcaccttctggcaaaacagaaaagcaaccacctgtatcccccacttcaaaaacagagaggattgaggaaaccatgtctgttcgggagctgatgaaggctttccagtcaggtcaggacccttctaaacataaaactggactctttgagcacaaatcagcaaaacaaaagcagccacaagagaaaggtaaagttcgggtagaaaaagaaaaggggccgatactaacccagagagaagctcagaaaacagagaatcagacaatcaaacgaggccagagactcccggtaacgggcacagcagaatccaaaagaggagttcgtgtttcctccataggagttaagaaagaagatgcagctggaggaaaggagaaagttctcagccacaaaatacctgaacctgttcagtcagtgcctgaagaagaaagccacagagagagcgaagtgcccaaagaaaagatggctgatgagcagggagacatggatctacagatcagcccagataggaaaacctccactgacttctctgaggtcattaagcaagagttggaagacaatgacaaataccaacaattccgcctgagtgaggagacagaaaaggcacagcttcacttagaccaagtactcactagtcctttcaacacaacatttccactcgactacatgaaagatgagttccttccagctctgtctttacaaagcggtgctttagatggcagttctgaaagcctaaagaatgagggggtagccggctctccgtgtggcagcctgatggaggggacccctcagattagttcagaagaaagctataagcatgaaggcctagcagagacccctgagacgagcccagaaagcctttctttctcaccaaagaaaagtgaggagcaaactggggaaacaaaggaaagcaccaagacagaaaccaccacagaaattcgttcagaaaaagagcatcccacgaccaaagacattactggtggctctgaagagcgaggtgccacagtcactgaggactcagagacctctactgagagttttcagaaagaggccactctaggctctcccaaagacacaagccctaaaagacaagatgattgcacaggcagctgtagtgtagcattagctaaagagacacctacaggactgactgaggaggcagcctgtgatgaaggtcaacgtacctttggtagttcagcccacaagacacaaactgatagtgaggttcaagaatccacagccacctcagacgagacaaaggccttgccgctgcctgaggcttctgtaaagacagatacaggaactgaatcaaaacctcagggagtcattagaagtccccaagggttagaacttgcactccctagccgagatagcgaagtcctcagcgctgtggctgatgactcattagcagtgagccacaaagactctctggaagccagccctgtgctagaagataactcttcacacaaaacccctgattctctggagccaagtcctctgaaagaatccccttgccgtgactctctggaaagcagccctgttgaaccaaagatgaaggctggaatttttccaagtcactttcctcttcctgcagctgttgccaaaacagaactcttgacggaagtggcctctgtgcggtcccggctactccgagaccctgatggcagtgctgaggatgacagtcttgagcagacatcgctcatggagagctcagggaagagccccctttctcctgacacccccagctctgaagaagtcagctatgaggttacacccaaaaccacagatgtaagtacaccaaaaccagctgtgattcatgaatgtgcagaggaggatgattcagaaaacggggagaaaaagaggttcacacctgaagaggagatgtttaaaatggtaaccaaaatcaaaatgtttgatgaacttgaacaagaagcaaagcagaaaagggactacaaaaaagaacccaaacaagaagaatcttcttcatcttctgacccagatgctgactgttcagtagatgtggatgaaccaaaacatacaggcagtggggaggatgaaagtggtgtccctgtgttagtaacttcggagagcaggaaggtgtcttcctcctcagaaagtgaacctgagttggcacagcttaaaaaaggtgctgactcaggccttttaccagaaccagtgattcgagtacaacctccttctccacttccatcaagcatggactccaattccagtccagaagaagtacaattccagcctgtcgtttccaaacaatatactttcaagatgaatgaagatactcaggaagagccaggcaaatcagaagaagaaaaagattctgaatcccatttagctgaagaccgtcatgctgtttccactgaggctgaagacaggtcttatgataagctaaacagagacactgatcagccaaaaatctgtgatggccatggatgtgaggccatgagtcctagcagctcagctgctcctgtctcttcaggtctacagagtccgactggtgatgatgttgatgaacagccagtcatctataaagaatcattagctctccaaggcactcatgaaaaagacacagagggagaagagcttgatgtttctagagcagaatctccacaagcagattgccccagtgaaagcttttcatcttcatcctctttgcctcattgtttggtatctgaaggaaaagaattagatgaagacatatctgccacatcttctattcaaaaaacagaggtcacaaaaactgatgaaacatttgagaacttaccaaaggactgcccctctcaagactcatccattactactcaaacagatagattttccatggatgttcccgtgtctgacctagctgagaatgatgaaatctatgatccacaaatcactagcccttatgaaaatgtcccttcccaatcttttttctctagtgaagaaagcaaaacccaaacagatgcaaatcacaccacaagttttcactcttctgaagtgtattctgttaccatcacatcccctgttgaagacgttgtagtggcaagctcctctagtggaactgttttaagcaaagaatctaattttgagggccaggacataaaaatggaatcccaacaggaaagtaccttgtgggaaatgcaatcagacagtgtctcttcatctttcgagcctactatgtccgctacaacaacagttgttggtgaacaaataagcaaagtcatcatcacaaaaactgatgtggattctgattcttggagtgaaattcgggaagacgatgaagcctttgaggctcgtgtgaaagaggaagaacaaaagatatttggtttgatggtagacagacaatcacagggtaccacccctgacaccactcctgctaggaccccaactgaagaggggaccccaacaagtgagcaaaacccatttctgtttcaggaaggaaaattgtttgaaatgacccgaagtggtgccattgatatgaccaaaaggtcctatgcagatgaaagttttcactttttccaaattggtcaagaatccagggaagagactctctctgaagatgtgaaagaaggggctactggggctgatcccctaccgctggagacatcagctgaatcactagcactttcagaatcaaaagaaacagtggatgatgaggcagacttacttccagatgacgtgagtgaggaagtagaggaaatacctgcttcggatgctcaacttaactcccaaatggggatttcagcctccactgaaacacctacaaaagaagctgttagtgtagggaccaaggacctccccaccgtgcaaacgggtgatatacctcctctctctggtgtaaagcagatatcctgccccgactcttctgaaccagctgtacaagtccagttagatttttccacactcaccaggtctgtttattcagataggggtgatgattctcccgattcttccccagaagaacagaaatcagtaatcgagattcctactgcacccatggagaatgtgccttttactgaaagcaaatccaaaattcctgtaaggactatgcccacttccaccccagcacctccatctgcagagtatgagagttcagtttctgaagattttctatccagtgtagatgaggaaaataaggcggatgaagcaaaaccaaagtccaaactccctgtcaaagtacccctccaaagagttgaacagcagctctcagatctagacacctctgtccagaagacagtggctcctcagggacaggacatggcaagcatcgcaccagataatagaagcaaatctgaatctgatgctagttctttggattcaaagaccaaatgcccagtaaaaacccgaagttacactgagacagaaacagagagcagagagagggccgaggaacttgagttagaatcagaagaaggggccacaagaccaaagatacttacatcccgattgccagttaagagcagaagcactacatcttcctgcagggggggcacgagccccacaaaagaaagtaaggagcatttctttgacctttacagaaattccatagaattctttgaggagattagtgatgaggcttccaaattagtggataggctgacacagtcagagagggagcaggaaatagtttcagacgatgaaagtagtagtgccctggaagtatcagtaattgaaaatctgccacctgttgagaccgagcactcagttcctgaggacatctttgacacaaggcccatttgggatgagtctattgagactctgattgaacgcatccctgatgaaaatggccatgaccatgctgaagatccacaggatgagcaggaacggatcgaggaaaggctggcttatattgctgatcaccttggcttcagctggacagaattagcaagagaactggatttcactgaggagcaaattcatcaaattcgaattgaaaatcccaactctcttcaagaccagagtcatgcactgttgaagtactggctagagagggatgggaaacatgctacagataccaacctcgttgaatgtctcaccaagatcaaccgaatggatattgttcatctcatggagaccaacacagaacctctccaggagcgcatcagtcatagttatgcagaaattgaacagaccattacactggatcatagtgaagggttctcggtacttcaagaggagttatgcactgcacagcacaagcagaaagaggagcaagctgtttctaaagaaagtgagacctgcgatcaccctcctatcgtctcagaggaagacatttctgttggttattccacttttcaggatggcgtccccaaaactgagggggacagctcagcaacagcactctttccccaaactcacaaggagcaagttcaacaggatttctcagggaaaatgcaagacctgcctgaagagtcatctctggaatatcagcaggaatattttgtgacaactccaggaacagaaacatcagagactcagaaggctatgatagtacccagctctcccagcaagacacctgaggaagttagcacccctgcagaggaggagaagctgtacctccagaccccaacatccagcgagcggggaggctctcccatcatacaagaacccgaagagccctcagagcacagagaggagagctctccgcggaaaaccagcctcgtaatagtggagtctgccgataaccagcctgagacctgtgaaagactcgatgaagatgcagcttttgaaaagggagacgatatgcctgaaatacccccagaaacagtcacagaagaagaatacattgatgagcatggacacaccgtggtaaagaaggttactaggaaaatcattaggcggtatgtatcctctgaaggcacagagaaagaagagattatggtgcagggaatgccacaggaacctgtcaacatcgaggaaggggatggctattccaaagttataaagcgtgttgtattgaagagtgacaccgagcagtcagaggacaacaatgagtaa

SEQ ID NO: 107309 - DNA, 14196 bp, Homo sapiens
  Payload ID: 1066
  Gene Symbol: ANK2
  Gene Name: ankyrin 2, neuronal
  Uniprot ID: Q01484
  ENST ID: ENST00000357077
  CDS Start-End: 54-11927
gtacaggcggcacggtttgatggcagagatattttctttccaaactgttcaaaatgatgaacgaagatgcagctcagaaaagcgacagtggagagaagttcaacggcagtagtcagaggagaaaaagacccaagaagtctgacagcaatgcaagcttcctccgtgctgccagagcaggcaacctggacaaagttgtggaatatctgaaggggggcatagacatcaatacctgcaatcagaatggactcaacgctctccatctggctgccaaggaaggccacgtggggctggtgcaggagctgctgggaagagggtcctctgtggattctgccactaagaagggaaataccgctcttcacattgcatctttggctggacaagcagaagttgtcaaagttcttgttaaggaaggagccaatattaatgcacagtctcagaatggctttactcctttatacatggctgcccaagagaatcacattgatgttgtaaaatatttgctggaaaatggagctaatcagagcactgctacagaggatggctttactcctctagctgtggcactccagcaaggacacaaccaggcggtggccatcctcttggagaatgacaccaaagggaaagtgaggctgccagctctgcatattgccgctaggaaagacgacaccaaatctgccgcacttctgcttcagaatgaccacaatgctgacgtacaatccaagatgatggtgaataggacaactgagagtggttttacccctttgcacatagctgcacattacggaaatgtcaacgtggcaactcttcttctaaaccggggagctgctgtggacttcacagccaggaatggaatcactcctctgcatgtggcttccaaaagaggaaatacaaacatggtgaagctcttactggatcgaggcggtcagatcgatgccaaaactagggatgggttgacaccacttcactgtgctgcacgaagtgggcatgaccaagtggtggaacttctgttggaacggggtgcccccttgctggcaaggactaagaatgggctgtctccactacacatggctgcccagggagaccacgtggaatgtgtgaagcacctgttacagcacaaggcacctgttgatgatgtcaccctagactacctgacagccctccacgttgctgcgcactgtggccactaccgtgtaaccaaactccttttagacaagagagccaatccgaacgccagagccctgaatggttttactccactgcacattgcctgcaagaaaaaccgcatcaaagtcatggaactgctggtgaaatatggggcttcaatccaagctataacagagtctggcctcacaccaatacatgtggctgccttcatgggccacttgaacattgtcctccttctgctgcagaacggagcctctccagatgtcactaacattcgtggtgagacggcactacacatggcagcccgagccgggcaggtggaagtggtccgatgcctcctgagaaatggtgcccttgttgatgccagagccagggaggaacagacacctttacatattgcctcccgcctgggtaagacagaaattgtccagctgcttctacaacatatggctcatccagatgcggccactacaaatgggtacacaccactgcacatctctgcccgggagggccaggtggatgtggcatcagtcctattggaagcaggagcagcccactccttagctaccaagaagggttttactcccctgcatgtagcagccaagtatggaagcctggatgtggcaaaacttctcttgcaacgccgtgctgccgcagattctgcagggaagaacggccttaccccgctccatgttgctgctcattatgacaaccagaaggtggcgctgctgttactggagaagggtgcttcccctcatgccactgccaagaatggctatactccgttacatattgctgccaagaagaatcaaatgcagatagcttccacactcctgaactatggagcagagacaaacattgtgacaaagcaaggagtaactccactccatctggcctcgcaggaggggcacacagatatggttaccttgcttctggataagggagccaatatccacatgtcaactaagagtggactcacatccttacaccttgcagcccaggaagataaagtgaatgttgctgatattctcaccaagcatggagctgatcaggatgctcatacaaagcttggttacacacctttaattgtggcctgtcactatggaaatgtgaaaatggtcaactttcttctgaagcagggagcaaatgttaacgcaaaaaccaagaacggctacacgcctttgcaccaggccgctcagcagggtcacacgcacatcatcaacgtcctgctccagcatggggccaagcccaacgccaccactgcgaatggcaacactgccttggcgattgctaagcgtctgggctacatctccgtggtcgacaccctgaaggttgtgactgaggaggtcaccaccaccaccacaactattacagaaaaacacaaactaaatgtacctgagacgatgactgaggttcttgatgtttctgatgaagagggtgatgacacaatgactggtgatgggggagaataccttaggcctgaggacctaaaagaactgggtgatgactcactacccagcagtcagttcctggatggtatgaattacctgcgatacagcttggagggaggacgatctgacagccttcgatccttcagttccgacaggtctcacactctgagccatgcctcctacctgagggacagtgccgtgatggatgactcagttgtgattcccagtcaccaggtgtcaactctagccaaggaggcagaaaggaattcttatcgcctaagctggggcactgagaacttagacaacgtggctctttcttctagtcctattcattcaggtttcctggttagttttatggtggatgcccgaggtggtgctatgcgaggatgcagacacaatgggctccgaatcattattccacctcggaaatgtactgctccaacgcgagtcacctgccgactggtcaagcgccacagactggcaacaatgcctccaatggtggaaggagaaggcctggccagtcgcctgatcgaagttggaccttctggtgctcagttccttggtaaacttcacctgccaacggctcctcccccacttaatgagggagaaagtttggtcagccgcattcttcagctggggcctcctggaaccaaattccttgggcctgtgatcgtggagatccctcactttgcggcccttcgaggaaaggaaagggaactggtggtcctgcgcagtgagaatggggacagctggaaagagcatttctgtgactacactgaagatgaattgaatgaaattcttaacggcatggatgaagtactggatagcccagaagacctagaaaagaaacgaatctgccgcatcatcacccgagacttcccacagtactttgcagtggtgtctcgtatcaaacaggacagcaatctgattggcccagaaggaggtgtactgagcagcacagtggtgccccaggtgcaggccgtcttcccagagggggcactcaccaagcggatccgcgtaggcctgcaggctcaacctatgcacagtgagctggttaagaagatcctaggcaacaaagctaccttcagccctatagtcactttggaacctagaagaagaaaattccacaaaccaattaccatgaccattcctgtccccaaagcttcaagtgatgtcatgttgaatggttttgggggagatgcaccaaccttaagattactatgcagcataacaggtggaaccacccctgcccagtgggaagatattacaggaactacgccattaacatttgtcaatgaatgtgtttcctttacaacaaacgtgtctgccaggttctggctgatagattgtcgacagatccaggaatccgttacttttgcatcacaagtatacagagaaattatctgcgtaccttatatggccaaatttgtagtgtttgccaaatcacatgaccccattgaagccaggttgaggtgtttctgcatgactgatgataaagtggataagacccttgaacaacaagaaaattttgctgaggtggccagaagcagggatgtggaggtgttagaaggaaaacccatctacgttgattgtttcggcaacttggtaccattaactaaaagtggccagcatcatatattcagtttttttgccttcaaagaaaatagacttcctctatttgtcaaggtacgcgatacgactcaggaaccttgcggacgactatcatttatgaaggagccaaaatccacgagaggcctggtgcatcaagctatttgcaacttaaacatcactttgccgatttatacaaaggaatcagagtcagatcaagaacaggaggaagagatcgatatgacatcagaaaaaaatgatgagacagaatctacagaaacatctgtcctgaaaagtcacctggttaatgaagttcctgtcctagcaagtccggacttgctctctgaagtttctgagatgaaacaagatttgatcaaaatgaccgccatcttgaccacagatgtgtctgataaggcaggttctattaaagtgaaggagctggtgaaggctgctgaggaagagccaggagagccttttgaaatcgttgaaagagttaaagaggacttagagaaagtgaatgaaatcctgagaagtggaacctgcacaagagatgaaagcagtgtgcagagctctcggtctgagagaggattagttgaagaggaatgggttattgtcagtgatgaggaaatagaagaggctaggcaaaaagcacctttagaaatcactgaatatccatgtgtagaagttagaatagataaagagatcaaaggaaaagtagagaaagactcaactgggctagtgaactaccttactgatgatctgaatacctgtgtgcctcttcccaaagagcagctgcagacagttcaagataaggcagggaagaaatgtgaggctctggctgttggcaggagctctgaaaaggaagggaaagacatacccccagatgagacacagagtacacagaaacagcacaaaccaagcttgggaataaagaagccagtaagaaggaaattaaaagaaaagcagaaacaaaaagaggaaggtttacaagctagtgcagagaaagctgaacttaaaaaaggtagttcagaagagtcattaggtgaagacccaggtttagcccctgaaccccttcccactgtcaaggccacatctcctttgatagaagaaactcccattggttccataaaggacaaagtaaaggcccttcagaagcgagtggaagatgaacagaaaggtcgaagcaagttgcccatcagagtcaaaggcaaggaggacgtgccaaaaaagaccacccacaggccacatccagctgcgtcaccctctctgaagtcagagagacatgcgccagggtctccctcccctaaaacagaaagacactctactctttcctcttccgcaaaaactgaaaggcaccctccagtatcaccatcaagtaaaactgagaaacactcacctgtgtcaccctctgcaaaaacggaaagacattcacctgcgtcatcatcgagtaaaactgagaaacactcacctgtatcaccctcgacaaaaactgaaaggcactctcctgtgtcatctacaaaaacagaaagacacccacctgtttcgccttcaggcaaaacagacaaacgtccacctgtatcgccctccgggaggacagaaaaacacccgccagtatcgcctgggagaacagaaaaacgcttgcctgtttcaccctccggaagaacggacaagcaccaacctgtatcaacagctgggaaaactgagaagcacctgcctgtgtcaccttctggcaaaacagaaaagcaaccacctgtatcccccacttcaaaaacagagaggattgaggaaaccatgtctgttcgggagctgatgaaggctttccagtcaggtcaggacccttctaaacataaaactggactctttgagcacaaatcagcaaaacaaaagcagccacaagagaaaggtaaagttcgggtagaaaaagaaaaggggccgatactaacccagagagaagctcagaaaacagagaatcagacaatcaaacgaggccagagactcccggtaacgggcacagcagaatccaaaagaggagttcgtgtttcctccataggagttaagaaagaagatgcagctggaggaaaggagaaagttctcagccacaaaatacctgaacctgttcagtcagtgcctgaagaagaaagccacagagagagcgaagtgcccaaagaaaagatggctgatgagcagggagacatggatctacagatcagcccagataggaaaacctccactgacttctctgaggtcattaagcaagagttggaagacaatgacaaataccaacaattccgcctgagtgaggagacagaaaaggcacagcttcacttagaccaagtactcactagtcctttcaacacaacatttccactcgactacatgaaagatgagttccttccagctctgtctttacaaagcggtgctttagatggcagttctgaaagcctaaagaatgagggggtagccggctctccgtgtggcagcctgatggaggggacccctcagattagttcagaagaaagctataagcatgaaggcctagcagagacccctgagacgagcccagaaagcctttctttctcaccaaagaaaagtgaggagcaaactggggaaacaaaggaaagcaccaagacagaaaccaccacagaaattcgttcagaaaaagagcatcccacgaccaaagacattactggtggctctgaagagcgaggtgccacagtcactgaggactcagagacctctactgagagttttcagaaagaggccactctaggctctcccaaagacacaagccctaaaagacaagatgattgcacaggcagctgtagtgtagcattagctaaagagacacctacaggactgactgaggaggcagcctgtgatgaaggtcaacgtacctttggtagttcagcccacaagacacaaactgatagtgaggttcaagaatccacagccacctcagacgagacaaaggccttgccgctgcctgaggcttctgtaaagacagatacaggaactgaatcaaaacctcagggagtcattagaagtccccaagggttagaacttgcactccctagccgagatagcgaagtcctcagcgctgtggctgatgactcattagcagtgagccacaaagactctctggaagccagccctgtgctagaagataactcttcacacaaaacccctgattctctggagccaagtcctctgaaagaatccccttgccgtgactctctggaaagcagccctgttgaaccaaagatgaaggctggaatttttccaagtcactttcctcttcctgcagctgttgccaaaacagaactcttgacggaagtggcctctgtgcggtcccggctactccgagaccctgatggcagtgctgaggatgacagtcttgagcagacatcgctcatggagagctcagggaagagccccctttctcctgacacccccagctctgaagaagtcagctatgaggttacacccaaaaccacagatgtaagtacaccaaaaccagctgtgattcatgaatgtgcagaggaggatgattcagaaaacggggagaaaaagaggttcacacctgaagaggagatgtttaaaatggtaaccaaaatcaaaatgtttgatgaacttgaacaagaagcaaagcagaaaagggactacaaaaaagaacccaaacaagaagaatcttcttcatcttctgacccagatgctgactgttcagtagatgtggatgaaccaaaacatacaggcagtggggaggatgaaagtggtgtccctgtgttagtaacttcggagagcaggaaggtgtcttcctcctcagaaagtgaacctgagttggcacagcttaaaaaaggtgctgactcaggccttttaccagaaccagtgattcgagtacaacctccttctccacttccatcaagcatggactccaattccagtccagaagaagtacaattccagcctgtcgtttccaaacaatatactttcaagatgaatgaagatactcaggaagagccaggcaaatcagaagaagaaaaagattctgaatcccatttagctgaagaccgtcatgctgtttccactgaggctgaagacaggtcttatgataagctaaacagagacactgatcagccaaaaatctgtgatggccatggatgtgaggccatgagtcctagcagctcagctgctcctgtctcttcaggtctacagagtccgactggtgatgatgttgatgaacagccagtcatctataaagaatcattagctctccaaggcactcatgaaaaagacacagagggagaagagcttgatgtttctagagcagaatctccacaagcagattgccccagtgaaagcttttcatcttcatcctctttgcctcattgtttggtatctgaaggaaaagaattagatgaagacatatctgccacatcttctattcaaaaaacagaggtcacaaaaactgatgaaacatttgagaacttaccaaaggactgcccctctcaagactcatccattactactcaaacagatagattttccatggatgttcccgtgtctgacctagctgagaatgatgaaatctatgatccacaaatcactagcccttatgaaaatgtcccttcccaatcttttttctctagtgaagaaagcaaaacccaaacagatgcaaatcacaccacaagttttcactcttctgaagtgtattctgttaccatcacatcccctgttgaagacgttgtagtggcaagctcctctagtggaactgttttaagcaaagaatctaattttgagggccaggacataaaaatggaatcccaacaggaaagtaccttgtgggaaatgcaatcagacagtgtctcttcatctttcgagcctactatgtccgctacaacaacagttgttggtgaacaaataagcaaagtcatcatcacaaaaactgatgtggattctgattcttggagtgaaattcgggaagacgatgaagcctttgaggctcgtgtgaaagaggaagaacaaaagatatttggtttgatggtagacagacaatcacagggtaccacccctgacaccactcctgctaggaccccaactgaagaggggaccccaacaagtgagcaaaacccatttctgtttcaggaaggaaaattgtttgaaatgacccgaagtggtgccattgatatgaccaaaaggtcctatgcagatgaaagttttcactttttccaaattggtcaagaatccagggaagagactctctctgaagatgtgaaagaaggggctactggggctgatcccctaccgctggagacatcagctgaatcactagcactttcagaatcaaaagaaacagtggatgatgaggcagacttacttccagatgacgtgagtgaggaagtagaggaaatacctgcttcggatgctcaacttaactcccaaatggggatttcagcctccactgaaacacctacaaaagaagctgttagtgtagggaccaaggacctccccaccgtgcaaacgggtgatatacctcctctctctggtgtaaagcagatatcctgccccgactcttctgaaccagctgtacaagtccagttagatttttccacactcaccaggtctgtttattcagataggggtgatgattctcccgattcttccccagaagaacagaaatcagtaatcgagattcctactgcacccatggagaatgtgccttttactgaaagcaaatccaaaattcctgtaaggactatgcccacttccaccccagcacctccatctgcagagtatgagagttcagtttctgaagattttctatccagtgtagatgaggaaaataaggcggatgaagcaaaaccaaagtccaaactccctgtcaaagtacccctccaaagagttgaacagcagctctcagatctagacacctctgtccagaagacagtggctcctcagggacaggacatggcaagcatcgcaccagataatagaagcaaatctgaatctgatgctagttctttggattcaaagaccaaatgcccagtaaaaacccgaagttacactgagacagaaacagagagcagagagagggccgaggaacttgagttagaatcagaagaaggggccacaagaccaaagatacttacatcccgattgccagttaagagcagaagcactacatcttcctgcagggggggcacgagccccacaaaagaaagtaaggagcatttctttgacctttacagaaattccatagaattctttgaggagattagtgatgaggcttccaaattagtggataggctgacacagtcagagagggagcaggaaatagtttcagacgatgaaagtagtagtgccctggaagtatcagtaattgaaaatctgccacctgttgagaccgagcactcagttcctgaggacatctttgacacaaggcccatttgggatgagtctattgagactctgattgaacgcatccctgatgaaaatggccatgaccatgctgaagatccacaggatgagcaggaacggatcgaggaaaggctggcttatattgctgatcaccttggcttcagctggacagaattagcaagagaactggatttcactgaggagcaaattcatcaaattcgaattgaaaatcccaactctcttcaagaccagagtcatgcactgttgaagtactggctagagagggatgggaaacatgctacagataccaacctcgttgaatgtctcaccaagatcaaccgaatggatattgttcatctcatggagaccaacacagaacctctccaggagcgcatcagtcatagttatgcagaaattgaacagaccattacactggatcatagtgaagggttctcggtacttcaagaggagttatgcactgcacagcacaagcagaaagaggagcaagctgtttctaaagaaagtgagacctgcgatcaccctcctatcgtctcagaggaagacatttctgttggttattccacttttcaggatggcgtccccaaaactgagggggacagctcagcaacagcactctttccccaaactcacaaggagcaagttcaacaggatttctcagggaaaatgcaagacctgcctgaagagtcatctctggaatatcagcaggaatattttgtgacaactccaggaacagaaacatcagagactcagaaggctatgatagtacccagctctcccagcaagacacctgaggaagttagcacccctgcagaggaggagaagctgtacctccagaccccaacatccagcgagcggggaggctctcccatcatacaagaacccgaagagccctcagagcacagagaggagagctctccgcggaaaaccagcctcgtaatagtggagtctgccgataaccagcctgagacctgtgaaagactcgatgaagatgcagcttttgaaaagggagacgatatgcctgaaatacccccagaaacagtcacagaagaagaatacattgatgagcatggacacaccgtggtaaagaaggttactaggaaaatcattaggcggtatgtatcctctgaaggcacagagaaagaagagattatggtgcagggaatgccacaggaacctgtcaacatcgaggaaggggatggctattccaaagttataaagcgtgttgtattgaagagtgacaccgagcagtcagaggacaacaatgagtaaagccatcacacagaagagggctgtggtgaaggaccagcatggaaaacgcattgacttggagcacctggaggatgtaccagaagcactagaccaggacgacctccagcgcgatctccagcagctccttcggcatttctgcaaggaggacttgaagcaagaggccaagtgaggggctgcccagttctcacaccagaaaccacacattcactcaatatgcagcttcctgtttcagtaggggagtgacctaactggcctaattaatgggataccccgacatttccactgttagcaaatatacggcattttgctttagttttcccccatcctctttaactataaagctaatttgtgaccaaagatggcatccttcatactggatgctgtatccaatactttgttgtgtctgtgctaacctgggaactggccacctccattgttctttgcttctgcacaagatccatgaaaatccattgatcagaagaacttcacctgcagacctcttcaagtgacactatgtaggaatccttccaaggaatatctatgtacaatgtatatagctgaaatgctcagatgaacaacatattaaaattaaaaccactgcctattgtaactacactgggcatcagaataaaaggcctctagaaattgctgaacaatggttaattaagatattgctaacacaatcgagtgataatacagttttactgcaaaagaagcacttcaaacctattatgtccttagaacttccagagtagccactgctcccagttaaaggtgggtcagtagccttgcagaactgtcctgagaagttattgctggtgctggccagccatggcttaggactccaacagccactctgagggaggggagaagggagcagaggccacgcagaatgaaccgatggggtattcagttgctggcagctacattgtgtggcattctagcatcttcaggtctttagatcttggacaagttggcagggtattttaaaagctataactactgtagttttccagttttcattgctgctttagcaaaccacgctgtcttacagtggtactttcttctggccactgcactgtagataattcattggaaacaagatttacccactacataaaaggttaaactccttcagtatgttggagtggtttctttttttttttctttctttcttttttttcttcaggtttatatcttctctaatacctgcatgtggcgtttaaaaatcaagaccacggtcaaacccctcttctaatcacattaattgtttccattctttttaccctgagtgagcacttttcactttccagctaggtctgtttttcagcttgcagacaagattgagaaatccttgaaaatttggttttggttaaaatttttggtttatttatttgaaatccacactcccttggaaactcttaagtgcatttgtgcacttctgtttgtttgtctcaaagaagggactgtaacaatctgagtaatttccatgtcctcttccttattcctctagtggttgaagctgtgtagcattttaacatatatatattcacaaatatattcatataaacagtatacattttgaatcagtcatttgttaaagaaaagtatattcaatgaagatgaaatttaaataaaaaaggacagagtctatcctccagggattgaacattttccaattatctggtcttttcctgttgtgcaaaaatgactcattgctccgaatgtcaaaaacaaatgcgacaaacaatggcacttcatcatttaaagtaatgttgccaagagaaaaaatttcctgggagggaggtttcccacaagccaaatctcctaagcctcaaatgctagcactttttggcagttggataggaaatgagacattctttggcagccaaaataagagaggccgatggtgaaactttttgagacaccctatggccttcttgtcaaaaccttcactggagctcaagaaaagcatttctgttgtgttatttgcagtgcagatgatgtctgtgtaacaacataatggttattcacctttttttgattttgatttttgctgtgttatcaaaaacttgaatactgtgagaagaagtgaattttcagttgacgaatcagcatcttgttcccatggtgataacactaattgaatatatctatgagggcatgtattagttaatggaaaaaaaaatacaacactaacaatacatagctgcaatgtgtacaatggctgatttaattaaataaaatgtacaagtgttaaatgtggcaa

SEQ ID NO: 107310 - DNA, 6313 bp, Homo sapiens
  Payload ID: 1066
  Gene Symbol: ANK2
  Gene Name: ankyrin 2, neuronal
  Uniprot ID: Q01484
  ENST ID: ENST00000394537
  CDS Start-End: 54-5672
gtacaggcggcacggtttgatggcagagatattttctttccaaactgttcaaaatgatgaacgaagatgcagctcagaaaagcgacagtggagagaagttcaacggcagtagtcagaggagaaaaagacccaagaagtctgacagcaatgcaagcttcctccgtgctgccagagcaggcaacctggacaaagttgtggaatatctgaaggggggcatagacatcaatacctgcaatcagaatggactcaacgctctccatctggctgccaaggaaggccacgtggggctggtgcaggagctgctgggaagagggtcctctgtggattctgccactaagaagggaaataccgctcttcacattgcatctttggctggacaagcagaagttgtcaaagttcttgttaaggaaggagccaatattaatgcacagtctcagaatggctttactcctttatacatggctgcccaagagaatcacattgatgttgtaaaatatttgctggaaaatggagctaatcagagcactgctacagaggatggctttactcctctagctgtggcactccagcaaggacacaaccaggcggtggccatcctcttggagaatgacaccaaagggaaagtgaggctgccagctctgcatattgccgctaggaaagacgacaccaaatctgccgcacttctgcttcagaatgaccacaatgctgacgtacaatccaagatgatggtgaataggacaactgagagtggttttacccctttgcacatagctgcacattacggaaatgtcaacgtggcaactcttcttctaaaccggggagctgctgtggacttcacagccaggaatggaatcactcctctgcatgtggcttccaaaagaggaaatacaaacatggtgaagctcttactggatcgaggcggtcagatcgatgccaaaactagggatgggttgacaccacttcactgtgctgcacgaagtgggcatgaccaagtggtggaacttctgttggaacggggtgcccccttgctggcaaggactaagaatgggctgtctccactacacatggctgcccagggagaccacgtggaatgtgtgaagcacctgttacagcacaaggcacctgttgatgatgtcaccctagactacctgacagccctccacgttgctgcgcactgtggccactaccgtgtaaccaaactccttttagacaagagagccaatccgaacgccagagccctgaatggttttactccactgcacattgcctgcaagaaaaaccgcatcaaagtcatggaactgctggtgaaatatggggcttcaatccaagctataacagagtctggcctcacaccaatacatgtggctgccttcatgggccacttgaacattgtcctccttctgctgcagaacggagcctctccagatgtcactaacattcgtggtgagacggcactacacatggcagcccgagccgggcaggtggaagtggtccgatgcctcctgagaaatggtgcccttgttgatgccagagccagggaggaacagacacctttacatattgcctcccgcctgggtaagacagaaattgtccagctgcttctacaacatatggctcatccagatgcggccactacaaatgggtacacaccactgcacatctctgcccgggagggccaggtggatgtggcatcagtcctattggaagcaggagcagcccactccttagctaccaagaagggttttactcccctgcatgtagcagccaagtatggaagcctggatgtggcaaaacttctcttgcaacgccgtgctgccgcagattctgcagggaagaacggccttaccccgctccatgttgctgctcattatgacaaccagaaggtggcgctgctgttactggagaagggtgcttcccctcatgccactgccaagaatggctatactccgttacatattgctgccaagaagaatcaaatgcagatagcttccacactcctgaactatggagcagagacaaacattgtgacaaagcaaggagtaactccactccatctggcctcgcaggaggggcacacagatatggttaccttgcttctggataagggagccaatatccacatgtcaactaagagtggactcacatccttacaccttgcagcccaggaagataaagtgaatgttgctgatattctcaccaagcatggagctgatcaggatgctcatacaaagcttggttacacacctttaattgtggcctgtcactatggaaatgtgaaaatggtcaactttcttctgaagcagggagcaaatgttaacgcaaaaaccaagaacggctacacgcctttgcaccaggccgctcagcagggtcacacgcacatcatcaacgtcctgctccagcatggggccaagcccaacgccaccactgcgaatggcaacactgccttggcgattgctaagcgtctgggctacatctccgtggtcgacaccctgaaggttgtgactgaggaggtcaccaccaccaccacaactattacagaaaaacacaaactaaatgtacctgagacgatgactgaggttcttgatgtttctgatgaagagggtgatgacacaatgactggtgatgggggagaataccttaggcctgaggacctaaaagaactgggtgatgactcactacccagcagtcagttcctggatggtatgaattacctgcgatacagcttggagggaggacgatctgacagccttcgatccttcagttccgacaggtctcacactctgagccatgcctcctacctgagggacagtgccgtgatggatgactcagttgtgattcccagtcaccaggtgtcaactctagccaaggaggcagaaaggaattcttatcgcctaagctggggcactgagaacttagacaacgtggctctttcttctagtcctattcattcaggtttcctggttagttttatggtggatgcccgaggtggtgctatgcgaggatgcagacacaatgggctccgaatcattattccacctcggaaatgtactgctccaacgcgagtcacctgccgactggtcaagcgccacagactggcaacaatgcctccaatggtggaaggagaaggcctggccagtcgcctgatcgaagttggaccttctggtgctcagttccttggtaaacttcacctgccaacggctcctcccccacttaatgagggagaaagtttggtcagccgcattcttcagctggggcctcctggaaccaaattccttgggcctgtgatcgtggagatccctcactttgcggcccttcgaggaaaggaaagggaactggtggtcctgcgcagtgagaatggggacagctggaaagagcatttctgtgactacactgaagatgaattgaatgaaattcttaacggcatggatgaagtactggatagcccagaagacctagaaaagaaacgaatctgccgcatcatcacccgagacttcccacagtactttgcagtggtgtctcgtatcaaacaggacagcaatctgattggcccagaaggaggtgtactgagcagcacagtggtgccccaggtgcaggccgtcttcccagagggggcactcaccaagcggatccgcgtaggcctgcaggctcaacctatgcacagtgagctggttaagaagatcctaggcaacaaagctaccttcagccctatagtcactttggaacctagaagaagaaaattccacaaaccaattaccatgaccattcctgtccccaaagcttcaagtgatgtcatgttgaatggttttgggggagatgcaccaaccttaagattactatgcagcataacaggtggaaccacccctgcccagtgggaagatattacaggaactacgccattaacatttgtcaatgaatgtgtttcctttacaacaaacgtgtctgccaggttctggctgatagattgtcgacagatccaggaatccgttacttttgcatcacaagtatacagagaaattatctgcgtaccttatatggccaaatttgtagtgtttgccaaatcacatgaccccattgaagccaggttgaggtgtttctgcatgactgatgataaagtggataagacccttgaacaacaagaaaattttgctgaggtggccagaagcagggatgtggaggtgttagaaggaaaacccatctacgttgattgtttcggcaacttggtaccattaactaaaagtggccagcatcatatattcagtttttttgccttcaaagaaaatagacttcctctatttgtcaaggtacgcgatacgactcaggaaccttgcggacgactatcatttatgaaggagccaaaatccacgagaggcctggtgcatcaagctatttgcaacttaaacatcactttgccgatttatacaaaggaatcagagtcagatcaagaacaggaggaagagatcgatatgacatcagaaaaaaatccacaggatgagcaggaacggatcgaggaaaggctggcttatattgctgatcaccttggcttcagctggacagaattagcaagagaactggatttcactgaggagcaaattcatcaaattcgaattgaaaatcccaactctcttcaagaccagagtcatgcactgttgaagtactggctagagagggatgggaaacatgctacagataccaacctcgttgaatgtctcaccaagatcaaccgaatggatattgttcatctcatggagaccaacacagaacctctccaggagcgcatcagtcatagttatgcagaaattgaacagaccattacactggatcatagtgaagggttctcggtacttcaagaggagttatgcactgcacagcacaagcagaaagaggagcaagctgtttctaaagaaagtgagacctgcgatcaccctcctatcgtctcagaggaagacatttctgttggttattccacttttcaggatggcgtccccaaaactgagggggacagctcagcaacagcactctttccccaaactcacaaggagcaagttcaacaggatttctcagggaaaatgcaagacctgcctgaagagtcatctctggaatatcagcaggaatattttgtgacaactccaggaacagaaacatcagagactcagaaggctatgatagtacccagctctcccagcaagacacctgaggaagttagcacccctgcagaggaggagaagctgtacctccagaccccaacatccagcgagcggggaggctctcccatcatacaagaacccgaagagccctcagagcacagagaggagagctctccgcggaaaaccagcctcgtaatagtggagtctgccgataaccagcctgagacctgtgaaagactcgatgaagatgcagcttttgaaaagggagacgatatgcctgaaatacccccagaaacagtcacagaagaagaatacattgatgagcatggacacaccgtggtaaagaaggttactaggaaaatcattaggcggtatgtatcctctgaaggcacagagaaagaagagattatggtgcagggaatgccacaggaacctgtcaacatcgaggaaggggatggctattccaaagttataaagcgtgttgtattgaagagtgacaccgagcagtcagaggacaacaatgagtaaagccatcacacagaagagggctgtggtgaaggaccagcatggaaaacgcattgacttggagcacctggaggatgtaccagaagcactagaccaggacgacctccagcgcgatctccagcagctccttcggcatttctgcaaggaggacttgaagcaagaggccaagtgaggggctgcccagttctcacaccagaaaccacacattcactcaatatgcagcttcctgtttcagtaggggagtgacctaactggcctaattaatgggataccccgacatttccactgttagcaaatatacggcattttgctttagttttcccccatcctctttaactataaagctaatttgtgaccaaagatggcatccttcatactggatgctgtatccaatactttgttgtgtctgtgctaacctgggaactggccacctccattgttctttgcttctgcacaagatccatgaaaatccattgatcagaagaacttcacctgcagacctcttcaagtgacactatgtaggaatccttccaaggaatatctatgtacaatgtatatagctgaaatgctcagatgaacaacatattaaaattaaaaccactgcctattgtaactacactgggcatcagaataaaaggcctcta

SEQ ID NO: 107311 - DNA, 5029 bp, Homo sapiens
  Payload ID: 1066
  Gene Symbol: ANK2
  Gene Name: ankyrin 2, neuronal
  ENST ID: ENST00000503423
  CDS Start-End: 196-5029
acagtctgaggctgtaatgggaaagtcggttcctgggctgctgtctcatagacatcagcttgcagggaagctgggggctctccgaattgccctgctccggggcccctcctgctgcgtgactcacaggcacattgcagagagaagctgccgctcccagtaagtaatgaaaagagacatgaagaattggtatttcaaatgaccaccatgttgcaaaagtctgacagcaatgcaagcttcctccgtgctgccagagcaggcaacctggacaaagttgtggaatatctgaaggggggcatagacatcaatacctgcaatcagaatggactcaacgctctccatctggctgccaaggaaggccacgtggggctggtgcaggagctgctgggaagagggtcctctgtggattctgccactaagaagggaaataccgctcttcacattgcatctttggctggacaagcagaagttgtcaaagttcttgttaaggaaggagccaatattaatgcacagtctcagaatggctttactcctttatacatggctgcccaagagaatcacattgatgttgtaaaatatttgctggaaaatggagctaatcagagcactgctacagaggatggctttactcctctagctgtggcactccagcaaggacacaaccaggcggtggccatcctcttggagaatgacaccaaagggaaagtgaggctgccagctctgcatattgccgctaggaaagacgacaccaaatctgccgcacttctgcttcagaatgaccacaatgctgacgtacaatccaagatgatggtgaataggacaactgagagtggttttacccctttgcacatagctgcacattacggaaatgtcaacgtggcaactcttcttctaaaccggggagctgctgtggacttcacagccaggaatggaatcactcctctgcatgtggcttccaaaagaggaaatacaaacatggtgaagctcttactggatcgaggcggtcagatcgatgccaaaactagggatgggttgacaccacttcactgtgctgcacgaagtgggcatgaccaagtggtggaacttctgttggaacggggtgcccccttgctggcaaggactaagaatgggctgtctccactacacatggctgcccagggagaccacgtggaatgtgtgaagcacctgttacagcacaaggcacctgttgatgatgtcaccctagactacctgacagccctccacgttgctgcgcactgtggccactaccgtgtaaccaaactccttttagacaagagagccaatccgaacgccagagccctgaatggttttactccactgcacattgcctgcaagaaaaaccgcatcaaagtcatggaactgctggtgaaatatggggcttcaatccaagctataacagagtctggcctcacaccaatacatgtggctgccttcatgggccacttgaacattgtcctccttctgctgcagaacggagcctctccagatgtcactaacattcgtggtgagacggcactacacatggcagcccgagccgggcaggtggaagtggtccgatgcctcctgagaaatggtgcccttgttgatgccagagccagggaggaacagacacctttacatattgcctcccgcctgggtaagacagaaattgtccagctgcttctacaacatatggctcatccagatgcggccactacaaatgggtacacaccactgcacatctctgcccgggagggccaggtggatgtggcatcagtcctattggaagcaggagcagcccactccttagctaccaagaagggttttactcccctgcatgtagcagccaagtatggaagcctggatgtggcaaaacttctcttgcaacgccgtgctgccgcagattctgcagggaagaatggctatactccgttacatattgctgccaagaagaatcaaatgcagatagcttccacactcctgaactatggagcagagacaaacattgtgacaaagcaaggagtaactccactccatctggcctcgcaggaggggcacacagatatggttaccttgcttctggataagggagccaatatccacatgtcaactaagagtggactcacatccttacaccttgcagcccaggaagataaagtgaatgttgctgatattctcaccaagcatggagctgatcaggatgctcatacaaagcttggttacacacctttaattgtggcctgtcactatggaaatgtgaaaatggtcaactttcttctgaagcagggagcaaatgttaacgcaaaaaccaagaacggctacacgcctttgcaccaggccgctcagcagggtcacacgcacatcatcaacgtcctgctccagcatggggccaagcccaacgccaccactgcgaatggcaacactgccttggcgattgctaagcgtctgggctacatctccgtggtcgacaccctgaaggttgtgactgaggaggtcaccaccaccaccacaactattacagaaaaacacaaactaaatgtacctgagacgatgactgaggttcttgatgtttctgatgaagagggtgatgacacaatgactggtgatgggggagaataccttaggcctgaggacctaaaagaactgggtgatgactcactacccagcagtcagttcctggatggtatgaattacctgcgatacagcttggagggaggacgatctgacagccttcgatccttcagttccgacaggtctcacactctgagccatgcctcctacctgagggacagtgccgtgatggatgactcagttgtgattcccagtcaccaggtgtcaactctagccaaggaggcagaaaggaattcttatcgcctaagctggggcactgagaacttagacaacgtggctctttcttctagtcctattcattcaggtttcctggttagttttatggtggatgcccgaggtggtgctatgcgaggatgcagacacaatgggctccgaatcattattccacctcggaaatgtactgctccaacgcgagtcacctgccgactggtcaagcgccacagactggcaacaatgcctccaatggtggaaggagaaggcctggccagtcgcctgatcgaagttggaccttctggtgctcagttccttgggcctgtgatcgtggagatccctcactttgcggcccttcgaggaaaggaaagggaactggtggtcctgcgcagtgagaatggggacagctggaaagagcatttctgtgactacactgaagatgaattgaatgaaattcttaacggcatggatgaagtactggatagcccagaagacctagaaaagaaacgaatctgccgcatcatcacccgagacttcccacagtactttgcagtggtgtctcgtatcaaacaggacagcaatctgattggcccagaaggaggtgtactgagcagcacagtggtgccccaggtgcaggccgtcttcccagagggggcactcaccaagcggatccgcgtaggcctgcaggctcaacctatgcacagtgagctggttaagaagatcctaggcaacaaagctaccttcagccctatagtcactttggaacctagaagaagaaaattccacaaaccaattaccatgaccattcctgtccccaaagcttcaagtgatgtcatgttgaatggttttgggggagatgcaccaaccttaagattactatgcagcataacaggtggaaccacccctgcccagtgggaagatattacaggaactacgccattaacatttgtcaatgaatgtgtttcctttacaacaaacgtgtctgccaggttctggctgatagattgtcgacagatccaggaatccgttacttttgcatcacaagtatacagagaaattatctgcgtaccttatatggccaaatttgtagtgtttgccaaatcacatgaccccattgaagccaggttgaggtgtttctgcatgactgatgataaagtggataagacccttgaacaacaagaaaattttgctgaggtggccagaagcagggatgtggaggtgttagaaggaaaacccatctacgttgattgtttcggcaacttggtaccattaactaaaagtggccagcatcatatattcagtttttttgccttcaaagaaaatagacttcctctatttgtcaaggtacgcgatacgactcaggaaccttgcggacgactatcatttatgaaggagccaaaatccacgagaggcctggtgcatcaagctatttgcaacttaaacatcactttgccgatttatacaaaggaatcagagtcagatcaagaacaggaggaagagatcgatatgacatcagaaaaaaatgatgagacagaatctacagaaacatctgtcctgaaaagtcacctggttaatgaagttcctgtcctagcaagtccggacttgctctctgaagtttctgagatgaaacaagatttgatcaaaatgaccgccatcttgaccacagatgtgtctgataaggcaggttctattaaagtgaaggagctggtgaaggctgctgaggaagagccaggagagccttttgaaatcgttgaaagagttaaagaggacttagagaaagtgaatgaaatcctgagaagtggaacctgcacaagagatgaaagcagtgtgcagagctctcggtctgagagaggattagttgaagaggaatgggttattgtcagtgatgaggaaatagaagaggctaggcaaaaagcacctttagaaatcactgaatatccatgtgtagaagttagaatagataaagagatcaaaggaaaagtagagaaagactcaactgggctagtgaactaccttactgatgatctgaatacctgtgtgcctcttcccaaagagcagctgcagacagttcaagataaggcagggaagaaatgtgaggctctggctgttggcaggagctctgaaaaggaagggaaagacatacccccagatgagacacagagtacacagaaacagcacaaaccaagcttgg

SEQ ID NO: 107312 - DNA, 1770 bp, Homo sapiens
  Payload ID: 1066
  Gene Symbol: ANK2
  Gene Name: ankyrin 2, neuronal
  Uniprot ID: Q01484
  ENST ID: ENST00000510275
  CDS Start-End: 7-1674
ttctgcatgactgatgataaagtggataagacccttgaacaacaagaaaattttgctgaggtggccagaagcagggatgtggaggtgttagaaggaaaacccatctacgttgattgtttcggcaacttggtaccattaactaaaagtggccagcatcatatattcagtttttttgccttcaaagaaaatagacttcctctatttgtcaaggtacgcgatacgactcaggaaccttgcggacgactatcatttatgaaggagccaaaatccacgagaggcctggtgcatcaagctatttgcaacttaaacatcactttgccgatttatacaaaggaatcagagtcagatcaagaacaggaggaagagatcgatatgacatcagaaaaaaatccacaggatgagcaggaacggatcgaggaaaggctggcttatattgctgatcaccttggcttcagctggacagaattagcaagagaactggatttcactgaggagcaaattcatcaaattcgaattgaaaatcccaactctcttcaagaccagagtcatgcactgttgaagtactggctagagagggatgggaaacatgctacagataccaacctcgttgaatgtctcaccaagatcaaccgaatggatattgttcatctcatggagaccaacacagaacctctccaggagcgcatcagtcatagttatgcagaaattgaacagaccattacactggatcatagtgaagggttctcggtacttcaagaggagttatgcactgcacagcacaagcagaaagaggagcaagctgtttctaaagaaagtgagacctgcgatcaccctcctatcgtctcagaggaagacatttctgttggttattccacttttcaggatggcgtccccaaaactgagggggacagctcagcaacagcactctttccccaaactcacaaggagcaagttcaacaggatttctcagggaaaatgcaagacctgcctgaagagtcatctctggaatatcagcaggaatattttgtgacaactccaggaacagaaacatcagagactcagaaggctatgatagtacccagctctcccagcaagacacctgaggaagttagcacccctgcagaggaggagaagctgtacctccagaccccaacatccagcgagcggggaggctctcccatcatacaagaacccgaagagccctcagagcacagagaggagagctctccgcggaaaaccagcctcgtaatagtggagtctgccgataaccagcctgagacctgtgaaagactcgatgaagatgcagcttttgaaaaggagctaacagaggaattaggggagctggaggccagctcagatgaggaggcgatggtaactaccagggttgtccgccggcgagtgattattcagggagacgatatgcctgaaatacccccagaaacagtcacagaagaagaatacattgatgagcatggacacaccgtggtaaagaaggttactaggaaaatcattaggcggtatgtatcctctgaaggcacagagaaagaagagattatggtgcagggaatgccacaggaacctgtcaacatcgaggaaggggatggctattccaaagttataaagcgtgttgtattgaagagtgacaccgagcagtcagaggacaacaatgagtaaagccatcacacagaagagggctgtggtgaaggaccagcatggaaaacgcattgacttggagcacctggaggatgtaccagaagcactagaccagga

SEQ ID NO: 107313 - DNA, 545 bp, Homo sapiens
  Payload ID: 1066
  Gene Symbol: ANK2
  Gene Name: ankyrin 2, neuronal
  ENST ID: ENST00000515034
  CDS Start-End: 349-545
agctttctgattcttttttgacttgagtctgacagcaatgcaagcttcctccgtgctgccagagcaggcaacctggacaaagttgtggaatatctgaaggggggcatagacatcaatacctgcaatcagaatggactcaacgctctccatctggctgccaaggaaggccacgtggggctggtgcaggagctgctgggaagagggtcctctgtggattctgccactaagaagggaaataccgctcttcacattgcatctttggctggacaagcagaagttgtcaaagttcttgttaaggaaggagccaatattaatgcacagtctcagaatggctttactcctttatacatggctgcccaagagaatcacattgatgttgtaaaatatttgctggaaaatggagctaatcagagcactgctacagaggatggctttactcctctagctgtggcactccagcaaggacacaaccaggcggtggccatcctcttggagaatgacaccaaagggaaagtgaggctgccagctctgcatattgccgctag

SEQ ID NO: 107314 - DNA, 8051 bp, Homo sapiens
  Payload ID: 1066
  Gene Symbol: ANK2
  Gene Name: ankyrin 2, neuronal
  Uniprot ID: Q01484
  ENST ID: ENST00000506722
  CDS Start-End: 196-5787
acagtctgaggctgtaatgggaaagtcggttcctgggctgctgtctcatagacatcagcttgcagggaagctgggggctctccgaattgccctgctccggggcccctcctgctgcgtgactcacaggcacattgcagagagaagctgccgctcccagtaagtaatgaaaagagacatgaagaattggtatttcaaatgaccaccatgttgcaaaagtctgacagcaatgcaagcttcctccgtgctgccagagcaggcaacctggacaaagttgtggaatatctgaaggggggcatagacatcaatacctgcaatcagaatggactcaacgctctccatctggctgccaaggaaggccacgtggggctggtgcaggagctgctgggaagagggtcctctgtggattctgccactaagaagggaaataccgctcttcacattgcatctttggctggacaagcagaagttgtcaaagttcttgttaaggaaggagccaatattaatgcacagtctcagaatggctttactcctttatacatggctgcccaagagaatcacattgatgttgtaaaatatttgctggaaaatggagctaatcagagcactgctacagaggatggctttactcctctagctgtggcactccagcaaggacacaaccaggcggtggccatcctcttggagaatgacaccaaagggaaagtgaggctgccagctctgcatattgccgctaggaaagacgacaccaaatctgccgcacttctgcttcagaatgaccacaatgctgacgtacaatccaagatgatggtgaataggacaactgagagtggttttacccctttgcacatagctgcacattacggaaatgtcaacgtggcaactcttcttctaaaccggggagctgctgtggacttcacagccaggaatggaatcactcctctgcatgtggcttccaaaagaggaaatacaaacatggtgaagctcttactggatcgaggcggtcagatcgatgccaaaactagggatgggttgacaccacttcactgtgctgcacgaagtgggcatgaccaagtggtggaacttctgttggaacggggtgcccccttgctggcaaggactaagaatgggctgtctccactacacatggctgcccagggagaccacgtggaatgtgtgaagcacctgttacagcacaaggcacctgttgatgatgtcaccctagactacctgacagccctccacgttgctgcgcactgtggccactaccgtgtaaccaaactccttttagacaagagagccaatccgaacgccagagccctgaatggttttactccactgcacattgcctgcaagaaaaaccgcatcaaagtcatggaactgctggtgaaatatggggcttcaatccaagctataacagagtctggcctcacaccaatacatgtggctgccttcatgggccacttgaacattgtcctccttctgctgcagaacggagcctctccagatgtcactaacattcgtggtgagacggcactacacatggcagcccgagccgggcaggtggaagtggtccgatgcctcctgagaaatggtgcccttgttgatgccagagccagggaggaacagacacctttacatattgcctcccgcctgggtaagacagaaattgtccagctgcttctacaacatatggctcatccagatgcggccactacaaatgggtacacaccactgcacatctctgcccgggagggccaggtggatgtggcatcagtcctattggaagcaggagcagcccactccttagctaccaagaagggttttactcccctgcatgtagcagccaagtatggaagcctggatgtggcaaaacttctcttgcaacgccgtgctgccgcagattctgcagggaagaacggccttaccccgctccatgttgctgctcattatgacaaccagaaggtggcgctgctgttactggagaagggtgcttcccctcatgccactgccaagaatggctatactccgttacatattgctgccaagaagaatcaaatgcagatagcttccacactcctgaactatggagcagagacaaacattgtgacaaagcaaggagtaactccactccatctggcctcgcaggaggggcacacagatatggttaccttgcttctggataagggagccaatatccacatgtcaactaagagtggactcacatccttacaccttgcagcccaggaagataaagtgaatgttgctgatattctcaccaagcatggagctgatcaggatgctcatacaaagcttggttacacacctttaattgtggcctgtcactatggaaatgtgaaaatggtcaactttcttctgaagcagggagcaaatgttaacgcaaaaaccaagaacggctacacgcctttgcaccaggccgctcagcagggtcacacgcacatcatcaacgtcctgctccagcatggggccaagcccaacgccaccactgcgaatggcaacactgccttggcgattgctaagcgtctgggctacatctccgtggtcgacaccctgaaggttgtgactgaggaggtcaccaccaccaccacaactattacagaaaaacacaaactaaatgtacctgagacgatgactgaggttcttgatgtttctgatgaagagggtgatgacacaatgactggtgatgggggagaataccttaggcctgaggacctaaaagaactgggtgatgactcactacccagcagtcagttcctggatggtatgaattacctgcgatacagcttggagggaggacgatctgacagccttcgatccttcagttccgacaggtctcacactctgagccatgcctcctacctgagggacagtgccgtgatggatgactcagttgtgattcccagtcaccaggtgtcaactctagccaaggaggcagaaaggaattcttatcgcctaagctggggcactgagaacttagacaacgtggctctttcttctagtcctattcattcaggccgcgcctctccatgtcttgaacgtgacaacagcagtttcctggttagttttatggtggatgcccgaggtggtgctatgcgaggatgcagacacaatgggctccgaatcattattccacctcggaaatgtactgctccaacgcgagtcacctgccgactggtcaagcgccacagactggcaacaatgcctccaatggtggaaggagaaggcctggccagtcgcctgatcgaagttggaccttctggtgctcagttccttggtaaacttcacctgccaacggctcctcccccacttaatgagggagaaagtttggtcagccgcattcttcagctggggcctcctggaaccaaattccttgggcctgtgatcgtggagatccctcactttgcggcccttcgaggaaaggaaagggaactggtggtcctgcgcagtgagaatggggacagctggaaagagcatttctgtgactacactgaagatgaattgaatgaaattcttaacggcatggatgaagtactggatagcccagaagacctagaaaagaaacgaatctgccgcatcatcacccgagacttcccacagtactttgcagtggtgtctcgtatcaaacaggacagcaatctgattggcccagaaggaggtgtactgagcagcacagtggtgccccaggtgcaggccgtcttcccagagggggcactcaccaagcggatccgcgtaggcctgcaggctcaacctatgcacagtgagctggttaagaagatcctaggcaacaaagctaccttcagccctatagtcactttggaacctagaagaagaaaattccacaaaccaattaccatgaccattcctgtccccaaagcttcaagtgatgtcatgttgaatggttttgggggagatgcaccaaccttaagattactatgcagcataacaggtggaaccacccctgcccagtgggaagatattacaggaactacgccattaacatttgtcaatgaatgtgtttcctttacaacaaacgtgtctgccaggttctggctgatagattgtcgacagatccaggaatccgttacttttgcatcacaagtatacagagaaattatctgcgtaccttatatggccaaatttgtagtgtttgccaaatcacatgaccccattgaagccaggttgaggtgtttctgcatgactgatgataaagtggataagacccttgaacaacaagaaaattttgctgaggtggccagaagcagggatgtggaggtgttagaaggaaaacccatctacgttgattgtttcggcaacttggtaccattaactaaaagtggccagcatcatatattcagtttttttgccttcaaagaaaatagacttcctctatttgtcaaggtacgcgatacgactcaggaaccttgcggacgactatcatttatgaaggagccaaaatccacgagaggcctggtgcatcaagctatttgcaacttaaacatcactttgccgatttatacaaaggaatcagagtcagatcaagaacaggaggaagagatcgatatgacatcagaaaaaaatccacaggatgagcaggaacggatcgaggaaaggctggcttatattgctgatcaccttggcttcagctggacagaattagcaagagaactggatttcactgaggagcaaattcatcaaattcgaattgaaaatcccaactctcttcaagaccagagtcatgcactgttgaagtactggctagagagggatgggaaacatgctacagataccaacctcgttgaatgtctcaccaagatcaaccgaatggatattgttcatctcatggagaccaacacagaacctctccaggagcgcatcagtcatagttatgcagaaattgaacagaccattacactggatcatagtgaagggttctcggtacttcaagaggagttatgcactgcacagcacaagcagaaagaggagcaagctgtttctaaagaaagtgagacctgcgatcaccctcctatcgtctcagaggaagacatttctgttggttattccacttttcaggatggcgtccccaaaactgagggggacagctcagcaacagcactctttccccaaactcacaaggagcaagttcaacaggatttctcagggaaaatgcaagacctgcctgaagagtcatctctggaatatcagcaggaatattttgtgacaactccaggaacagaaacatcagagactcagaaggctatgatagtacccagctctcccagcaagacacctgaggaagttagcacccctgcagaggaggagaagctgtacctccagaccccaacatccagcgagcggggaggctctcccatcatacaagaacccgaagagccctcagagcacagagaggagagctctccgcggaaaaccagcctcgtaatagtggagtctgccgataaccagcctgagacctgtgaaagactcgatgaagatgcagcttttgaaaagggagacgatatgcctgaaatacccccagaaacagtcacagaagaagaatacattgatgagcatggacacaccgtggtaaagaaggttactaggaaaatcattaggcggtatgtatcctctgaaggcacagagaaagaagagattatggtgcagggaatgccacaggaacctgtcaacatcgaggaaggggatggctattccaaagttataaagcgtgttgtattgaagagtgacaccgagcagtcagaggacaacaatgagtaaagccatcacacagaagagggctgtggtgaaggaccagcatggaaaacgcattgacttggagcacctggaggatgtaccagaagcactagaccaggacgacctccagcgcgatctccagcagctccttcggcatttctgcaaggaggacttgaagcaagaggccaagtgaggggctgcccagttctcacaccagaaaccacacattcactcaatatgcagcttcctgtttcagtaggggagtgacctaactggcctaattaatgggataccccgacatttccactgttagcaaatatacggcattttgctttagttttcccccatcctctttaactataaagctaatttgtgaccaaagatggcatccttcatactggatgctgtatccaatactttgttgtgtctgtgctaacctgggaactggccacctccattgttctttgcttctgcacaagatccatgaaaatccattgatcagaagaacttcacctgcagacctcttcaagtgacactatgtaggaatccttccaaggaatatctatgtacaatgtatatagctgaaatgctcagatgaacaacatattaaaattaaaaccactgcctattgtaactacactgggcatcagaataaaaggcctctagaaattgctgaacaatggttaattaagatattgctaacacaatcgagtgataatacagttttactgcaaaagaagcacttcaaacctattatgtccttagaacttccagagtagccactgctcccagttaaaggtgggtcagtagccttgcagaactgtcctgagaagttattgctggtgctggccagccatggcttaggactccaacagccactctgagggaggggagaagggagcagaggccacgcagaatgaaccgatggggtattcagttgctggcagctacattgtgtggcattctagcatcttcaggtctttagatcttggacaagttggcagggtattttaaaagctataactactgtagttttccagttttcattgctgctttagcaaaccacgctgtcttacagtggtactttcttctggccactgcactgtagataattcattggaaacaagatttacccactacataaaaggttaaactccttcagtatgttggagtggtttctttttttttttctttctttcttttttttcttcaggtttatatcttctctaatacctgcatgtggcgtttaaaaatcaagaccacggtcaaacccctcttctaatcacattaattgtttccattctttttaccctgagtgagcacttttcactttccagctaggtctgtttttcagcttgcagacaagattgagaaatccttgaaaatttggttttggttaaaatttttggtttatttatttgaaatccacactcccttggaaactcttaagtgcatttgtgcacttctgtttgtttgtctcaaagaagggactgtaacaatctgagtaatttccatgtcctcttccttattcctctagtggttgaagctgtgtagcattttaacatatatatattcacaaatatattcatataaacagtatacattttgaatcagtcatttgttaaagaaaagtatattcaatgaagatgaaatttaaataaaaaaggacagagtctatcctccagggattgaacattttccaattatctggtcttttcctgttgtgcaaaaatgactcattgctccgaatgtcaaaaacaaatgcgacaaacaatggcacttcatcatttaaagtaatgttgccaagagaaaaaatttcctgggagggaggtttcccacaagccaaatctcctaagcctcaaatgctagcactttttggcagttggataggaaatgagacattctttggcagccaaaataagagaggccgatggtgaaactttttgagacaccctatggccttcttgtcaaaaccttcactggagctcaagaaaagcatttctgttgtgttatttgcagtgcagatgatgtctgtgtaacaacataatggttattcacctttttttgattttgatttttgctgtgttatcaaaaacttgaatactgtgagaagaagtgaattttcagttgacgaatcagcatcttgttcccatggtgataacactaattgaatatatctatgagggcatgtattagttaatggaaaaaaaaatacaacactaacaatacatagctgcaatgtgtacaatggctgatttaattaaataaaatgtacaagtgttaaatgt

SEQ ID NO: 107315 - DNA, 243 bp, Homo sapiens
  Payload ID: 1066
  Gene Symbol: ANK2
  Gene Name: ankyrin 2, neuronal
  ENST ID: ENST00000514167
  CDS Start-End: 1-243
gccacaggaacctgtcaacatcgaggaaggggatggctattccaaagttataaagcgtgttgtattgaagagtgacaccgagcagtcagaggctttgagttacacaggtagccacatgaaagtccacttacccagtttagtagagaatgaaatcctgaaagaggatggatcaataattaaaaggacaacaatgagtaaagccatcacacagaagagggctgtggtgaaggaccagcatggaaa

SEQ ID NO: 107316 - DNA, 5356 bp, Homo sapiens
  Payload ID: 1066
  Gene Symbol: ANK2
  Gene Name: ankyrin 2, neuronal
  ENST ID: ENST00000505342
  CDS Start-End: 1-3087
caggacataaaaatggaatcccaacaggaaagtaccttgtgggaaatgcaatcagacagtgtctcttcatctttcgagcctactatgtccgctacaacaacagttgttggtgaacaaataagcaaagtcatcatcacaaaaactgatgtggattctgattcttggagtgaaattcgggaagacgatgaagcctttgaggctcgtgtgaaagaggaagaacaaaagatatttggtttgatggtagacagacaatcacagggtaccacccctgacaccactcctgctaggaccccaactgaagaggggaccccaacaagtgagcaaaacccatttctgtttcaggaaggaaaattgtttgaaatgacccgaagtggtgccattgatatgaccaaaaggtcctatgcagatgaaagttttcactttttccaaattggtcaagaatccagggaagagactctctctgaagatgtgaaagaaggggctactggggctgatcccctaccgctggagacatcagctgaatcactagcactttcagaatcaaaagaaacagtggatgatgaggcagacttacttccagatgacgtgagtgaggaagtagaggaaatacctgcttcggatgctcaacttaactcccaaatggggatttcagcctccactgaaacacctacaaaagaagctgttagtgtagggaccaaggacctccccaccgtgcaaacgggtgatatacctcctctctctggtgtaaagcagatatcctgccccgactcttctgaaccagctgtacaagtccagttagatttttccacactcaccaggtctgtttattcagataggggtgatgattctcccgattcttccccagaagaacagaaatcagtaatcgagattcctactgcacccatggagaatgtgccttttactgaaagcaaatccaaaattcctgtaaggactatgcccacttccaccccagcacctccatctgcagagtatgagagttcagtttctgaagattttctatccagtgtagatgaggaaaataaggcggatgaagcaaaaccaaagtccaaactccctgtcaaagtacccctccaaagagttgaacagcagctctcagatctagacacctctgtccagaagacagtggctcctcagggacaggacatggcaagcatcgcaccagataatagaagcaaatctgaatctgatgctagttctttggattcaaagaccaaatgcccagtaaaaacccgaagttacactgagacagaaacagagagcagagagagggccgaggaacttgagttagaatcagaagaaggggccacaagaccaaagatacttacatcccgattgccagttaagagcagaagcactacatcttcctgcagggggggcacgagccccacaaaagaaagtaaggagcatttctttgacctttacagaaattccatagaattctttgaggagattagtgatgaggcttccaaattagtggataggctgacacagtcagagagggagcaggaaatagtttcagacgatgaaagtagtagtgccctggaagtatcagtaattgaaaatctgccacctgttgagaccgagcactcagttcctgaggacatctttgacacaaggcccatttgggatgagtctattgagactctgattgaacgcatccctgatgaaaatggccatgaccatgctgaagatccacaggatgagcaggaacggatcgaggaaaggctggcttatattgctgatcaccttggcttcagctggacagaattagcaagagaactggatttcactgaggagcaaattcatcaaattcgaattgaaaatcccaactctcttcaagaccagagtcatgcactgttgaagtactggctagagagggatgggaaacatgctacagataccaacctcgttgaatgtctcaccaagatcaaccgaatggatattgttcatctcatggagaccaacacagaacctctccaggagcgcatcagtcatagttatgcagaaattgaacagaccattacactggatcatagtgaagggttctcggtacttcaagaggagttatgcactgcacagcacaagcagaaagaggagcaagctgtttctaaagaaagtgagacctgcgatcaccctcctatcgtctcagaggaagacatttctgttggttattccacttttcaggatggcgtccccaaaactgagggggacagctcagcaacagcactctttccccaaactcacaaggagcaagttcaacaggatttctcagggaaaatgcaagacctgcctgaagagtcatctctggaatatcagcaggaatattttgtgacaactccaggaacagaaacatcagagactcagaaggctatgatagtacccagctctcccagcaagacacctgaggaagttagcacccctgcagaggaggagaagctgtacctccagaccccaacatccagcgagcggggaggctctcccatcatacaagaacccgaagagccctcagagcacagagaggagagctctccgcggaaaaccagcctcgtaatagtggagtctgccgataaccagcctgagacctgtgaaagactcgatgaagatgcagcttttgaaaagggagacgatatgcctgaaatacccccagaaacagtcacagaagaagaatacattgatgagcatggacacaccgtggtaaagaaggttactaggaaaatcattaggcggtatgtatcctctgaaggcacagagaaagaagagattatggtgcagggaatgccacaggaacctgtcaacatcgaggaaggggatggctattccaaagttataaagcgtgttgtattgaagagtgacaccgagcagtcagaggtcactttgtgtgagcccagcattttgtccagtacctcacaatttcaggctgagccagtggaaggccgtagagtcagcaaagttgttaaaacaactgtggtacttggagagaggatggagaaacatctgggggattctagtttagccactgatcttccttcagccaaagatgactttgaagaggacaacaatgagtaaagccatcacacagaagagggctgtggtgaaggaccagcatggaaaacgcattgacttggagcacctggaggatgtaccagaagcactagaccaggacgacctccagcgcgatctccagcagctccttcggcatttctgcaaggaggacttgaagcaagaggccaagtgaggggctgcccagttctcacaccagaaaccacacattcactcaatatgcagcttcctgtttcagtaggggagtgacctaactggcctaattaatgggataccccgacatttccactgttagcaaatatacggcattttgctttagttttcccccatcctctttaactataaagctaatttgtgaccaaagatggcatccttcatactggatgctgtatccaatactttgttgtgtctgtgctaacctgggaactggccacctccattgttctttgcttctgcacaagatccatgaaaatccattgatcagaagaacttcacctgcagacctcttcaagtgacactatgtaggaatccttccaaggaatatctatgtacaatgtatatagctgaaatgctcagatgaacaacatattaaaattaaaaccactgcctattgtaactacactgggcatcagaataaaaggcctctagaaattgctgaacaatggttaattaagatattgctaacacaatcgagtgataatacagttttactgcaaaagaagcacttcaaacctattatgtccttagaacttccagagtagccactgctcccagttaaaggtgggtcagtagccttgcagaactgtcctgagaagttattgctggtgctggccagccatggcttaggactccaacagccactctgagggaggggagaagggagcagaggccacgcagaatgaaccgatggggtattcagttgctggcagctacattgtgtggcattctagcatcttcaggtctttagatcttggacaagttggcagggtattttaaaagctataactactgtagttttccagttttcattgctgctttagcaaaccacgctgtcttacagtggtactttcttctggccactgcactgtagataattcattggaaacaagatttacccactacataaaaggttaaactccttcagtatgttggagtggtttctttttttttttctttctttcttttttttcttcaggtttatatcttctctaatacctgcatgtggcgtttaaaaatcaagaccacggtcaaacccctcttctaatcacattaattgtttccattctttttaccctgagtgagcacttttcactttccagctaggtctgtttttcagcttgcagacaagattgagaaatccttgaaaatttggttttggttaaaatttttggtttatttatttgaaatccacactcccttggaaactcttaagtgcatttgtgcacttctgtttgtttgtctcaaagaagggactgtaacaatctgagtaatttccatgtcctcttccttattcctctagtggttgaagctgtgtagcattttaacatatatatattcacaaatatattcatataaacagtatacattttgaatcagtcatttgttaaagaaaagtatattcaatgaagatgaaatttaaataaaaaaggacagagtctatcctccagggattgaacattttccaattatctggtcttttcctgttgtgcaaaaatgactcattgctccgaatgtcaaaaacaaatgcgacaaacaatggcacttcatcatttaaagtaatgttgccaagagaaaaaatttcctgggagggaggtttcccacaagccaaatctcctaagcctcaaatgctagcactttttggcagttggataggaaatgagacattctttggcagccaaaataagagaggccgatggtgaaactttttgagacaccctatggccttcttgtcaaaaccttcactggagctcaagaaaagcatttctgttgtgttatttgcagtgcagatgatgtctgtgtaacaacataatggttattcacctttttttgattttgatttttgctgtgttatcaaaaacttgaatactgtgagaagaagtgaattttcagttgacgaatcagcatcttgttcccatggtgataacactaattgaatatatctatgagggcatgtattagttaatggaaaaaaaaatacaacactaacaatacatagctgcaatgtgtacaatggctgatttaattaaataaaatgtacaagtgttaaatgtggcaa

SEQ ID NO: 107317 - DNA, 5160 bp, Homo sapiens
  Payload ID: 1066
  Gene Symbol: ANK2
  Gene Name: ankyrin 2, neuronal
  ENST ID: ENST00000514960
  CDS Start-End: 1-2899
caacgtggctctttcttctagtcctattcattcaggtttcctggttagttttatggtggatgcccgaggtggtgctatgcgaggatgcagacacaatgggctccgaatcattattccacctcggaaatgtactgctccaacgcgagtcacctgccgactggtcaagcgccacagactggcaacaatgcctccaatggtggaaggagaaggcctggccagtcgcctgatcgaagttggaccttctggtgctcagttccttgggcctgtgatcgtggagatccctcactttgcggcccttcgaggaaaggaaagggaactggtggtcctgcgcagtgagaatggggacagctggaaagagcatttctgtgactacactgaagatgaattgaatgaaattcttaacggcatggatgaagtactggatagcccagaagacctagaaaagaaacgaatctgccgcatcatcacccgagacttcccacagtactttgcagtggtgtctcgtatcaaacaggacagcaatctgattggcccagaaggaggtgtactgagcagcacagtggtgccccaggtgcaggccgtcttcccagagggggcactcaccaagcggatccgcgtaggcctgcaggctcaacctatgcacagtgagctggttaagaagatcctaggcaacaaagctaccttcagccctatagtcactttggaacctagaagaagaaaattccacaaaccaattaccatgaccattcctgtccccaaagcttcaagtgatgtcatgttgaatggttttgggggagatgcaccaaccttaagattactatgcagcataacaggtggaaccacccctgcccagtgggaagatattacaggaactacgccattaacatttgtcaatgaatgtgtttcctttacaacaaacgtgtctgccaggttctggctgatagattgtcgacagatccaggaatccgttacttttgcatcacaagtatacagagaaattatctgcgtaccttatatggccaaatttgtagtgtttgccaaatcacatgaccccattgaagccaggttgaggtgtttctgcatgactgatgataaagtggataagacccttgaacaacaagaaaattttgctgaggtggccagaagcagggatgtggaggtgttagaaggaaaacccatctacgttgattgtttcggcaacttggtaccattaactaaaagtggccagcatcatatattcagtttttttgccttcaaagaaaatagacttcctctatttgtcaaggtacgcgatacgactcaggaaccttgcggacgactatcatttatgaaggagccaaaatccacgagaggcctggtgcatcaagctatttgcaacttaaacatcactttgccgatttatacaaagatcgatatgacatcagaaaaaaatccacaggatgagcaggaacggatcgaggaaaggctggcttatattgctgatcaccttggcttcagctggacagaattagcaagagaactggatttcactgaggagcaaattcatcaaattcgaattgaaaatcccaactctcttcaagaccagagtcatgcactgttgaagtactggctagagagggatgggaaacatgctacagataccaacctcgttgaatgtctcaccaagatcaaccgaatggatattgttcatctcatggagaccaacacagaacctctccaggagcgcatcagtcatagttatgcagaaattgaacagaccattacactggatcatagtgaagggttctcggtacttcaagaggagttatgcactgcacagcacaagcagaaagaggagcaagctgtttctaaagaaagtgagacctgcgatcaccctcctatcgtctcagaggaagacatttctgttggttattccacttttcaggatggcgtccccaaaactgagggggacagctcagcaacagcactctttccccaaactcacaaggagcaagttcaacaggatttctcagggaaaatgcaagacctgcctgaagagtcatctctggaatatcagcaggaatattttgtgacaactccaggaacagaaacatcagagactcagaaggctatgatagtacccagctctcccagcaagacacctgaggaagttagcacccctgcagaggaggagaagctgtacctccagaccccaacatccagcgagcggggaggctctcccatcatacaagaacccgaagagccctcagagcacagagaggagagctctccgcggaaaaccagcctcgtaatagtggagtctgccgataaccagcctgagacctgtgaaagactcgatgaagatgcagcttttgaaaaggagctaacagaggaattaggggagctggaggccagctcagatgaggaggcgatggtaactaccagggttgtccgccggcgagtgattattcagggagacgatatgcctgaaatacccccagaaacagtcacagaagaagaatacattgatgagcatggacacaccgtggtaaagaaggttactaggaaaatcattaggcggtatgtatcctctgaaggcacagagaaagaagagattatggtgcagggaatgccacaggaacctgtcaacatcgaggaaggggatggctattccaaagttataaagcgtgttgtattgaagagtgacaccgagcagtcagaggtcactttgtgtgagcccagcattttgtccagtacctcacaatttcaggctgagccagtggaaggccgtagagtcagcaaagttgttaaaacaactgtggtacttggagagaggatggagaaacatctgggggattctagtttagccactgatcttccttcagccaaagatgactttgaagaggacaacaatgagtaaagccatcacacagaagagggctgtggtgaaggaccagcatggaaaacgcattgacttggagcacctggaggatgtaccagaagcactagaccaggacgacctccagcgcgatctccagcagctccttcggcatttctgcaaggaggacttgaagcaagaggccaagtgaggggctgcccagttctcacaccagaaaccacacattcactcaatatgcagcttcctgtttcagtaggggagtgacctaactggcctaattaatgggataccccgacatttccactgttagcaaatatacggcattttgctttagttttcccccatcctctttaactataaagctaatttgtgaccaaagatggcatccttcatactggatgctgtatccaatactttgttgtgtctgtgctaacctgggaactggccacctccattgttctttgcttctgcacaagatccatgaaaatccattgatcagaagaacttcacctgcagacctcttcaagtgacactatgtaggaatccttccaaggaatatctatgtacaatgtatatagctgaaatgctcagatgaacaacatattaaaattaaaaccactgcctattgtaactacactgggcatcagaataaaaggcctctagaaattgctgaacaatggttaattaagatattgctaacacaatcgagtgataatacagttttactgcaaaagaagcacttcaaacctattatgtccttagaacttccagagtagccactgctcccagttaaaggtgggtcagtagccttgcagaactgtcctgagaagttattgctggtgctggccagccatggcttaggactccaacagccactctgagggaggggagaagggagcagaggccacgcagaatgaaccgatggggtattcagttgctggcagctacattgtgtggcattctagcatcttcaggtctttagatcttggacaagttggcagggtattttaaaagctataactactgtagttttccagttttcattgctgctttagcaaaccacgctgtcttacagtggtactttcttctggccactgcactgtagataattcattggaaacaagatttacccactacataaaaggttaaactccttcagtatgttggagtggtttctttttttttttctttctttcttttttttcttcaggtttatatcttctctaatacctgcatgtggcgtttaaaaatcaagaccacggtcaaacccctcttctaatcacattaattgtttccattctttttaccctgagtgagcacttttcactttccagctaggtctgtttttcagcttgcagacaagattgagaaatccttgaaaatttggttttggttaaaatttttggtttatttatttgaaatccacactcccttggaaactcttaagtgcatttgtgcacttctgtttgtttgtctcaaagaagggactgtaacaatctgagtaatttccatgtcctcttccttattcctctagtggttgaagctgtgtagcattttaacatatatatattcacaaatatattcatataaacagtatacattttgaatcagtcatttgttaaagaaaagtatattcaatgaagatgaaatttaaataaaaaaggacagagtctatcctccagggattgaacattttccaattatctggtcttttcctgttgtgcaaaaatgactcattgctccgaatgtcaaaaacaaatgcgacaaacaatggcacttcatcatttaaagtaatgttgccaagagaaaaaatttcctgggagggaggtttcccacaagccaaatctcctaagcctcaaatgctagcactttttggcagttggataggaaatgagacattctttggcagccaaaataagagaggccgatggtgaaactttttgagacaccctatggccttcttgtcaaaaccttcactggagctcaagaaaagcatttctgttgtgttatttgcagtgcagatgatgtctgtgtaacaacataatggttattcacctttttttgattttgatttttgctgtgttatcaaaaacttgaatactgtgagaagaagtgaattttcagttgacgaatcagcatcttgttcccatggtgataacactaattgaatatatctatgagggcatgtattagttaatggaaaaaaaaatacaacactaacaatacatagctgcaatgtgtacaatggctgatttaattaaataaaatgtacaagtgttaaa

SEQ ID NO: 107318 - DNA, 895 bp, Homo sapiens
  Payload ID: 1066
  Gene Symbol: ANK2
  Gene Name: ankyrin 2, neuronal
  ENST ID: ENST00000506344
  CDS Start-End: 1-592
ctctgaaggcacagagaaagaagagattatggtgcagggaatgccacaggaacctgtcaacatcgaggaaggggatggctattccaaagttataaagcgtgttgtattgaagagtgacaccgagcagtcagaggtcactttgtgtgagcccagcattttgtccagtacctcacaatttcaggctgagccagtggaaggccgtagagtcagcaaagttgttaaaacaactgtggtacttggagagaggatggagaaacatctgggggattctagtttagccactgatcttccttcagccaaagatgactttgaagaggctttgagttacacaggtagccacatgaaagtccacttacccagtttagtagagaatgaaatcctgaaagaggatggatcaataattaaaaggacaacaatgagtaaagccatcacacagaagagggctgtggtgaaggaccagcatggaaaacgcattgacttggagcacctggaggatgtaccagaagcactagaccaggacgacctccagcgcgatctccagcagctccttcggcatttctgcaaggaggacttgaagcaagaggccaagtgaggggctgcccagttctcacaccagaaaccacacattcactcaatatgcagcttcctgtttcagtaggggagtgacctaactggcctaattaatgggataccccgacatttccactgttagcaaatatacggcattttgctttagttttcccccatcctctttaactataaagctaatttgtgaccaaagatggcatccttcatactggatgctgtatccaatactttgttgtgtctgtgctaacctgggaactggccacctccattgttctttgcttctgcacaagatccatgaaaatccatt

SEQ ID NO: 107319 - DNA, 829 bp, Homo sapiens
  Payload ID: 1066
  Gene Symbol: ANK2
  Gene Name: ankyrin 2, neuronal
  ENST ID: ENST00000508613
  CDS Start-End: 298-829
ccccgggaccatttctgagtgtgggtgcacacctatgcctgtgtgcgtgcaggtgtgtgctgctggaggtctcggtttgggaccttagttcattgtagtgagttgtgggtgctgcagaggctggagcaagattatgacctagctcgggggcggagtggattatcttgtgagtgttctggctgccagccattgccctggtggggaaaatcacatctccatagagctctgaaatcacctggattgctggggagtggaaactgatcctctgctactgcttctgctgatttcctctgcaaaatggctcacgctgctgcttctattaaaaaagttcgagaggctgatctggatgaaaaggaaaaaaatcttgagagagacagaaaaaaacaacggaaaatccccagagaacgtatggaacgaaaaagaaagtctgacagcaatgcaagcttcctccgtgctgccagagcaggcaacctggacaaagttgtggaatatctgaaggggggcatagacatcaatacctgcaatcagaatggactcaacgctctccatctggctgccaaggaaggccacgtggggctggtgcaggagctgctgggaagagggtcctctgtggattctgccactaagaagggaaataccgctcttcacattgcatctttggctggacaagcagaagttgtcaaagttcttgttaaggaaggagccaatattaatgcacagtctcagaatggctttactcctttatacatggctgcccaagagaatcacattgatgttgtaaaatatttgctggaaaatggagctaatcagagcactgctacagaggatg

SEQ ID NO: 107320 - DNA, 3537 bp, Homo sapiens
  Payload ID: 1066
  Gene Symbol: ANK2
  Gene Name: ankyrin 2, neuronal
  ENST ID: ENST00000503271
  CDS Start-End: 196-3537
acagtctgaggctgtaatgggaaagtcggttcctgggctgctgtctcatagacatcagcttgcagggaagctgggggctctccgaattgccctgctccggggcccctcctgctgcgtgactcacaggcacattgcagagagaagctgccgctcccagtaagtaatgaaaagagacatgaagaattggtatttcaaatgaccaccatgttgcaaaagtctgacagcaatgcaagcttcctccgtgctgccagagcaggcaacctggacaaagttgtggaatatctgaaggggggcatagacatcaatacctgcaatcagaatggactcaacgctctccatctggctgccaaggaaggccacgtggggctggtgcaggagctgctgggaagagggtcctctgtggattctgccactaagaagggaaataccgctcttcacattgcatctttggctggacaagcagaagttgtcaaagttcttgttaaggaaggagccaatattaatgcacagtctcagaatggctttactcctttatacatggctgcccaagagaatcacattgatgttgtaaaatatttgctggaaaatggagctaatcagagcactgctacagaggatggctttactcctctagctgtggcactccagcaaggacacaaccaggcggtggccatcctcttggagaatgacaccaaagggaaagtgaggctgccagctctgcatattgccgctaggaaagacgacaccaaatctgccgcacttctgcttcagaatgaccacaatgctgacgtacaatccaagatgatggtgaataggacaactgagagtggttttacccctttgcacatagctgcacattacggaaatgtcaacgtggcaactcttcttctaaaccggggagctgctgtggacttcacagccaggaatggaatcactcctctgcatgtggcttccaaaagaggaaatacaaacatggtgaagctcttactggatcgaggcggtcagatcgatgccaaaactagggatgggttgacaccacttcactgtgctgcacgaagtgggcatgaccaagtggtggaacttctgttggaacggggtgcccccttgctggcaaggactaagaatgggctgtctccactacacatggctgcccagggagaccacgtggaatgtgtgaagcacctgttacagcacaaggcacctgttgatgatgtcaccctagactacctgacagccctccacgttgctgcgcactgtggccactaccgtgtaaccaaactccttttagacaagagagccaatccgaacgccagagccctgaatggttttactccactgcacattgcctgcaagaaaaaccgcatcaaagtcatggaactgctggtgaaatatggggcttcaatccaagctataacagagtctggcctcacaccaatacatgtggctgccttcatgggccacttgaacattgtcctccttctgctgcagaacggagcctctccagatgtcactaacattcgtggtgagacggcactacacatggcagcccgagccgggcaggtggaagtggtccgatgcctcctgagaaatggtgcccttgttgatgccagagccagggaggaacagacacctttacatattgcctcccgcctgggtaagacagaaattgtccagctgcttctacaacatatggctcatccagatgcggccactacaaatgggtacacaccactgcacatctctgcccgggagggccaggtggatgtggcatcagtcctattggaagcaggagcagcccactccttagctaccaagaagggttttactcccctgcatgtagcagccaagtatggaagcctggatgtggcaaaacttctcttgcaacgccgtgctgccgcagattctgcagggaagaacggccttaccccgctccatgttgctgctcattatgacaaccagaaggtggcgctgctgttactggagaagggtgcttcccctcatgccactgccaagaatggctatactccgttacatattgctgccaagaagaatcaaatgcagatagcttccacactcctgaactatggagcagagacaaacattgtgacaaagcaaggagtaactccactccatctggcctcgcaggaggggcacacagatatggttaccttgcttctggataagggagccaatatccacatgtcaactaagagtggactcacatccttacaccttgcagcccaggaagataaagtgaatgttgctgatattctcaccaagcatggagctgatcaggatgctcatacaaagcttggttacacacctttaattgtggcctgtcactatggaaatgtgaaaatggtcaactttcttctgaagcagggagcaaatgttaacgcaaaaaccaagaacggctacacgcctttgcaccaggccgctcagcagggtcacacgcacatcatcaacgtcctgctccagcatggggccaagcccaacgccaccactgcgaatggcaacactgccttggcgattgctaagcgtctgggctacatctccgtggtcgacaccctgaaggttgtgactgaggaggtcaccaccaccaccacaactattacagaaaaacacaaactaaatgtacctgagacgatgactgaggttcttgatgtttctgatgaagagggtgatgacacaatgactggtgatgggggagaataccttaggcctgaggacctaaaagaactgggtgatgactcactacccagcagtcagttcctggatggtatgaattacctgcgatacagcttggagggaggacgatctgacagccttcgatccttcagttccgacaggtctcacactctgagccatgcctcctacctgagggacagtgccgtgatggatgactcagttgtgattcccagtcaccaggtgtcaactctagccaaggaggcagaaaggaattcttatcgcctaagctggggcactgagaacttagacaacgtggctctttcttctagtcctattcattcaggtttcctggttagttttatggtggatgcccgaggtggtgctatgcgaggatgcagacacaatgggctccgaatcattattccacctcggaaatgtactgctccaacgcgagtcacctgccgactggtcaagcgccacagactggcaacaatgcctccaatggtggaaggagaaggcctggccagtcgcctgatcgaagttggaccttctggtgctcagttccttggtaaacttcacctgccaacggctcctcccccacttaatgagggagaaagtttggtcagccgcattcttcagctggggcctcctggaaccaaattccttgggcctgtgatcgtggagatccctcactttgcggcccttcgaggaaaggaaagggaactggtggtcctgcgcagtgagaatggggacagctggaaagagcatttctgtgactacactgaagatgaattgaatgaaattcttaacggcatggatgaagtactggatagcccagaagacctagaa

SEQ ID NO: 107321 - DNA, 5270 bp, Homo sapiens
  Payload ID: 1066
  Gene Symbol: ANK2
  Gene Name: ankyrin 2, neuronal
  ENST ID: ENST00000504454
  CDS Start-End: 80-5270
agtaagtgcatacccgctagtggtctgtacaggcggcacggtttgatggcagagatattttctttccaaactgttcaaaatgatgaacgaagatgcagctcagaaaagcgacagtggagagaagttcaacggcagtagtcagaggagaaaaagacccaagaaggtgacatgcccccagatgaaaccagaggccgccaacattgaaaagtctgacagcaatgcaagcttcctccgtgctgccagagcaggcaacctggacaaagttgtggaatatctgaaggggggcatagacatcaatacctgcaatcagaatggactcaacgctctccatctggctgccaaggaaggccacgtggggctggtgcaggagctgctgggaagagggtcctctgtggattctgccactaagaagggaaataccgctcttcacattgcatctttggctggacaagcagaagttgtcaaagttcttgttaaggaaggagccaatattaatgcacagtctcagaatggctttactcctttatacatggctgcccaagagaatcacattgatgttgtaaaatatttgctggaaaatggagctaatcagagcactgctacagaggatggctttactcctctagctgtggcactccagcaaggacacaaccaggcggtggccatcctcttggagaatgacaccaaagggaaagtgaggctgccagctctgcatattgccgctaggaaagacgacaccaaatctgccgcacttctgcttcagaatgaccacaatgctgacgtacaatccaagatgatggtgaataggacaactgagagtggttttacccctttgcacatagctgcacattacggaaatgtcaacgtggcaactcttcttctaaaccggggagctgctgtggacttcacagccaggaatggaatcactcctctgcatgtggcttccaaaagaggaaatacaaacatggtgaagctcttactggatcgaggcggtcagatcgatgccaaaactagggatgggttgacaccacttcactgtgctgcacgaagtgggcatgaccaagtggtggaacttctgttggaacggggtgcccccttgctggcaaggactaagaatgggctgtctccactacacatggctgcccagggagaccacgtggaatgtgtgaagcacctgttacagcacaaggcacctgttgatgatgtcaccctagactacctgacagccctccacgttgctgcgcactgtggccactaccgtgtaaccaaactccttttagacaagagagccaatccgaacgccagagccctgaatggttttactccactgcacattgcctgcaagaaaaaccgcatcaaagtcatggaactgctggtgaaatatggggcttcaatccaagctataacagagtctggcctcacaccaatacatgtggctgccttcatgggccacttgaacattgtcctccttctgctgcagaacggagcctctccagatgtcactaacattcgtggtgagacggcactacacatggcagcccgagccgggcaggtggaagtggtccgatgcctcctgagaaatggtgcccttgttgatgccagagccagggaggaacagacacctttacatattgcctcccgcctgggtaagacagaaattgtccagctgcttctacaacatatggctcatccagatgcggccactacaaatgggtacacaccactgcacatctctgcccgggagggccaggtggatgtggcatcagtcctattggaagcaggagcagcccactccttagctaccaagaagggttttactcccctgcatgtagcagccaagtatggaagcctggatgtggcaaaacttctcttgcaacgccgtgctgccgcagattctgcagggaagaacggccttaccccgctccatgttgctgctcattatgacaaccagaaggtggcgctgctgttactggagaagggtgcttcccctcatgccactgccaagaatggctatactccgttacatattgctgccaagaagaatcaaatgcagatagcttccacactcctgaactatggagcagagacaaacattgtgacaaagcaaggagtaactccactccatctggcctcgcaggaggggcacacagatatggttaccttgcttctggataagggagccaatatccacatgtcaactaagagtggactcacatccttacaccttgcagcccaggaagataaagtgaatgttgctgatattctcaccaagcatggagctgatcaggatgctcatacaaagcttggttacacacctttaattgtggcctgtcactatggaaatgtgaaaatggtcaactttcttctgaagcagggagcaaatgttaacgcaaaaaccaagaacggctacacgcctttgcaccaggccgctcagcagggtcacacgcacatcatcaacgtcctgctccagcatggggccaagcccaacgccaccactgcgaatggcaacactgccttggcgattgctaagcgtctgggctacatctccgtggtcgacaccctgaaggttgtgactgaggaggtcaccaccaccaccacaactattacagaaaaacacaaactaaatgtacctgagacgatgactgaggttcttgatgtttctgatgaagagggtgatgacacaatgactggtgatgggggagaataccttaggcctgaggacctaaaagaactgggtgatgactcactacccagcagtcagttcctggatggtatgaattacctgcgatacagcttggagggaggacgatctgacagccttcgatccttcagttccgacaggtctcacactctgagccatgcctcctacctgagggacagtgccgtgatggatgactcagttgtgattcccagtcaccaggtgtcaactctagccaaggaggcagaaaggaattcttatcgcctaagctggggcactgagaacttagacaacgtggctctttcttctagtcctattcattcaggtttcctggttagttttatggtggatgcccgaggtggtgctatgcgaggatgcagacacaatgggctccgaatcattattccacctcggaaatgtactgctccaacgcgagtcacctgccgactggtcaagcgccacagactggcaacaatgcctccaatggtggaaggagaaggcctggccagtcgcctgatcgaagttggaccttctggtgctcagttccttggtaaacttcacctgccaacggctcctcccccacttaatgagggagaaagtttggtcagccgcattcttcagctggggcctcctggaaccaaattccttgggcctgtgatcgtggagatccctcactttgcggcccttcgaggaaaggaaagggaactggtggtcctgcgcagtgagaatggggacagctggaaagagcatttctgtgactacactgaagatgaattgaatgaaattcttaacggcatggatgaagtactggatagcccagaagacctagaaaagaaacgaatctgccgcatcatcacccgagacttcccacagtactttgcagtggtgtctcgtatcaaacaggacagcaatctgattggcccagaaggaggtgtactgagcagcacagtggtgccccaggtgcaggccgtcttcccagagggggcactcaccaagcggatccgcgtaggcctgcaggctcaacctatgcacagtgagctggttaagaagatcctaggcaacaaagctaccttcagccctatagtcactttggaacctagaagaagaaaattccacaaaccaattaccatgaccattcctgtccccaaagcttcaagtgatgtcatgttgaatggttttgggggagatgcaccaaccttaagattactatgcagcataacaggtggaaccacccctgcccagtgggaagatattacaggaactacgccattaacatttgtcaatgaatgtgtttcctttacaacaaacgtgtctgccaggttctggctgatagattgtcgacagatccaggaatccgttacttttgcatcacaagtatacagagaaattatctgcgtaccttatatggccaaatttgtagtgtttgccaaatcacatgaccccattgaagccaggttgaggtgtttctgcatgactgatgataaagtggataagacccttgaacaacaagaaaattttgctgaggtggccagaagcagggatgtggaggtgttagaaggaaaacccatctacgttgattgtttcggcaacttggtaccattaactaaaagtggccagcatcatatattcagtttttttgccttcaaagaaaatagacttcctctatttgtcaaggtacgcgatacgactcaggaaccttgcggacgactatcatttatgaaggagccaaaatccacgagaggcctggtgcatcaagctatttgcaacttaaacatcactttgccgatttatacaaaggaatcagagtcagatcaagaacaggaggaagagatcgatatgacatcagaaaaaaatgatgagacagaatctacagaaacatctgtcctgaaaagtcacctggttaatgaagttcctgtcctagcaagtccggacttgctctctgaagtttctgagatgaaacaagatttgatcaaaatgaccgccatcttgaccacagatgtgtctgataaggcaggttctattaaagtgaaggagctggtgaaggctgctgaggaagagccaggagagccttttgaaatcgttgaaagagttaaagaggacttagagaaagtgaatgaaatcctgagaagtggaacctgcacaagagatgaaagcagtgtgcagagctctcggtctgagagaggattagttgaagaggaatgggttattgtcagtgatgaggaaatagaagaggctaggcaaaaagcacctttagaaatcactgaatatccatgtgtagaagttagaatagataaagagatcaaaggaaaagtagagaaagactcaactgggctagtgaactaccttactgatgatctgaatacctgtgtgcctcttcccaaagagcagctgcagacagttcaagataaggcagggaagaaatgtgaggctctggctgttggcaggagctctgaaaaggaagggaaagacatacccccagatgagacacagagtacacagaaacagcacaaaccaagcttgggaataaagaagccagtaagaaggaaattaaaagaaaagcagaaacaaaaag

SEQ ID NO: 107322 - DNA, 573 bp, Homo sapiens
  Payload ID: 1066
  Gene Symbol: ANK2
  Gene Name: ankyrin 2, neuronal
  ENST ID: ENST00000511380
  CDS Start-End: 238-573
ctgcactggaaatggtcactgaatgcagcctgcagttgccgggggttttgagttctctctgacaccagcaagccagctagcagatggggagaactggtgaggggcgtggaagggaactgagcagaggagccaaggatcatcttgatgaattgcccacattagtgtacccctgggagccctggacagagtgcagagggcaaggacgggcccactgacagcaggaactgtagagctgagatggggaatgcagccctctgctcttcttgccatgcggataagagcataagagcacaaggaaacatgcaggaactggataaaaccccagactactatggctgtaacagtgaggacgtcaaagaacctggagtgtggtctgacagcaatgcaagcttcctccgtgctgccagagcaggcaacctggacaaagttgtggaatatctgaaggggggcatagacatcaatacctgcaatcagaatggactcaacgctctccatctggctgccaaggaaggccacgtggggctggtgcaggagctgctgggaagagggtcctctgtggattctgccactaag

SEQ ID NO: 107323 - DNA, 3638 bp, Homo sapiens
  Payload ID: 1066
  Gene Symbol: ANK2
  Gene Name: ankyrin 2, neuronal
  ENST ID: ENST00000509550
  CDS Start-End: 316-3462
ttttgctgcacagtgagcttctgcacagctgtagctaaatatgttaccgtgttcccgatggtaacatcttacctgcagcagatggcctgacttctgatgagggataagtgtacctggtacttgctaacaggttttggagacgtcatgaggcactttcttaagtgcaatacagtatttgtagaagatatttgacaaccttagggttaaagcgtcaagtgcttcttattaaaaagagcaagcagatgcaagcttgttgtgttaccatggtgacctggcctatagtctgaagaagttacaaagacagatttagacgtaatgaatggcaacactgccttggcgattgctaagcgtctgggctacatctccgtggtcgacaccctgaaggttgtgactgaggaggtcaccaccaccaccacaactattacagaaaaacacaaactaaatgtacctgagacgatgactgaggttcttgatgtttctgatgaagagggtgatgacacaatgactggtgatgggggagaataccttaggcctgaggacctaaaagaactgggtgatgactcactacccagcagtcagttcctggatggtatgaattacctgcgatacagcttggagggaggacgatctgacagccttcgatccttcagttccgacaggtctcacactctgagccatgcctcctacctgagggacagtgccgtgatggatgactcagttgtgattcccagtcaccaggtgtcaactctagccaaggaggcagaaaggaattcttatcgcctaagctggggcactgagaacttagacaacgtggctctttcttctagtcctattcattcaggtttcctggttagttttatggtggatgcccgaggtggtgctatgcgaggatgcagacacaatgggctccgaatcattattccacctcggaaatgtactgctccaacgcgagtcacctgccgactggtcaagcgccacagactggcaacaatgcctccaatggtggaaggagaaggcctggccagtcgcctgatcgaagttggaccttctggtgctcagttccttgggcctgtgatcgtggagatccctcactttgcggcccttcgaggaaaggaaagggaactggtggtcctgcgcagtgagaatggggacagctggaaagagcatttctgtgactacactgaagatgaattgaatgaaattcttaacggcatggatgaagtactggatagcccagaagacctagaaaagaaacgaatctgccgcatcatcacccgagacttcccacagtactttgcagtggtgtctcgtatcaaacaggacagcaatctgattggcccagaaggaggtgtactgagcagcacagtggtgccccaggtgcaggccgtcttcccagagggggcactcaccaagcggatccgcgtaggcctgcaggctcaacctatgcacagtgagctggttaagaagatcctaggcaacaaagctaccttcagccctatagtcactttggaacctagaagaagaaaattccacaaaccaattaccatgaccattcctgtccccaaagcttcaagtgatgtcatgttgaatggttttgggggagatgcaccaaccttaagattactatgcagcataacaggtggaaccacccctgcccagtgggaagatattacaggaactacgccattaacatttgtcaatgaatgtgtttcctttacaacaaacgtgtctgccaggttctggctgatagattgtcgacagatccaggaatccgttacttttgcatcacaagtatacagagaaattatctgcgtaccttatatggccaaatttgtagtgtttgccaaatcacatgaccccattgaagccaggttgaggtgtttctgcatgactgatgataaagtggataagacccttgaacaacaagaaaattttgctgaggtggccagaagcagggatgtggaggtgttagaaggaaaacccatctacgttgattgtttcggcaacttggtaccattaactaaaagtggccagcatcatatattcagtttttttgccttcaaagaaaatagacttcctctatttgtcaaggtacgcgatacgactcaggaaccttgcggacgactatcatttatgaaggagccaaaatccacgagaggcctggtgcatcaagctatttgcaacttaaacatcactttgccgatttatacaaaggaatcagagtcagatcaagaacaggaggaagagatcgatatgacatcagaaaaaaatccacaggatgagcaggaacggatcgaggaaaggctggcttatattgctgatcaccttggcttcagctggacagaattagcaagagaactggatttcactgaggagcaaattcatcaaattcgaattgaaaatcccaactctcttcaagaccagagtcatgcactgttgaagtactggctagagagggatgggaaacatgctacagataccaacctcgttgaatgtctcaccaagatcaaccgaatggatattgttcatctcatggagaccaacacagaacctctccaggagcgcatcagtcatagttatgcagaaattgaacagaccattacactggatcatagtgaagggttctcggtacttcaagaggagttatgcactgcacagcacaagcagaaagaggagcaagctgtttctaaagaaagtgagacctgcgatcaccctcctatcgtctcagaggaagacatttctgttggttattccacttttcaggatggcgtccccaaaactgagggggacagctcagcaacagcactctttccccaaactcacaaggagcaagttcaacaggatttctcagggaaaatgcaagacctgcctgaagagtcatctctggaatatcagcaggaatattttgtgacaactccaggaacagaaacatcagagactcagaaggctatgatagtacccagctctcccagcaagacacctgaggaagttagcacccctgcagaggaggagaagctgtacctccagaccccaacatccagcgagcggggaggctctcccatcatacaagaacccgaagagccctcagagcacagagaggagagctctccgcggaaaaccagcctcgtaatagtggagtctgccgataaccagcctgagacctgtgaaagactcgatgaagatgcagcttttgaaaagggagacgatatgcctgaaatacccccagaaacagtcacagaagaagaatacattgatgagcatggacacaccgtggtaaagaaggttactaggaaaatcattaggcggtatgtatcctctgaaggcacagagaaagaagagattatggtgcagggaatgccacaggaacctgtcaacatcgaggaaggggatggctattccaaagttataaagcgtgttgtattgaagagtgacaccgagcagtcagaggacaacaatgagtaaagccatcacacagaagagggctgtggtgaaggaccagcatggaaaacgcattgacttggagcacctggaggatgtaccagaagcactagaccaggacgacctccagcgcgatctccagcagctccttcggcatttctgcaaggaggacttgaagcaagaggccaagtgaggggctg

SEQ ID NO: 107324 - DNA, 561 bp, Homo sapiens
  Payload ID: 1066
  Gene Symbol: ANK2
  Gene Name: ankyrin 2, neuronal
  ENST ID: ENST00000504415
  CDS Start-End: 1-561
gatccaggaatccgttacttttgcatcacaagtatacagagaaattatctgcgtaccttatatggccaaatttgtagtgtttgccaaatcacatgaccccattgaagccaggttgaggtgtttctgcatgactgatgataaagtggataagacccttgaacaacaagaaaattttgctgaggtggccagaagcagggatgtggaggtacgcgatacgactcaggaaccttgcggacgactatcatttatgaaggagccaaaatccacgagaggcctggtgcatcaagctatttgcaacttaaacatcactttgccgatttatacaaaggaatcagagtcagatcaagaacaggaggaagagatcgatatgacatcagaaaaaaatccacaggatgagcaggaacggatcgaggaaaggctggcttatattgctgatcaccttggcttcagctggacagaattagcaagagaactggatttcactgaggagcaaattcatcaaattcgaattgaaaatcccaactctcttcaagaccagagtcatgcactgttgaagtactg

SEQ ID NO: 107325 - DNA, 6134 bp, Homo sapiens
  Payload ID: 1066
  Gene Symbol: ANK2
  Gene Name: ankyrin 2, neuronal
  ENST ID: ENST00000612754
  CDS Start-End: 99-641
agtgaggttcaagaatccacagccacctcagacgagacaaaggccttttaccagaaccagtgattcgagtacaacctccttctccacttccatcaagcatggactccaattccagtccagaagaagtacaattccagcctgtcgtttccaaacaatatactttcaagatgaatgaagatactcaggaagagccaggcaaatcagaagaagaaaaagattctgaatcccatttagctgaagaccgtcatgctgtttccactgaggctgaagacaggtcttatgataagctaaacagagacactgatcagccaaaaatctgtgatggccatggatgtgaggccatgagtcctagcagctcagctgctcctgtctcttcaggtctacagagtccgactggtgatgatgttgatgaacagccagtcatctataaagaatcattagctctccaaggcactcatgaaaaagacacagagggagaagagcttgatgtttctagagcagaatctccacaagcagattgccccagtgaaagcttttcatcttcatcctctttgcctcattgtttggtatctgaaggaaaagaattagatgaagacatatctgccacatcttctattcaaaaaacaggtcacaaaaactgatgaaacatttgagaacttaccaaaggactgcccctctcaagactcatccattactactcaaacagatagattttccatggatgttcccgtgtctgacctagctgagaatgatgaaatctatgatccacaaatcactagcccttatgaaaatgtcccttcccaatcttttttctctagtgaagaaagcaaaacccaaacagatgcaaatcacaccacaagttttcactcttctgaagtgtattctgttaccatcacatcccctgttgaagacgttgtagtggcaagctcctctagtggaactgttttaagcaaagaatctaattttgagggccaggacataaaaatggaatcccaacaggaaagtaccttgtgggaaatgcaatcagacagtgtctcttcatctttcgagcctactatgtccgctacaacaacagttgttggtgaacaaataagcaaagtcatcatcacaaaaactgatgtggattctgattcttggagtgaaattcgggaagacgatgaagcctttgaggctcgtgtgaaagaggaagaacaaaagatatttggtttgatggtagacagacaatcacagggtaccacccctgacaccactcctgctaggaccccaactgaagaggggaccccaacaagtgagcaaaacccatttctgtttcaggaaggaaaattgtttgaaatgacccgaagtggtgccattgatatgaccaaaaggtcctatgcagatgaaagttttcactttttccaaattggtcaagaatccagggaagagactctctctgaagatgtgaaagaaggggctactggggctgatcccctaccgctggagacatcagctgaatcactagcactttcagaatcaaaagaaacagtggatgatgaggcagacttacttccagatgacgtgagtgaggaagtagaggaaatacctgcttcggatgctcaacttaactcccaaatggggatttcagcctccactgaaacacctacaaaagaagctgttagtgtagggaccaaggacctccccaccgtgcaaacgggtgatatacctcctctctctggtgtaaagcagatatcctgccccgactcttctgaaccagctgtacaagtccagttagatttttccacactcaccaggtctgtttattcagataggggtgatgattctcccgattcttccccagaagaacagaaatcagtaatcgagattcctactgcacccatggagaatgtgccttttactgaaagcaaatccaaaattcctgtaaggactatgcccacttccaccccagcacctccatctgcagagtatgagagttcagtttctgaagattttctatccagtgtagatgaggaaaataaggcggatgaagcaaaaccaaagtccaaactccctgtcaaagtacccctccaaagagttgaacagcagctctcagatctagacacctctgtccagaagacagtggctcctcagggacaggacatggcaagcatcgcaccagataatagaagcaaatctgaatctgatgctagttctttggattcaaagaccaaatgcccagtaaaaacccgaagttacactgagacagaaacagagagcagagagagggccgaggaacttgagttagaatcagaagaaggggccacaagaccaaagatacttacatcccgattgccagttaagagcagaagcactacatcttcctgcagggggggcacgagccccacaaaagaaagtaaggagcatttctttgacctttacagaaattccatagaattctttgaggagattagtgatgaggcttccaaattagtggataggctgacacagtcagagagggagcaggaaatagtttcagacgatgaaagtagtagtgccctggaagtatcagtaattgaaaatctgccacctgttgagaccgagcactcagttcctgaggacatctttgacacaaggcccatttgggatgagtctattgagactctgattgaacgcatccctgatgaaaatggccatgaccatgctgaagatccacaggatgagcaggaacggatcgaggaaaggctggcttatattgctgatcaccttggcttcagctggacagaattagcaagagaactggatttcactgaggagcaaattcatcaaattcgaattgaaaatcccaactctcttcaagaccagagtcatgcactgttgaagtactggctagagagggatgggaaacatgctacagataccaacctcgttgaatgtctcaccaagatcaaccgaatggatattgttcatctcatggagaccaacacagaacctctccaggagcgcatcagtcatagttatgcagaaattgaacagaccattacactggatcatagtgaagggttctcggtacttcaagaggagttatgcactgcacagcacaagcagaaagaggagcaagctgtttctaaagaaagtgagacctgcgatcaccctcctatcgtctcagaggaagacatttctgttggttattccacttttcaggatggcgtccccaaaactgagggggacagctcagcaacagcactctttccccaaactcacaaggagcaagttcaacaggatttctcagggaaaatgcaagacctgcctgaagagtcatctctggaatatcagcaggaatattttgtgacaactccaggaacagaaacatcagagactcagaaggctatgatagtacccagctctcccagcaagacacctgaggaagttagcacccctgcagaggaggagaagctgtacctccagaccccaacatccagcgagcggggaggctctcccatcatacaagaacccgaagagccctcagagcacagagaggagagctctccgcggaaaaccagcctcgtaatagtggagtctgccgataaccagcctgagacctgtgaaagactcgatgaagatgcagcttttgaaaagggagacgatatgcctgaaatacccccagaaacagtcacagaagaagaatacattgatgagcatggacacaccgtggtaaagaaggttactaggaaaatcattaggcggtatgtatcctctgaaggcacagagaaagaagagattatggtgcagggaatgccacaggaacctgtcaacatcgaggaaggggatggctattccaaagttataaagcgtgttgtattgaagagtgacaccgagcagtcagaggacaacaatgagtaaagccatcacacagaagagggctgtggtgaaggaccagcatggaaaacgcattgacttggagcacctggaggatgtaccagaagcactagaccaggacgacctccagcgcgatctccagcagctccttcggcatttctgcaaggaggacttgaagcaagaggccaagtgaggggctgcccagttctcacaccagaaaccacacattcactcaatatgcagcttcctgtttcagtaggggagtgacctaactggcctaattaatgggataccccgacatttccactgttagcaaatatacggcattttgctttagttttcccccatcctctttaactataaagctaatttgtgaccaaagatggcatccttcatactggatgctgtatccaatactttgttgtgtctgtgctaacctgggaactggccacctccattgttctttgcttctgcacaagatccatgaaaatccattgatcagaagaacttcacctgcagacctcttcaagtgacactatgtaggaatccttccaaggaatatctatgtacaatgtatatagctgaaatgctcagatgaacaacatattaaaattaaaaccactgcctattgtaactacactgggcatcagaataaaaggcctctagaaattgctgaacaatggttaattaagatattgctaacacaatcgagtgataatacagttttactgcaaaagaagcacttcaaacctattatgtccttagaacttccagagtagccactgctcccagttaaaggtgggtcagtagccttgcagaactgtcctgagaagttattgctggtgctggccagccatggcttaggactccaacagccactctgagggaggggagaagggagcagaggccacgcagaatgaaccgatggggtattcagttgctggcagctacattgtgtggcattctagcatcttcaggtctttagatcttggacaagttggcagggtattttaaaagctataactactgtagttttccagttttcattgctgctttagcaaaccacgctgtcttacagtggtactttcttctggccactgcactgtagataattcattggaaacaagatttacccactacataaaaggttaaactccttcagtatgttggagtggtttctttttttttttctttctttcttttttttcttcaggtttatatcttctctaatacctgcatgtggcgtttaaaaatcaagaccacggtcaaacccctcttctaatcacattaattgtttccattctttttaccctgagtgagcacttttcactttccagctaggtctgtttttcagcttgcagacaagattgagaaatccttgaaaatttggttttggttaaaatttttggtttatttatttgaaatccacactcccttggaaactcttaagtgcatttgtgcacttctgtttgtttgtctcaaagaagggactgtaacaatctgagtaatttccatgtcctcttccttattcctctagtggttgaagctgtgtagcattttaacatatatatattcacaaatatattcatataaacagtatacattttgaatcagtcatttgttaaagaaaagtatattcaatgaagatgaaatttaaataaaaaaggacagagtctatcctccagggattgaacattttccaattatctggtcttttcctgttgtgcaaaaatgactcattgctccgaatgtcaaaaacaaatgcgacaaacaatggcacttcatcatttaaagtaatgttgccaagagaaaaaatttcctgggagggaggtttcccacaagccaaatctcctaagcctcaaatgctagcactttttggcagttggataggaaatgagacattctttggcagccaaaataagagaggccgatggtgaaactttttgagacaccctatggccttcttgtcaaaaccttcactggagctcaagaaaagcatttctgttgtgttatttgcagtgcagatgatgtctgtgtaacaacataatggttattcacctttttttgattttgatttttgctgtgttatcaaaaacttgaatactgtgagaagaagtgaattttcagttgacgaatcagcatcttgttcccatggtgataacactaattgaatatatctatgagggcatgtattagttaatggaaaaaaaaatacaacactaacaatacatagctgcaatgtgtacaatggctgatttaattaaataaaatgtacaagtgtt

SEQ ID NO: 107326 - DNA, 3584 bp, Homo sapiens
  Payload ID: 1066
  Gene Symbol: ANK2
  Gene Name: ankyrin 2, neuronal
  ENST ID: ENST00000634436
  CDS Start-End: 1-3584
tctgacagcaatgcaagcttcctccgtgctgccagagcaggcaacctggacaaagttgtggaatatctgaaggggggcatagacatcaatacctgcaatcagaatggactcaacgctctccatctggctgccaaggaaggccacgtggggctggtgcaggagctgctgggaagagggtcctctgtggattctgccactaagaagggaaataccgctcttcacattgcatctttggctggacaagcagaagttgtcaaagttcttgttaaggaaggagccaatattaatgcacagtctcagaatggctttactcctttatacatggctgcccaagagaatcacattgatgttgtaaaatatttgctggaaaatggagctaatcagagcactgctacagaggatggctttactcctctagctgtggcactccagcaaggacacaaccaggcggtggccatcctcttggagaatgacaccaaagggaaagtgaggctgccagctctgcatattgccgctaggaaagacgacaccaaatctgccgcacttctgcttcagaatgaccacaatgctgacgtacaatccaagatgatggtgaataggacaactgagagtggttttacccctttgcacatagctgcacattacggaaatgtcaacgtggcaactcttcttctaaaccggggagctgctgtggacttcacagccaggaatggaatcactcctctgcatgtggcttccaaaagaggaaatacaaacatggtgaagctcttactggatcgaggcggtcagatcgatgccaaaactagggatgggttgacaccacttcactgtgctgcacgaagtgggcatgaccaagtggtggaacttctgttggaacggggtgcccccttgctggcaaggactaagaatgggctgtctccactacacatggctgcccagggagaccacgtggaatgtgtgaagcacctgttacagcacaaggcacctgttgatgatgtcaccctagactacctgacagccctccacgttgctgcgcactgtggccactaccgtgtaaccaaactccttttagacaagagagccaatccgaacgccagagccctgaatggttttactccactgcacattgcctgcaagaaaaaccgcatcaaagtcatggaactgctggtgaaatatggggcttcaatccaagctataacagagtctggcctcacaccaatacatgtggctgccttcatgggccacttgaacattgtcctccttctgctgcagaacggagcctctccagatgtcactaacattcgtggtgagacggcactacacatggcagcccgagccgggcaggtggaagtggtccgatgcctcctgagaaatggtgcccttgttgatgccagagccagggaggaacagacacctttacatattgcctcccgcctgggtaagacagaaattgtccagctgcttctacaacatatggctcatccagatgcggccactacaaatgggtacacaccactgcacatctctgcccgggagggccaggtggatgtggcatcagtcctattggaagcaggagcagcccactccttagctaccaagaagggttttactcccctgcatgtagcagccaagtatggaagcctggatgtggcaaaacttctcttgcaacgccgtgctgccgcagattctgcagggaagaacggccttaccccgctccatgttgctgctcattatgacaaccagaaggtggcgctgctgttactggagaagggtgcttcccctcatgccactgccaagaatggctatactccgttacatattgctgccaagaagaatcaaatgcagatagcttccacactcctgaactatggagcagagacaaacattgtgacaaagcaaggagtaactccactccatctggcctcgcaggaggggcacacagatatggttaccttgcttctggataagggagccaatatccacatgtcaactaagagtggactcacatccttacaccttgcagcccaggaagataaagtgaatgttgctgatattctcaccaagcatggagctgatcaggatgctcatacaaagcttggttacacacctttaattgtggcctgtcactatggaaatgtgaaaatggtcaactttcttctgaagcagggagcaaatgttaacgcaaaaaccaagaacggctacacgcctttgcaccaggccgctcagcagggtcacacgcacatcatcaacgtcctgctccagcatggggccaagcccaacgccaccactgcgaatggcaacactgccttggcgattgctaagcgtctgggctacatctccgtggtcgacaccctgaaggttgtgactgaggaggtcaccaccaccaccacaactattacagaaaaacacaaactaaatgtacctgagacgatgactgaggttcttgatgtttctgatgaagagggtgatgacacaatgactggtgatgggggagaataccttaggcctgaggacctaaaagaactgggtgatgactcactacccagcagtcagttcctggatggtatgaattacctgcgatacagcttggagggaggacgatctgacagcaccatgcccagttccgacaggtctcacactctgagccatgcctcctacctgagggacagtgccgtgatggatgactcagttgtgattcccagtcaccaggtgtcaactctagccaaggaggcagaaaggaattcttatcgcctaagctggggcactgagaacttagacaacgtggctctttcttctagtcctattcattcaggtttcctggttagttttatggtggatgcccgaggtggtgctatgcgaggatgcagacacaatgggctccgaatcattattccacctcggaaatgtactgctccaacgcgagtcacctgccgactggtcaagcgccacagactggcaacaatgcctccaatggtggaaggagaaggcctggccagtcgcctgatcgaagttggaccttctggtgctcagttccttggtaaacttcacctgccaacggctcctcccccacttaatgagggagaaagtttggtcagccgcattcttcagctggggcctcctggaaccaaattccttgggcctgtgatcgtggagatccctcactttgcggcccttcgaggaaaggaaagggaactggtggtcctgcgcagtgagaatggggacagctggaaagagcatttctgtgactacactgaagatgaattgaatgaaattcttaacggcatggatgaagtactggatagcccagaagacctagaaaagaaacgaatctgccgcatcatcacccgagacttcccacagtactttgcagtggtgtctcgtatcaaacaggacagcaatctgattggcccagaaggaggtgtactgagcagcacagtggtgccccaggtgcaggccgtcttcccagagggggcactcaccaagcggatccgcgtaggcctgcaggctcaacctatgcacagtgagctggttaagaagatcctaggcaacaaagctaccttcagccctatagtcactttggaacc

SEQ ID NO: 107327 - DNA, 16874 bp, Homo sapiens
  Payload ID: 1067
  Gene Symbol: ANK3
  Gene Name: ankyrin 3, node of Ranvier (ankyrin G)
  Uniprot ID: Q12955
  ENST ID: ENST00000280772
  CDS Start-End: 193-13326
ggacaccatcatttgggtttttaaaagcttcagcttctccagcatctttgcattgtgaatatcttcctgcttctagtcaaagctttctctctagtgattggaatgctgctgtaagcctgattagaggtgcctgaggatatcaccttttacaaggaagccgtgtgtgcttgagaggatctttttaaatgcattatggctcatgcagcctcacaattaaagaaaaacagggatttagaaatcaatgctgaagaagagcctgagaaaaaaaggaaacaccgcaaacggtcccgggatcggaagaaaaagtctgatgccaatgcaagttacttaagagcagctcgagctggacaccttgaaaaggccctcgactacataaaaaatggagttgacatcaacatttgcaatcagaatgggttgaacgctctccaccttgcttccaaagaaggccatgtagaggttgtttctgagctgctgcagagagaagccaatgtggatgcagctacaaagaaaggaaacacagcattgcacatcgcatctttggctgggcaagcagaggtggtaaaagtcttggttacaaatggagccaatgtcaatgcacaatctcagaatggtttcacgccattgtatatggcagcccaggaaaatcacctggaagttgtcaagtttcttcttgacaatggtgcaagccagagcctagccacagaggatggcttcacaccattggcagtggctttgcaacaaggtcacgaccaagtcgtttcgctcctgctagagaatgacaccaaaggaaaagtgcgtctcccagctcttcatatcgcggcccgaaaagacgacacgaaagccgccgccctgctgctgcagaatgacaacaatgcagatgtggaatcaaagagtggcttcactccgctccacatagctgctcactatggaaatatcaatgtagccacgttgctgttaaaccgagcggctgctgtggatttcaccgcaaggaatgacatcactcctttacatgttgcatcaaaaagaggaaatgcaaatatggtaaaactattgctcgatcgaggagctaaaatcgatgccaaaaccagggatggtctgacaccactgcactgtggagcaaggagtggccacgagcaggtggtagaaatgttgcttgatcgagctgcccccattctttcaaaaaccaagaatggattatctccattgcacatggccacacaaggggatcatttaaactgcgtccagcttctcctccagcataatgtacccgtggatgatgtcaccaatgactacctgactgccctacacgtggctgcccactgtggccattacaaagttgccaaggttctcttggataagaaagctaaccccaatgccaaagccctgaatggctttacccctcttcatattgcctgcaagaagaatcgaattaaagtaatggaactccttctgaaacacggtgcatccatccaagctgtaaccgagtcgggccttaccccaatccatgttgctgccttcatggggcatgtaaatattgtatcacaactaatgcatcatggagcctcaccaaacaccaccaatgtgagaggagaaacagcactgcacatggcagctcgctccggccaagctgaagttgtgcggtatctggtacaagacggagctcaggtagaagctaaagctaaggatgaccaaacaccactccacatttcagcccgactggggaaagcagacatagtacaacagctgttgcagcaaggggcatctccaaatgcagccacaacttctgggtacaccccacttcacctttccgcccgagaggggcatgaggatgtggccgcgttccttttggatcatggagcgtctttatctataacaacaaagaaaggatttactcctcttcatgtggcagcaaaatatggaaagcttgaagtcgccaatctcctgctacagaaaagtgcatctccagatgctgctgggaagagcgggctaacaccactgcatgtagctgcacattacgataatcagaaagtggcccttctgcttttggaccaaggagcctcacctcacgcagccgcaaagaatggttatacgccactgcacatcgctgccaaaaagaaccagatggacatagcgacaactctgctggaatatggtgctgatgccaacgcagttacccggcaaggaattgcttccgtccatctcgcagctcaggaagggcacgtggacatggtgtcgctgctcctcggtagaaatgcgaatgtgaacctgagcaataagagcggcctgaccccactccatttggctgctcaagaagatcgagtgaatgtggcagaagtcctcgtaaaccaaggggctcatgtggacgcccagacaaagatgggatacacaccactgcatgtgggctgccactatggaaatatcaagattgttaatttcctgctccagcattctgcaaaagttaatgccaaaacaaagaatgggtatacgccattacatcaagcagcacagcaggggcatacgcatataataaatgtcttacttcagaacaacgcctcccccaatgaactcactgtgaatgggaatactgcccttggcattgcccggcgcctcggctacatctcagtagtggacaccctgaagatagtgaccgaagagaccatgaccacaactactgtcacagagaagcacaaaatgaatgttccagaaacgatgaatgaagttcttgatatgtctgatgatgaagttcgtaaagccaatgcccctgaaatgctcagtgatggcgaatatatctcagatgttgaagaaggtgaagatgcaatgaccggggacacagacaaatatcttgggccacaggaccttaaggaattgggtgatgattccctgcctgcagagggttacatgggctttagtctcggagcgcgttctgccagcctccgctccttcagttcggataggtcttacaccttgaacagaagctcctatgcacgggacagcatgatgattgaagaactccttgtgccatccaaagagcagcatctaacattcacaagggaatttgattcagattctcttagacattacagctgggctgcagacaccttagacaatgtcaatcttgtttcaagccccattcattctgggtttctggttagctttatggtggacgcgagagggggctccatgagaggaagccgtcatcacgggatgagaatcatcattcctccacgcaagtgtacggcccccactcgaatcacctgccgtttggtaaagagacataaactggccaacccaccccccatggtggaaggagagggattagccagtaggctggtagaaatgggtcctgcaggggcacaatttttaggccctgtcatagtggaaatccctcactttgggtccatgagaggaaaagagagagaactcattgttcttcgaagtgaaaatggtgaaacttggaaggagcatcagtttgacagcaaaaatgaagatttaaccgagttacttaatggcatggatgaagaacttgatagcccagaagagttagggaaaaagcgtatctgcaggattatcacgaaagatttcccccagtattttgcagtggtttcccggattaagcaggaaagcaaccagattggtcctgaaggtggaattctgagcagcaccacagtgccccttgttcaagcatctttcccagagggtgccctaactaaaagaattcgagtgggcctccaggcccagcctgttccagatgaaattgtgaaaaagatccttggaaacaaagcaacttttagcccaattgtcactgtggaaccaagaagacggaaattccataaaccaatcacaatgaccattccggtgcccccgccctcaggagaaggtgtatccaatggatacaaaggggacactacacccaatctgcgtcttctctgtagcattacagggggcacttcgcctgctcagtgggaagacatcacaggaacaactcctttgacgtttataaaagattgtgtctcctttacaaccaatgtttcagccagattttggcttgcagactgccatcaagttttagaaactgtggggttagccacgcaactgtacagagaattgatatgtgttccatatatggccaagtttgttgtttttgccaaaatgaatgatcccgtagaatcttccttgcgatgtttctgcatgacagatgacaaagtggacaaaactttagagcaacaagagaattttgaggaagtcgcaagaagcaaagatattgaggttctggaaggaaaacctatttatgttgattgttatggaaatttggccccacttaccaaaggaggacagcaacttgtttttaacttttattctttcaaagaaaatagactgccattttccatcaagattagagacaccagccaagagccctgtggtcgtctgtcttttctgaaagaaccaaagacaacaaaaggactgcctcaaacagcggtttgcaacttaaatatcactctgccagcacataaaaaggagacagagtcagatcaagatgatgagattgagaaaacagatagacgacagagcttcgcatccttagctttacgtaagcgctacagctacttgactgagcctggaatgattgaacggagtacaggagcaacaagatccctccccaccacttactcatacaagccattcttttctacaagaccataccagtcctggacaacagctccgattacagtgcctgggccagccaagtcaggcttcacttccttatcaagttcttcctctaatacgccatcagcttctccgttaaaatcaatatggtctgtttcgacaccttctccaatcaaatccacattaggcgcgtcaactacatcttcagttaaatccattagtgacgtggcatctccaattagatcctttcggacaatgtcttcgccgataaaaactgtggtgtcacaatctccatacaatatccaagtttcctctggtaccctggctagagctccagcagtcacggaagctacgcccttaaaagggctggcatccaattctacgttttcctctcgaacctctccagtgactacagcagggtctcttttggagaggtcatcaattactatgacaccccctgcctcccccaaatcaaacattaatatgtattcctcaagtttgccatttaagtcaattattacatcagcagcaccgctaatatcttcacctttaaagtcagtggtgtctccagttaaatcagcagttgatgtcatttcatcagccaaaattacaatggcatcttctctctcatcacctgtgaagcagatgcctggacatgcagaggtagcattagtcaatggatctatttcccctctaaaatatccatcatcctcaactttaattaatggatgcaaagccactgccacgttacaggaaaaaatttcttctgctacaaactctgtgagctctgtggtcagtgcagccactgacacagttgagaaagtgttttctaccacgactgcaatgccattttccccactcaggtcatatgtttctgcagcaccatcagcttttcagtctctaagaactccttccgcaagtgcactctatacatcccttgggtcgtcaatatctgcaactacctcatctgtaacttcatcaattataacagtgccagtatactctgtagtcaatgttttgccagaaccagcattaaagaaacttccagactctaattcatttacaaaatcagcagcagccttgctgtcacccattaaaacattgactacggagacacatcctcagcctcacttcagtcgaacttcatctccagttaagtcatctttgttccttgcaccctctgcccttaagttgtctacaccatcttctttatcttccagtcaggagatactaaaagatgtagctgaaatgaaagaggacctaatgcggatgaccgcaatactacagacagatgtgcctgaggagaagccattccaacctgaactcccaaaggaagggagaatagatgatgaagaacctttcaaaattgtagagaaagtaaaggaagacttagtgaaagttagtgaaatccttaaaaaggatgtatgtgtagataataaaggatcacccaaatcaccaaagagtgacaaaggacactctcctgaagatgactggatagaatttagttcggaagaaatccgggaagccagacaacaagctgctgcgagccagtctccatctctgccagagagagtgcaagtaaaagcaaaagccgcctccgaaaaggattataacttgaccaaagttattgattacctaacaaatgatattgggagtagttcactgacaaacttaaaatacaagtttgaggatgcaaagaaggatggtgaggagagacagaaaagagttttaaaaccagcaattgctttgcaggaacacaaactcaaaatgcctccagcctccatgaggacttccacctctgagaaagaattgtgtaaaatggctgattccttttttggaacagatactattttagagtctcctgatgacttttctcaacacgaccaagataaaagtcccttgtctgacagtggctttgaaacaagaagtgaaaagacaccttcagccccacaaagcgctgaaagcactggtcctaaaccactttttcatgaagttcccatccctcctgtcattacagaaacaagaactgaagtggttcatgttatcaggagctatgatccctcagctggggatgttccccagacccaaccagaggagcctgtgtcacctaaaccttcacctacttttatggaattggaaccaaagcccaccacctctagtattaaagaaaaggttaaagcatttcaaatgaaagccagtagtgaagaagatgaccacaatcgggttttaagcaaaggcatgcgtgttaaagaagagactcacataaccacaaccaccagaatggtttatcattctccaccaggcggtgaaggtgcatctgaaagaattgaagaaaccatgtcagtccatgacatcatgaaggcctttcagtccgggcgggatccttccaaagaactggcaggtctgtttgaacataagtcggcagtgtctccagatgttcacaagtctgctgctgaaacctcagcccagcatgcagagaaggacaaccaaatgaaacccaaactggagcgtataatagaagtccacatcgaaaaaggtaaccaagctgagcccactgaagtcattattagagaaaccaaaaagcatccagaaaaagaaatgtatgtatatcagaaagacttatcccggggagatattaacctaaaagattttctgccagaaaaacacgatgcttttccttgttcagaggaacagggtcagcaagaagaagaagaacttactgctgaagagtcattgccttcttatctggagtcttccagagtaaacactcctgtgtcccaagaagaagatagccgccctagttctgctcaactcatatctgatgactcttataaaacattgaagcttttgagtcaacactcaatagaataccatgacgatgagttgtcagaactaagaggggagtcttacaggtttgctgagaaaatgcttctgtcagaaaagctagatgtgtctcattctgatactgaggaatcggttacagaccatgcaggaccccctagctcagagttacaggggtctgataagcggtccagagaaaaaatagccactgcccccaaaaaagaaattctctccaaaatctataaagatgtttctgaaaatggtgtaggtaaagtgtctaaagatgagcattttgataaagtgacagtgttgcactattctggcaatgttagtagtccaaaacatgccatgtggatgcgctttactgaggacagattagacagaggtagagagaagttgatatatgaagatagggtggacaggactgtgaaggaggctgaagaaaaactgactgaagtgtcacagttttttcgtgacaaaactgaaaagctaaatgatgaactgcagtccccagagaaaaaggcacgccctaaaaatggcaaagaatattcttctcaaagccctaccagtagcagccctgagaaagtgctactgacagaactgctggcatccaatgatgagtgggttaaggcaagacagcatggccctgatggacaaggcttccccaaggccgaggagaaggcacccagtctgcccagcagcccagagaagatggttctctcccaacagactgaggacagcaagtccacagtggaagccaaaggaagtatttcacagagcaaagcaccagatgggccccagtctggattccagctcaaacaatctaaactcagttccattagattaaaatttgaacaaggcacacacgcaaaaagtaaggacatgtctcaagaagacagaaagtcagatggccagtccagaatcccagttaaaaaaatacaggagagcaagctacccgtctaccaagtttttgctagagaaaaacagcagaaggccatagacctcccagatgaaagtgtatctgtgcaaaaagattttatggtattaaaaaccaaagatgagcatgcccaaagcaacgaaattgttgtaaatgattctggctctgataatgtgaaaaaacagagaactgaaatgtcaagtaaagcaatgcctgactctttttctgagcagcaggctaaagacttggcatgtcatataacctcagatttagcaactaggggaccatgggacaaaaaggtctttagaacatgggagagttcgggagccactaacaataagtctcagaaagaaaaactttcgcatgtacttgttcatgatgtaagagagaatcacattggtcaccctgagagtaaaagtgttgatcaaaagaatgaatttatgtctgtgactgagagagaacgcaaattgttaacaaacggctctctctcagaaattaaagaaatgactgtaaaatctccctccaaaaaagtcttatatagggaatatgttgtgaaagaaggggaccatccaggcggattgcttgatcagccttccaggaggagcgagagctcagcagtgtcacacattcccgtcagagttgctgatgagaggagaatgctgtcttctaatattcccgatggtttttgtgaacagtcggcatttccaaaacatgaactatcacaaaaattgtcccagtcaagcatgagtaaagagacagttgagacacagcactttaattctatagaagatgaaaaagttacctattcagaaatcagcaaagtttccaaacaccagagttatgtaggtttatgcccacctctcgaggaaaccgaaacctcccccaccaaatctcctgattctttagagtttagcccaggaaaggaatctccctctagtgatgtattcgaccacagtcccattgatggattggaaaaactcgcaccactagcccagacagagggagggaaagagataaaaactttacccgtttatgtcagttttgtacaagtggggaagcaatatgaaaaggagatacaacaaggaggtgtaaaaaaaatcataagtcaggaatgtaagacagtacaagaaaccagggggaccttttatacaactagacagcaaaagcaacctccttctccccaaggtagtccagaagatgatactctagagcaagtatcctttctagacagctctgggaaaagccctttaaccccagaaacacccagttcagaggaagtgagttatgaatttacatctaagacacctgactcgctcatagcttatataccaggcaaacccagcccaattcccgaggtttctgaggagtcagaggaggaggaacaggccaagtcaacctcccttaagcagactacagtggaggaaacagcagttgagcgtgaaatgcctaatgacgtgagcaaagactctaaccaaagacccaaaaataacagagttgcctatattgaatttccccctcctccaccactggatgcggaccagattgagtcagataagaagcatcattatctcccagaaaaagaggttgacatgattgaagtcaatctgcaagatgagcatgacaagtaccagctggctgaacctgtcattagagtgcagccaccttcaccagttcctcccggggcagacgtcagtgattcaagcgatgacgaatctatttatcagccagtcccagttaaaaaatataccttcaaattaaaggaagtggacgatgaacaaaaagaaaaacccaaagcttctgctgaaaaggcttccaaccagaaagaactggaaagtaatggatctggaaaagataatgaatttggccttggccttgattcacctcagaatgaaattgcccagaatgggaacaacgaccagtccatcacagagtgttccattgccaccacagcagagttttctcatgacacggatgccacagagatcgactctctggatggctatgacctgcaagatgaagatgatggcttgacagagagtgattctaaactcccaattcaagccatggaaattaagaaagatatctggaacacagagggcattctgaagccagctgaccgctcttttagccaaagtaaacttgaagttatcgaggaggagggaaaggtgggaccagatgaggacaagccaccttctaaaagttcttcatctgaaaagactcctgataagactgatcagaagtcaggggcccagttcttcacactggaaggcagacatcctgacagatcagtgtttcctgatacttacttcagttacaaagtagatgaagaatttgccactccttttaaaacagtagctaccaaaggtctagattttgacccttggtctaataaccgaggggatgatgaagtttttgacagtaaatcacgggaagatgaaactaagccatttgggctggcggtagaagaccgctctccagcaacaacccctgatacaacgccagccagaacgccaactgatgaaagtaccccaactagtgagcctaaccccttcccatttcatgaaggaaaaatgtttgagatgactcgcagtggtgcaattgacatgagcaagagggattttgttgaagagaggctccaatttttccagattggtgagcatacttctgaagggaagtcaggggaccagggggaaggggataaaagtatggtcactgccacaccacagccacagtcaggggacaccactgtagaaaccaatctagagagaaatgtagagacacctacagtggaacctaaccccagcatcccgaccagcggagagtgtcaggaaggcacatccagtagtggctccctggagaaatcagcagcagccactaacacctctaaagttgaccccaagttgcgcacgcctataaaaatgggaatttctgcatccaccatgaccatgaagaaagaaggccctggagaaataacagataagatagaagcggtgatgaccagttgtcagggattagaaaatgaaactataacaatgatttcaaatacagccaatagccagatgggcgttaggccccatgaaaaacatgattttcaaaaagataactttaataacaacaacaatttggattcttccactatacagacagataacattatgagtaatatagttctgacagaacattctgcacccacttgtaccacagagaaagataacccagtgaaagtctcatcaggaaaaaagacaggggtactacaaggacactgtgtaagagataagcagaaagttcttggagaacagcaaaaaacaaaggaattgatagggattaggcaaaaatccaaacttcccataaaggccacttcaccaaaagataccttcccaccgaaccatatgtcaaacactaaagcaagtaaaatgaagcaggttagtcaatccgagaaaaccaaagcccttactacttcttcatgtgtagatgtaaagtccagaattccagtgaaaaacacacacagggataacataattgcagttagaaaagcatgtgccacacaaaagcaagggcagccagagaaaggcaaggccaaacagcttccatccaagttgccagtaaaggtaagatccacctgtgtcactaccaccaccaccactgccaccaccaccaccactaccaccactaccaccaccaccagctgcacagttaaagttaggaaaagtcagctcaaggaagtatgtaaacattccattgaatattttaagggaattagtggtgagaccttaaagcttgtggaccgcctctctgaagaagaaaaaaagatgcagtccgagttgtccgatgaggaagaaagtacctcaagaaacacgtcgttgtccgagacttcccggggtggccagccttcggttacaacgaagtctgctagagataagaaaacagaggcagcacctttaaaatcaaagagtgaaaaggccggcagtgagaaaaggagcagtagaaggactggtccacagagtccatgtgaacggacagatatcaggatggcaatagtagccgatcacctgggacttagttggacagaactggcaagggaactgaatttttcagtggatgaaatcaatcaaatacgtgtggaaaatccaaattctttaatttctcagagcttcatgttattaaaaaaatgggttaccagagacggaaaaaatgccacaactgatgccttaacttcggtcttgacaaaaattaatcgaatagatatagtgacactgctagaaggaccaatatttgattatggaaatatttcaggcaccagaagttttgcagatgagaacaatgttttccatgaccctgttgatggttggcagaatgagacatcaagtggaaacctagagtcctgcgctcaagctcgaagagtaactggtgggttactagatcgactggatgacagccctgaccagtgtagagattccattacctcatatctcaaaggagaagctggcaaatttgaagcaaatggaagccatacagaaatcactccagaagcaaagacaaaatcttactttccagaatcccaaaatgatgtaggaaaacagagtaccaaggaaactctgaaaccaaaaatacatggatctggtcatgttgaagaaccagcatcaccactagcagcatatcagaaatctctagaagaaaccagcaagcttataatagaagagactaaaccctgtgtgcctgtcagtatgaaaaagatgagtaggacttctccagcagatggcaagccaaggcttagcctccatgaagaagaggggtccagtgggtctgagcaaaagcagggagaaggttttaaggtgaaaacgaagaaagaaatccggcatgtggaaaagaagagccactcgtaacagcgaacggtcagtcaaggatcataagtttttactgccagtattgagaaattcgtggaagaaatgtcagcaggaagtaaaaattcaccgagaagtgtgtgtgtgttcgctgcttccacacattaatggcatgattttttttatgcaaaaagaaaagaaaagaaaaccacccacattttaatttagcatgagccaatttacagagcatggaaatcactttcatttccggattggcgcgtgtgcaattagcaatgcagtgtatatacaagaagccatgctgttaacagtttatctcaagtaatttggtgtcatttacaaaaggaagaaattcctgccatcagaagggacagaaggagatggaatgatcaaatcacagagaaacactaaaattactaaatctacaacagctcgccttatttttcttggacccaaactgtcagggtataaacactatttgtttcttttttaaaacatcgatagttttgctgtaaataataacactgtataaattctaacagaaaaatagaataaaatgttgataaggcactgcctcttagaacacaaacagaatattgcaaatgcatttaacaaataggggtctcaagtgacttcaccctagaagaggagggagggattctgggtgggggtgactcttcactgattcttgtatattagcaattataatgtttgtatatgcaaaactgctagcttgattttaaaaaaaaacaaatctttaaaatctgctgcaaatttaaataattcccaaaatgaggaattctgtagttctgtgaaaaatttttttcttcagaatactaatattttgatgcatgtgtatcaccttattttgattaaatcttttccaattttgcaaacactacagtatactgcaacacaaaagattttatctgtaaacacaaagcccttcatctaatatttgttgctattgccaatttttcaatgaaatgacctaaaaacaacaaaaaaaaataacctatacggtagttgctttagggggtggggggatgctatctgttagtgcttaaaagggggtaaatgcttgccgctttagaggtggatggtgctcataaaaggccccagtcgggggtatttaaaaaggactgaacagaaatccttagctagtagaatggcagcacgctgtaaaattattactgtattgtgtactggctataagatgtagacacctttcagtaagccaatcatttgtaaccattctagcagtgtcatattaggttaataaggctgctgtgttttaaagggcatttttatttgggttttggtgaaattctttaatttgttgattatattcacataaaatcagcattcattgacacatagctctaatgacatatgtatgaaaaaccatacactggatgacctagtcgattatttaagcataaaataaattgtgttaaactcttcacctatctgtgctctacagtctccttgtgttttctggcaaaaggtagttgtctaatcccttgtcatatgagtcctggccaatccaccccattggtcctctttgtgcctctgtggtcactgaagagataatctctaacattcatatgtgccctgcaagctcccagcttataaattctgtgcatttcatgggggagccaagaattaaagattaattgacaagtaagctttgcccacatctgttcaggccttcttgaaaagtgaagaattggagatactatagccagcatgtcaaaaagttgactggcacttctaggaaccatcaacatgcagttgcttttagcccacagagcttgtttttgttttgttttattaatttacatttattgtccattcttacaagttgggacatttcacataattaagttgctaacatctcttaaaaagcaagatttggcaacaatggacctcattcccagaaggtaacaacctgctagagccaagttgtccctgccctctccagccaggtgtggggtctacaggtatcactgccacagcctcatttcttatatttgtacaacctgactgtgaatttgcaacccatacactgcgtgaatctaaattctactgaggcagagaccatggctgttttaacttttattctagttaccagcttagcatatggtagtagtgatagtagtaactgtgatcatcatcactaaaactggagtgctcactacatgctattctctgttctaagcacattccatttacttacttagtcctcatatctactttatgaattaggtactgtctttctttgatggtaatgatccttttataaaattaaattagtgctaagagactttcagcaatgttatatattgcctgtccattaaagattgttgccaaatggagtgagttgtccccagtaaggattcactatcaatgcagaagaaatgcacggataatctactttgcataaagaatggggctaggttgcatctgcatggtatcccaaataaataaaatgtgccactacccttgcaccaaaattattttatgatgggtaaagttagacccttgagaggttttttttttaaaaaaaaaaaaaaaaaaaaactttcccaaaatgcctctctgtaaagccaggatcagaatataggtgtcctaacttcctatctaagagttacgaatttctgactcagtctttgagagaaggtgtttatcctgaaccagaaactcaatgatgtatacctgtttaggtattaaatagttgtgtttatatgcccaaaaatttgactttaggtatatgtgatatgctttggttccgatcaagcaggaggtcataagtttactcagaagtatccaaaatatgacattcaagatttaacttgcatatgtgtgtatatgcatatatttatacatgtatatgtagattgaatgtgacattatgtatttctaacataatatttggcctgccagcttataaatatgtatttaagcttttcattgattgacattactgtaaaaaatgaattatgattgagaagttctggatatttgctgtttttttcattttatattcttactaaattattgaatttgttaaattaaaatgtgctatcactgtattgccaaattatggcaatacactatgcagtattatttcaatactttaagaggcatctattacttcattgaacacataagcagctagcctcctttcctctgtaaataaggactttttggcatcctgatgttcctcgctgttcatttggtatcatcctggagttccatcaagactgaggattttctccatggccaataaactattgtcagcatcagctcacgtttggctgtatgacagggatatgtgagaagcccagaaataaatcacaaaaataataaggcatcttctgagtctctctgaagaagccagtgatccaaaaactaacttcatatctgagtgagtcttggtattcttgatttgcttgaagaggctgtgacatattacaaggtgtgtaatttcccaggcatatcacactgcttctgtttcatgaattgatcaaattgtccagaagtaaacatttacaagattgagatttgaa

SEQ ID NO: 107328 - DNA, 3811 bp, Homo sapiens
  Payload ID: 1067
  Gene Symbol: ANK3
  Gene Name: ankyrin 3, node of Ranvier (ankyrin G)
  Uniprot ID: Q12955
  ENST ID: ENST00000355288
  CDS Start-End: 650-3655
agctgagaacaaagttgaaagtttgcctggagctccatgccactccccgcctgggccactgctttgttttcttctaatgtttttcctctacctgggttggctgtttcttcattcatatttgagaagaatcacctcctaattaaatgtagcacttcgctctctccctacatgaaggctgtcttggttacccgactaggcaacgcgcattggtatcaaattaccgaaagtctacaccggagcagtcctcatatttacatacaaataactcaggggcttgcatttatgtcaccattctgtcctgctagaggcttgccagaggagtttttaatccaatcagaaggagctttaaaaggatgtctgcgaagtggtcaaaaggatcttaacctcaattaagtggggttttttaaaaagatttttttgggggcctgaaattttgaaaatcttcgaactctgagtggggaaagatgtataattcctcaattgcctacgaggatatcaagatgctgagaggaattcagcggtggtgaagagagtggatacaaaccagggattggtttccttgagctgttttggaggttgattctaaatcactgcttaaggaattcctggaaacatcaggaaaacatttgatcatccaagcctagtggaaatggctttaccgcagagtgaagatgcaatgaccggggacacagacaaatatcttgggccacaggaccttaaggaattgggtgatgattccctgcctgcagagggttacatgggctttagtctcggagcgcgttctgccagcctccgctccttcagttcggataggtcttacaccttgaacagaagctcctatgcacgggacagcatgatgattgaagaactccttgtgccatccaaagagcagcatctaacattcacaagggaatttgattcagattctcttagacattacagctgggctgcagacaccttagacaatgtcaatcttgtttcaagccccattcattctgggtttctggttagctttatggtggacgcgagagggggctccatgagaggaagccgtcatcacgggatgagaatcatcattcctccacgcaagtgtacggcccccactcgaatcacctgccgtttggtaaagagacataaactggccaacccaccccccatggtggaaggagagggattagccagtaggctggtagaaatgggtcctgcaggggcacaatttttaggccctgtcatagtggaaatccctcactttgggtccatgagaggaaaagagagagaactcattgttcttcgaagtgaaaatggtgaaacttggaaggagcatcagtttgacagcaaaaatgaagatttaaccgagttacttaatggcatggatgaagaacttgatagcccagaagagttagggaaaaagcgtatctgcaggattatcacgaaagatttcccccagtattttgcagtggtttcccggattaagcaggaaagcaaccagattggtcctgaaggtggaattctgagcagcaccacagtgccccttgttcaagcatctttcccagagggtgccctaactaaaagaattcgagtgggcctccaggcccagcctgttccagatgaaattgtgaaaaagatccttggaaacaaagcaacttttagcccaattgtcactgtggaaccaagaagacggaaattccataaaccaatcacaatgaccattccggtgcccccgccctcaggagaaggtgtatccaatggatacaaaggggacactacacccaatctgcgtcttctctgtagcattacagggggcacttcgcctgctcagtgggaagacatcacaggaacaactcctttgacgtttataaaagattgtgtctcctttacaaccaatgtttcagccagattttggcttgcagactgccatcaagttttagaaactgtggggttagccacgcaactgtacagagaattgatatgtgttccatatatggccaagtttgttgtttttgccaaaatgaatgatcccgtagaatcttccttgcgatgtttctgcatgacagatgacaaagtggacaaaactttagagcaacaagagaattttgaggaagtcgcaagaagcaaagatattgaggttctggaaggaaaacctatttatgttgattgttatggaaatttggccccacttaccaaaggaggacagcaacttgtttttaacttttattctttcaaagaaaatagactgccattttccatcaagattagagacaccagccaagagccctgtggtcgtctgtcttttctgaaagaaccaaagacaacaaaaggactgcctcaaacagcggtttgcaacttaaatatcactctgccagcacataaaaagattgagaaaacagatagacgacagagcttcgcatccttagctttacgtaagcgctacagctacttgactgagcctggaatgagtccacagagtccatgtgaacggacagatatcaggatggcaatagtagccgatcacctgggacttagttggacagaactggcaagggaactgaatttttcagtggatgaaatcaatcaaatacgtgtggaaaatccaaattctttaatttctcagagcttcatgttattaaaaaaatgggttaccagagacggaaaaaatgccacaactgatgccttaacttcggtcttgacaaaaattaatcgaatagatatagtgacactgctagaaggaccaatatttgattatggaaatatttcaggcaccagaagttttgcagatgagaacaatgttttccatgaccctgttgatggttatccttcccttcaagtggaactggaaacccccacagggttgcactacacaccacctacccctttccagcaagatgattattttagtgatatctctagcatagaatctccccttagaacccctagtagactgagtgatgggctagtgccttcccaggggaacatagagcattccgcagatggacctccagtcgtaactgcagaagacgcttccttagaagacagcaaactggaagactcagtgcctttaacagaaatgcctgaagcagtggatgtagatgagagccagttggagaatgtatgtctgagttggcagaatgagacatcaagtggaaacctagagtcctgcgctcaagctcgaagagtaactggtgggttactagatcgactggatgacagccctgaccagtgtagagattccattacctcatatctcaaaggagaagctggcaaatttgaagcaaatggaagccatacagaaatcactccagaagcaaagacaaaatcttactttccagaatcccaaaatgatgtaggaaaacagagtaccaaggaaactctgaaaccaaaaatacatggatctggtcatgttgaagaaccagcatcaccactagcagcatatcagaaatctctagaagaaaccagcaagcttataatagaagagactaaaccctgtgtgcctgtcagtatgaaaaagatgagtaggacttctccagcagatggcaagccaaggcttagcctccatgaagaagaggggtccagtgggtctgagcaaaagcagggagaaggttttaaggtgaaaacgaagaaagaaatccggcatgtggaaaagaagagccactcgtaacagcgaacggtcagtcaaggatcataagtttttactgccagtattgagaaattcgtggaagaaatgtcagcaggaagtaaaaattcaccgagaagtgtgtgtgtgttcgctgcttccacacattaatggcatgattttttttatgcaaaaagaaaa

SEQ ID NO: 107329 - DNA, 660 bp, Homo sapiens
  Payload ID: 1067
  Gene Symbol: ANK3
  Gene Name: ankyrin 3, node of Ranvier (ankyrin G)
  ENST ID: ENST00000373815
  CDS Start-End: 75-660
aactgacataaaacatccacctttctagtcagctgaggcttacagggaagcaaagggatacgggtgaagatgcaatgaccggggacacagacaaatatcttgggccacaggaccttaaggaattgggtgatgattccctgcctgcagagggttacatgggctttagtctcggagcgcgttctgccagcctccgctccttcagttcggataggtcttacaccttgaacagaagctcctatgcacgggacagcatgatgattgaagaactccttgtgccatccaaagagcagcatctaacattcacaagggaatttgattcagattctcttagacattacagctgggctgcagacaccttagacaatgtcaatcttgtttcaagccccattcattctgggtttctggttagctttatggtggacgcgagagggggctccatgagaggaagccgtcatcacgggatgagaatcatcattcctccacgcaagtgtacggcccccactcgaatcacctgccgtttggtaaagagacataaactggccaacccaccccccatggtggaaggagagggattagccagtaggctggtagaaatgggtcctgcaggggcacaatttttaggccctgtcatagtggaaatccctcactttgggtccatga

SEQ ID NO: 107330 - DNA, 2358 bp, Homo sapiens
  Payload ID: 1067
  Gene Symbol: ANK3
  Gene Name: ankyrin 3, node of Ranvier (ankyrin G)
  ENST ID: ENST00000373820
  CDS Start-End: 1-1380
ccaaagacaacaaaaggactgcctcaaacagcggtttgcaacttaaatatcactctgccagcacataaaaaggagacagagtcagatcaagatgatgagattgagaaaacagatagacgacagagcttcgcatccttagctttacgtaagcgctacagctacttgactgagcctggaatgagtccacagagtccatgtgaacggacagatatcaggatggcaatagtagccgatcacctgggacttagttggacagaactggcaagggaactgaatttttcagtggatgaaatcaatcaaatacgtgtggaaaatccaaattctttaatttctcagagcttcatgttattaaaaaaatgggttaccagagacggaaaaaatgccacaactgatgccttaacttcggtcttgacaaaaattaatcgaatagatatagtgacactgctagaaggaccaatatttgattatggaaatatttcaggcaccagaagttttgcagatgagaacaatgttttccatgaccctgttgatggttatccttcccttcaagtggaactggaaacccccacagggttgcactacacaccacctacccctttccagcaagatgattattttagtgatatctctagcatagaatctccccttagaacccctagtagactgagtgatgggctagtgccttcccaggggaacatagagcattccgcagatggacctccagtcgtaactgcagaagacgcttccttagaagacagcaaactggaagactcagtgcctttaacagaaatgcctgaagcagtggatgtagatgagagccagttggagaatgtatgtctgagttggcagaatgagacatcaagtggaaacctagagtcctgcgctcaagctcgaagagtaactggtgggttactagatcgactggatgacagccctgaccagtgtagagattccattacctcatatctcaaaggagaagctggcaaatttgaagcaaatggaagccatacagaaatcactccagaagcaaagacaaaatcttactttccagaatcccaaaatgatgtaggaaaacagagtaccaaggaaactctgaaaccaaaaatacatggatctggtcatgttgaagaaccagcatcaccactagcagcatatcagaaatctctagaagaaaccagcaagcttataatagaagagactaaaccctgtgtgcctgtcagtatgaaaaagatgagtaggacttctccagcagatggcaagccaaggcttagcctccatgaagaagaggggtccagtgggtctgagcaaaagcagggagaaggttttaaggtgaaaacgaagaaagaaatccggcatgtggaaaagaagagccactcgtaacagcgaacggtcagtcaaggatcataagtttttactgccagtattgagaaattcgtggaagaaatgtcagcaggaagtaaaaattcaccgagaagtgtgtgtgtgttcgctgcttccacacattaatggcatgattttttttatgcaaaaagaaaagaaaagaaaaccacccacattttaatttagcatgagccaatttacagagcatggaaatcactttcatttccggattggcgcgtgtgcaattagcaatgcagtgtatatacaagaagccatgctgttaacagtttatctcaagtaatttggtgtcatttacaaaaggaagaaattcctgccatcagaagggacagaaggagatggaatgatcaaatcacagagaaacactaaaattactaaatctacaacagctcgccttatttttcttggacccaaactgtcagggtataaacactatttgtttcttttttaaaacatcgatagttttgctgtaaataataacactgtataaattctaacagaaaaatagaataaaatgttgataaggcactgcctcttagaacacaaacagaatattgcaaatgcatttaacaaataggggtctcaagtgacttcaccctagaagaggagggagggattctgggtgggggtgactcttcactgattcttgtatattagcaattataatgtttgtatatgcaaaactgctagcttgattttaaaaaaaaacaaatctttaaaatctgctgcaaatttaaataattcccaaaatgaggaattctgtagttctgtgaaaaatttttttcttcagaatactaatattttgatgcatgtgtatcaccttattttgattaaatcttttccaattttgcaaacactacagtatactgcaacacaaaagattttatctgtaaacacaaagcccttcatctaatatttgttgctattgccaatttttcaatgaaatgacctaaaaacaac

SEQ ID NO: 107331 - DNA, 7202 bp, Homo sapiens
  Payload ID: 1067
  Gene Symbol: ANK3
  Gene Name: ankyrin 3, node of Ranvier (ankyrin G)
  Uniprot ID: Q12955
  ENST ID: ENST00000373827
  CDS Start-End: 172-5757
acagcaggaggaggataggccgcgctgggcgggcgtcgcggggccgcgcttggtgttcctgagccgcggccgaactttttcccaagaagtcccacgtttggaggcccgaggagcgggacggggaggagagactggagttcctggaaggagcagcagcagcagccccacaacatggcctcctccgcctcctcctctcccgcgggcaccgaggactccgctcctgcccagggtggctttggatcagattattcacgaagctctagaaagtctgatgccaatgcaagttacttaagagcagctcgagctggacaccttgaaaaggccctcgactacataaaaaatggagttgacatcaacatttgcaatcagaatgggttgaacgctctccaccttgcttccaaagaaggccatgtagaggttgtttctgagctgctgcagagagaagccaatgtggatgcagctacaaagaaaggaaacacagcattgcacatcgcatctttggctgggcaagcagaggtggtaaaagtcttggttacaaatggagccaatgtcaatgcacaatctcagaatggtttcacgccattgtatatggcagcccaggaaaatcacctggaagttgtcaagtttcttcttgacaatggtgcaagccagagcctagccacagaggatggcttcacaccattggcagtggctttgcaacaaggtcacgaccaagtcgtttcgctcctgctagagaatgacaccaaaggaaaagtgcgtctcccagctcttcatatcgcggcccgaaaagacgacacgaaagccgccgccctgctgctgcagaatgacaacaatgcagatgtggaatcaaagagtggcttcactccgctccacatagctgctcactatggaaatatcaatgtagccacgttgctgttaaaccgagcggctgctgtggatttcaccgcaaggaatgacatcactcctttacatgttgcatcaaaaagaggaaatgcaaatatggtaaaactattgctcgatcgaggagctaaaatcgatgccaaaaccagggatggtctgacaccactgcactgtggagcaaggagtggccacgagcaggtggtagaaatgttgcttgatcgagctgcccccattctttcaaaaaccaagaatggattatctccattgcacatggccacacaaggggatcatttaaactgcgtccagcttctcctccagcataatgtacccgtggatgatgtcaccaatgactacctgactgccctacacgtggctgcccactgtggccattacaaagttgccaaggttctcttggataagaaagctaaccccaatgccaaagccctgaatggctttacccctcttcatattgcctgcaagaagaatcgaattaaagtaatggaactccttctgaaacacggtgcatccatccaagctgtaaccgagtcgggccttaccccaatccatgttgctgccttcatggggcatgtaaatattgtatcacaactaatgcatcatggagcctcaccaaacaccaccaatgtgagaggagaaacagcactgcacatggcagctcgctccggccaagctgaagttgtgcggtatctggtacaagacggagctcaggtagaagctaaagctaaggatgaccaaacaccactccacatttcagcccgactggggaaagcagacatagtacaacagctgttgcagcaaggggcatctccaaatgcagccacaacttctgggtacaccccacttcacctttccgcccgagaggggcatgaggatgtggccgcgttccttttggatcatggagcgtctttatctataacaacaaagaaaggatttactcctcttcatgtggcagcaaaatatggaaagcttgaagtcgccaatctcctgctacagaaaagtgcatctccagatgctgctgggaagagcgggctaacaccactgcatgtagctgcacattacgataatcagaaagtggcccttctgcttttggaccaaggagcctcacctcacgcagccgcaaagaatggttatacgccactgcacatcgctgccaaaaagaaccagatggacatagcgacaactctgctggaatatggtgctgatgccaacgcagttacccggcaaggaattgcttccgtccatctcgcagctcaggaagggcacgtggacatggtgtcgctgctcctcggtagaaatgcgaatgtgaacctgagcaataagagcggcctgaccccactccatttggctgctcaagaagatcgagtgaatgtggcagaagtcctcgtaaaccaaggggctcatgtggacgcccagacaaagatgggatacacaccactgcatgtgggctgccactatggaaatatcaagattgttaatttcctgctccagcattctgcaaaagttaatgccaaaacaaagaatgggtatacgccattacatcaagcagcacagcaggggcatacgcatataataaatgtcttacttcagaacaacgcctcccccaatgaactcactgtgaatgggaatactgcccttggcattgcccggcgcctcggctacatctcagtagtggacaccctgaagatagtgaccgaagagaccatgaccacaactactgtcacagagaagcacaaaatgaatgttccagaaacgatgaatgaagttcttgatatgtctgatgatgaagttcgtaaagccaatgcccctgaaatgctcagtgatggcgaatatatctcagatgttgaagaaggtgaagatgcaatgaccggggacacagacaaatatcttgggccacaggaccttaaggaattgggtgatgattccctgcctgcagagggttacatgggctttagtctcggagcgcgttctgccagcctccgctccttcagttcggataggtcttacaccttgaacagaagctcctatgcacgggacagcatgatgattgaagaactccttgtgccatccaaagagcagcatctaacattcacaagggaatttgattcagattctcttagacattacagctgggctgcagacaccttagacaatgtcaatcttgtttcaagccccattcattctgggtttctggttagctttatggtggacgcgagagggggctccatgagaggaagccgtcatcacgggatgagaatcatcattcctccacgcaagtgtacggcccccactcgaatcacctgccgtttggtaaagagacataaactggccaacccaccccccatggtggaaggagagggattagccagtaggctggtagaaatgggtcctgcaggggcacaatttttaggccctgtcatagtggaaatccctcactttgggtccatgagaggaaaagagagagaactcattgttcttcgaagtgaaaatggtgaaacttggaaggagcatcagtttgacagcaaaaatgaagatttaaccgagttacttaatggcatggatgaagaacttgatagcccagaagagttagggaaaaagcgtatctgcaggattatcacgaaagatttcccccagtattttgcagtggtttcccggattaagcaggaaagcaaccagattggtcctgaaggtggaattctgagcagcaccacagtgccccttgttcaagcatctttcccagagggtgccctaactaaaagaattcgagtgggcctccaggcccagcctgttccagatgaaattgtgaaaaagatccttggaaacaaagcaacttttagcccaattgtcactgtggaaccaagaagacggaaattccataaaccaatcacaatgaccattccggtgcccccgccctcaggagaaggtgtatccaatggatacaaaggggacactacacccaatctgcgtcttctctgtagcattacagggggcacttcgcctgctcagtgggaagacatcacaggaacaactcctttgacgtttataaaagattgtgtctcctttacaaccaatgtttcagccagattttggcttgcagactgccatcaagttttagaaactgtggggttagccacgcaactgtacagagaattgatatgtgttccatatatggccaagtttgttgtttttgccaaaatgaatgatcccgtagaatcttccttgcgatgtttctgcatgacagatgacaaagtggacaaaactttagagcaacaagagaattttgaggaagtcgcaagaagcaaagatattgaggttctggaaggaaaacctatttatgttgattgttatggaaatttggccccacttaccaaaggaggacagcaacttgtttttaacttttattctttcaaagaaaatagactgccattttccatcaagattagagacaccagccaagagccctgtggtcgtctgtcttttctgaaagaaccaaagacaacaaaaggactgcctcaaacagcggtttgcaacttaaatatcactctgccagcacataaaaagattgagaaaacagatagacgacagagcttcgcatccttagctttacgtaagcgctacagctacttgactgagcctggaatgagtccacagagtccatgtgaacggacagatatcaggatggcaatagtagccgatcacctgggacttagttggacagaactggcaagggaactgaatttttcagtggatgaaatcaatcaaatacgtgtggaaaatccaaattctttaatttctcagagcttcatgttattaaaaaaatgggttaccagagacggaaaaaatgccacaactgatgccttaacttcggtcttgacaaaaattaatcgaatagatatagtgacactgctagaaggaccaatatttgattatggaaatatttcaggcaccagaagttttgcagatgagaacaatgttttccatgaccctgttgatggttatccttcccttcaagtggaactggaaacccccacagggttgcactacacaccacctacccctttccagcaagatgattattttagtgatatctctagcatagaatctccccttagaacccctagtagactgagtgatgggctagtgccttcccaggggaacatagagcattccgcagatggacctccagtcgtaactgcagaagacgcttccttagaagacagcaaactggaagactcagtgcctttaacagaaatgcctgaagcagtggatgtagatgagagccagttggagaatgtatgtctgagttggcagaatgagacatcaagtggaaacctagagtcctgcgctcaagctcgaagagtaactggtgggttactagatcgactggatgacagccctgaccagtgtagagattccattacctcatatctcaaaggagaagctggcaaatttgaagcaaatggaagccatacagaaatcactccagaagcaaagacaaaatcttactttccagaatcccaaaatgatgtaggaaaacagagtaccaaggaaactctgaaaccaaaaatacatggatctggtcatgttgaagaaccagcatcaccactagcagcatatcagaaatctctagaagaaaccagcaagcttataatagaagagactaaaccctgtgtgcctgtcagtatgaaaaagatgagtaggacttctccagcagatggcaagccaaggcttagcctccatgaagaagaggggtccagtgggtctgagcaaaagcagggagaaggttttaaggtgaaaacgaagaaagaaatccggcatgtggaaaagaagagccactcgtaacagcgaacggtcagtcaaggatcataagtttttactgccagtattgagaaattcgtggaagaaatgtcagcaggaagtaaaaattcaccgagaagtgtgtgtgtgttcgctgcttccacacattaatggcatgattttttttatgcaaaaagaaaagaaaagaaaaccacccacattttaatttagcatgagccaatttacagagcatggaaatcactttcatttccggattggcgcgtgtgcaattagcaatgcagtgtatatacaagaagccatgctgttaacagtttatctcaagtaatttggtgtcatttacaaaaggaagaaattcctgccatcagaagggacagaaggagatggaatgatcaaatcacagagaaacactaaaattactaaatctacaacagctcgccttatttttcttggacccaaactgtcagggtataaacactatttgtttcttttttaaaacatcgatagttttgctgtaaataataacactgtataaattctaacagaaaaatagaataaaatgttgataaggcactgcctcttagaacacaaacagaatattgcaaatgcatttaacaaataggggtctcaagtgacttcaccctagaagaggagggagggattctgggtgggggtgactcttcactgattcttgtatattagcaattataatgtttgtatatgcaaaactgctagcttgattttaaaaaaaaacaaatctttaaaatctgctgcaaatttaaataattcccaaaatgaggaattctgtagttctgtgaaaaatttttttcttcagaatactaatattttgatgcatgtgtatcaccttattttgattaaatcttttccaattttgcaaacactacagtatactgcaacacaaaagattttatctgtaaacacaaagcccttcatctaatatttgttgctattgccaatttttcaatgaaatgacctaaaaacaacaaaaaaaaataacctatacggtagttgctttagggggtggggggatgctatctgttagtgcttaaaagggggtaaatgcttgccgctttagaggtggatggtgctcataaaaggccccagtcgggggtatttaaaaaggactgaacagaaatccttagctagtagaatggcagcacgctgtaaaattattactgtattgtgtactggctataagatgtagacacctttcagtaagccaatcatttgtaaccattctagcagtgtcatattaggttaataaggctgctgtgttttaaagggcatttttatttgggttttggtgaaattctttaatttgttgattatattcacataaaatcagcattcattgacacatagctctaatgacatatgtatgaaaaaccatacactggatgacctagtcgattatttaagcataaaataaattgtgttaaactcttcaccta

SEQ ID NO: 107332 - DNA, 569 bp, Homo sapiens
  Payload ID: 1067
  Gene Symbol: ANK3
  Gene Name: ankyrin 3, node of Ranvier (ankyrin G)
  ENST ID: ENST00000506635
  CDS Start-End: 354-569
aaagtgctaaagcacccatattatctctggagaaggctgtgttgctttccatgtagatttcaagcattgggacagttgggctgttgttaatttgataggtttagaagcatttcaaaattgatgtgttccaaggctctccaaccaagcaagttatagttcacataacttgctagtttcttacttaagccccaaactgaaatcctgtgtgtgagaaaaccagttttttttttaaatgtctgtttccttcccacatataatttcaagaacagtaatgaagaggtggttcttattttgtaatccatgtccattcaaacaagctgccctcatcgtgggtgaggtgaggtgaagatgcaatgaccggggacacagacaaatatcttgggccacaggaccttaaggaattgggtgatgattccctgcctgcagagggttacatgggctttagtctcggagcgcgttctgccagcctccgctccttcagttcggataggtcttacaccttgaacagaagctcctatgcacgggacagcatgatgattgaagaactccttgtgccatccaaagagcag

SEQ ID NO: 107333 - DNA, 761 bp, Homo sapiens
  Payload ID: 1067
  Gene Symbol: ANK3
  Gene Name: ankyrin 3, node of Ranvier (ankyrin G)
  ENST ID: ENST00000474360
  CDS Start-End: 1-345
actgtcacagagaagcacaaaatgaatgttccagaaacgatgaatgaagttcttgatatgtctgatgatgaagttcgtaaagccaatgcccctgaaatgctcagtgatggcgaatatatctcagatgttgaagaaggtaatagatgcacatggtacaaaattcccaaggtacaagagtttacggtgaaaagtgaagatgcaatgaccggggacacagacaaatatcttgggccacaggaccttaaggaattgggtgatgattccctgcctgcagagggttacatgggctttagtctcggagcgcgttctgccaggtacttcgttgttgctgtctttcatagttaatttaaaacaaccatgatttgtcataaatcaaaatcatgttcatttttcacattatcccaaaatgtgttctttggatgaagatgtgaatttagcgaaatgttctcgacgcaaatacacatgctctgctattttcttttgtggtttgcggttgttaatttcatgtgattgaacatgttaattgtgtgttctttttttttttcccactttgcagtcatgctgccagcacagtagcaaaagagctcactgacaaaactgggagaaccaatctgagtcacatatttcaaaattaagttttgttccatattgaaagaaagtattatttgctaataagtgagaaatatgtgtatagattgttcactattctctgttactgaaataataattcatgattaaaagagagcatttttgaaaaaaaa

SEQ ID NO: 107334 - DNA, 657 bp, Homo sapiens
  Payload ID: 1067
  Gene Symbol: ANK3
  Gene Name: ankyrin 3, node of Ranvier (ankyrin G)
  ENST ID: ENST00000502769
  CDS Start-End: 1-501
agccctgaccagtgtagagattccattacctcatatctcaaaggagaagctggcaaatttgaagcaaatggaagccatacagaaatcactccagaagcaaagacaaaatcttactttccagaatcccaaaatgatgtaggaaaacagagtaccaaggaaactctgaaaccaaaaatacatggatctggtcatgttgaagaaccagcatcaccactagcagcatatcagaaatctctagaagaaaccagcaagcttataatagaagagactaaaccctgtgtgcctgtcagtatgaaaaagatgagtaggacttctccagcagatggcaagccaaggcttagcctccatgaagaagaggggtccagtgggtctgagcaaaaggtcaaaagtccgggtgcggctcctacacggatgactgcctgctgttataagcagggagaaggttttaaggtgaaaacgaagaaagaaatccggcatgtggaaaagaagagccactcgtaacagcgaacggtcagtcaaggatcataagtttttactgccagtattgagaaattcgtggaagaaatgtcagcaggaagtaaaaattcaccgagaagtgtgtgtgtgttcgctgcttccacacattaatggcatgattttttttatgcaaaaagaaaa

SEQ ID NO: 107335 - DNA, 587 bp, Homo sapiens
  Payload ID: 1067
  Gene Symbol: ANK3
  Gene Name: ankyrin 3, node of Ranvier (ankyrin G)
  ENST ID: ENST00000467420
  CDS Start-End: 1-587
tttcaagccccattcattctgggtttctggttagctttatggtggacgcgagagggggctccatgagaggaagccgtcatcacgggatgagaatcatcattcctccacgcaagtgtacggcccccactcgaatcacctgccgtttggtaaagagacataaactggccaacccaccccccatggtggaaggagagggattagccagtaggctggtagaaatgggtcctgcaggggcacaatttttaggtaaactgcatcttcctaccaatcctccccctgtaaatgagggtgagagcttggttagccgaatcctgcagcttgggcctcaaggaacaaaatttattggccctgtcatagtggaaatccctcactttgggtccatgagaggaaaagagagagaactcattgttcttcgaagtgaaaatggtgaaacttggaaggagcatcagtttgacagcaaaaatgaagatttaaccgagttacttaatggcatggatgaagaacttgatagcccagaagagttagggaaaaagcgtatctgcaggattatcacgaaagatttcccccagtattttgcagtggtttcc

SEQ ID NO: 107336 - DNA, 5792 bp, Homo sapiens
  Payload ID: 1067
  Gene Symbol: ANK3
  Gene Name: ankyrin 3, node of Ranvier (ankyrin G)
  Uniprot ID: Q12955
  ENST ID: ENST00000503366
  CDS Start-End: 137-5743
aagcagcggctgctttgcctggggagcacccgtaaatggactttggtctcaatgctttgactctttgccgtggttttggatgttggaataccggcggtgatctgtcttttataaactcacctgatttaaaggaaagatgagtgaagaaccaaaggagaaaaatgcaaaacctgctcataggaaaaggaaaggaaaaaagtctgatgccaatgcaagttacttaagagcagctcgagctggacaccttgaaaaggccctcgactacataaaaaatggagttgacatcaacatttgcaatcagaatgggttgaacgctctccaccttgcttccaaagaaggccatgtagaggttgtttctgagctgctgcagagagaagccaatgtggatgcagctacaaagaaaggaaacacagcattgcacatcgcatctttggctgggcaagcagaggtggtaaaagtcttggttacaaatggagccaatgtcaatgcacaatctcagaatggtttcacgccattgtatatggcagcccaggaaaatcacctggaagttgtcaagtttcttcttgacaatggtgcaagccagagcctagccacagaggatggcttcacaccattggcagtggctttgcaacaaggtcacgaccaagtcgtttcgctcctgctagagaatgacaccaaaggaaaagtgcgtctcccagctcttcatatcgcggcccgaaaagacgacacgaaagccgccgccctgctgctgcagaatgacaacaatgcagatgtggaatcaaagagtggcttcactccgctccacatagctgctcactatggaaatatcaatgtagccacgttgctgttaaaccgagcggctgctgtggatttcaccgcaaggaatgacatcactcctttacatgttgcatcaaaaagaggaaatgcaaatatggtaaaactattgctcgatcgaggagctaaaatcgatgccaaaaccagggatggtctgacaccactgcactgtggagcaaggagtggccacgagcaggtggtagaaatgttgcttgatcgagctgcccccattctttcaaaaaccaagaatggattatctccattgcacatggccacacaaggggatcatttaaactgcgtccagcttctcctccagcataatgtacccgtggatgatgtcaccaatgactacctgactgccctacacgtggctgcccactgtggccattacaaagttgccaaggttctcttggataagaaagctaaccccaatgccaaagccctgaatggctttacccctcttcatattgcctgcaagaagaatcgaattaaagtaatggaactccttctgaaacacggtgcatccatccaagctgtaaccgagtcgggccttaccccaatccatgttgctgccttcatggggcatgtaaatattgtatcacaactaatgcatcatggagcctcaccaaacaccaccaatgtgagaggagaaacagcactgcacatggcagctcgctccggccaagctgaagttgtgcggtatctggtacaagacggagctcaggtagaagctaaagctaaggatgaccaaacaccactccacatttcagcccgactggggaaagcagacatagtacaacagctgttgcagcaaggggcatctccaaatgcagccacaacttctgggtacaccccacttcacctttccgcccgagaggggcatgaggatgtggccgcgttccttttggatcatggagcgtctttatctataacaacaaagaaaggatttactcctcttcatgtggcagcaaaatatggaaagcttgaagtcgccaatctcctgctacagaaaagtgcatctccagatgctgctgggaagagcgggctaacaccactgcatgtagctgcacattacgataatcagaaagtggcccttctgcttttggaccaaggagcctcacctcacgcagccgcaaagaatggttatacgccactgcacatcgctgccaaaaagaaccagatggacatagcgacaactctgctggaatatggtgctgatgccaacgcagttacccggcaaggaattgcttccgtccatctcgcagctcaggaagggcacgtggacatggtgtcgctgctcctcggtagaaatgcgaatgtgaacctgagcaataagagcggcctgaccccactccatttggctgctcaagaagatcgagtgaatgtggcagaagtcctcgtaaaccaaggggctcatgtggacgcccagacaaagatgggatacacaccactgcatgtgggctgccactatggaaatatcaagattgttaatttcctgctccagcattctgcaaaagttaatgccaaaacaaagaatgggtatacgccattacatcaagcagcacagcaggggcatacgcatataataaatgtcttacttcagaacaacgcctcccccaatgaactcactgtgaatgggaatactgcccttggcattgcccggcgcctcggctacatctcagtagtggacaccctgaagatagtgaccgaagagaccatgaccacaactactgtcacagagaagcacaaaatgaatgttccagaaacgatgaatgaagttcttgatatgtctgatgatgaagttcgtaaagccaatgcccctgaaatgctcagtgatggcgaatatatctcagatgttgaagaaggtaatagatgcacatggtacaaaattcccaaggtacaagagtttacggtgaaaagtgaagatgcaatgaccggggacacagacaaatatcttgggccacaggaccttaaggaattgggtgatgattccctgcctgcagagggttacatgggctttagtctcggagcgcgttctgccagcctccgctccttcagttcggataggtcttacaccttgaacagaagctcctatgcacgggacagcatgatgattgaagaactccttgtgccatccaaagagcagcatctaacattcacaagggaatttgattcagattctcttagacattacagctgggctgcagacaccttagacaatgtcaatcttgtttcaagccccattcattctgggtttctggttagctttatggtggacgcgagagggggctccatgagaggaagccgtcatcacgggatgagaatcatcattcctccacgcaagtgtacggcccccactcgaatcacctgccgtttggtaaagagacataaactggccaacccaccccccatggtggaaggagagggattagccagtaggctggtagaaatgggtcctgcaggggcacaatttttaggccctgtcatagtggaaatccctcactttgggtccatgagaggaaaagagagagaactcattgttcttcgaagtgaaaatggtgaaacttggaaggagcatcagtttgacagcaaaaatgaagatttaaccgagttacttaatggcatggatgaagaacttgatagcccagaagagttagggaaaaagcgtatctgcaggattatcacgaaagatttcccccagtattttgcagtggtttcccggattaagcaggaaagcaaccagattggtcctgaaggtggaattctgagcagcaccacagtgccccttgttcaagcatctttcccagagggtgccctaactaaaagaattcgagtgggcctccaggcccagcctgttccagatgaaattgtgaaaaagatccttggaaacaaagcaacttttagcccaattgtcactgtggaaccaagaagacggaaattccataaaccaatcacaatgaccattccggtgcccccgccctcaggagaaggtgtatccaatggatacaaaggggacactacacccaatctgcgtcttctctgtagcattacagggggcacttcgcctgctcagtgggaagacatcacaggaacaactcctttgacgtttataaaagattgtgtctcctttacaaccaatgtttcagccagattttggcttgcagactgccatcaagttttagaaactgtggggttagccacgcaactgtacagagaattgatatgtgttccatatatggccaagtttgttgtttttgccaaaatgaatgatcccgtagaatcttccttgcgatgtttctgcatgacagatgacaaagtggacaaaactttagagcaacaagagaattttgaggaagtcgcaagaagcaaagatattgaggttctggaaggaaaacctatttatgttgattgttatggaaatttggccccacttaccaaaggaggacagcaacttgtttttaacttttattctttcaaagaaaatagactgccattttccatcaagattagagacaccagccaagagccctgtggtcgtctgtcttttctgaaagaaccaaagacaacaaaaggactgcctcaaacagcggtttgcaacttaaatatcactctgccagcacataaaaagattgagaaaacagatagacgacagagcttcgcatccttagctttacgtaagcgctacagctacttgactgagcctggaatgagtccacagagtccatgtgaacggacagatatcaggatggcaatagtagccgatcacctgggacttagttggacagaactggcaagggaactgaatttttcagtggatgaaatcaatcaaatacgtgtggaaaatccaaattctttaatttctcagagcttcatgttattaaaaaaatgggttaccagagacggaaaaaatgccacaactgatgccttaacttcggtcttgacaaaaattaatcgaatagatatagtgacactgctagaaggaccaatatttgattatggaaatatttcaggcaccagaagttttgcagatgagaacaatgttttccatgaccctgttgatggttatccttcccttcaagtggaactggaaacccccacagggttgcactacacaccacctacccctttccagcaagatgattattttagtgatatctctagcatagaatctccccttagaacccctagtagactgagtgatgggctagtgccttcccaggggaacatagagcattccgcagatggacctccagtcgtaactgcagaagacgcttccttagaagacagcaaactggaagactcagtgcctttaacagaaatgcctgaagcagtggatgtagatgagagccagttggagaatgtatgtctgagttggcagaatgagacatcaagtggaaacctagagtcctgcgctcaagctcgaagagtaactggtgggttactagatcgactggatgacagccctgaccagtgtagagattccattacctcatatctcaaaggagaagctggcaaatttgaagcaaatggaagccatacagaaatcactccagaagcaaagacaaaatcttactttccagaatcccaaaatgatgtaggaaaacagagtaccaaggaaactctgaaaccaaaaatacatggatctggtcatgttgaagaaccagcatcaccactagcagcatatcagaaatctctagaagaaaccagcaagcttataatagaagagactaaaccctgtgtgcctgtcagtatgaaaaagatgagtaggacttctccagcagatggcaagccaaggcttagcctccatgaagaagaggggtccagtgggtctgagcaaaagcagggagaaggttttaaggtgaaaacgaagaaagaaatccggcatgtggaaaagaagagccactcgtaacagcgaacggtcagtcaaggatcataagtttttactgccagtattgaga

SEQ ID NO: 107337 - DNA, 947 bp, Homo sapiens
  Payload ID: 1067
  Gene Symbol: ANK3
  Gene Name: ankyrin 3, node of Ranvier (ankyrin G)
  ENST ID: ENST00000503925
  CDS Start-End: 129-947
agctcctacctccttcctaggaagtgggggaaacctttacatttccgaaggcagatatttttagatgtgatgctctgtccaaagtgttaactaattgagttatcaggtttcttacttggccacagagaatggcagtggaagagggagagagcttcccagaacaatctgatgccaatgcaagttacttaagagcagctcgagctggacaccttgaaaaggccctcgactacataaaaaatggagttgacatcaacatttgcaatcagaatgggttgaacgctctccaccttgcttccaaagaaggccatgtagaggttgtttctgagctgctgcagagagaagccaatgtggatgcagctacaaagaaaggaaacacagcattgcacatcgcatctttggctgggcaagcagaggtggtaaaagtcttggttacaaatggagccaatgtcaatgcacaatctcagaatggtttcacgccattgtatatggcagcccaggaaaatcacctggaagttgtcaagtttcttcttgacaatggtgcaagccagagcctagccacagaggatggcttcacaccattggcagtggctttgcaacaaggtcacgaccaagtcgtttcgctcctgctagagaatgacaccaaaggaaaagtgcgtctcccagctcttcatatcgcggcccgaaaagacgacacgaaagccgccgccctgctgctgcagaatgacaacaatgcagatgtggaatcaaagagtggcttcactccgctccacatagctgctcactatggaaatatcaatgtagccacgttgctgttaaaccgagcggctgctgtggatttcaccgcaaggaatgacatcactcctttacatgttgcatcaaaaagaggaaatgcaaatatggtaaaactattgctcgatcgaggagctaaaatcgatgccaaaaccagg

SEQ ID NO: 107338 - DNA, 562 bp, Homo sapiens
  Payload ID: 1067
  Gene Symbol: ANK3
  Gene Name: ankyrin 3, node of Ranvier (ankyrin G)
  ENST ID: ENST00000511043
  CDS Start-End: 1-562
agattgagaaaacagatagacgacagagcttcgcatccttagctttacgtaagcgctacagctacttgactgagcctggaatgagtccacagagtccatgtgaacggacagatatcaggatggcaatagtagccgatcacctgggacttagttggacagaactggcaagggaactgaatttttcagtggatgaaatcaatcaaatacgtgtggaaaatccaaattctttaatttctcagagcttcatgttattaaaaaaatgggttaccagagacggaaaaaatgccacaactgatgccttaacttcggtcttgacaaaaattaatcgaatagatatagtgacactgctagaaggaccaatatttgattatggaaatatttcaggcaccagaagttttgcagatgagaacaatgttttccatgaccctgttgatgatggacctccagtcgtaactgcagaagacgcttccttagaagacagcaaactggaagactcagtgcctttaacagaaatgcctgaagcagtggatgtagatgagagccagttggagaatgtatgtct

SEQ ID NO: 107339 - DNA, 544 bp, Homo sapiens
  Payload ID: 1067
  Gene Symbol: ANK3
  Gene Name: ankyrin 3, node of Ranvier (ankyrin G)
  ENST ID: ENST00000513049
  CDS Start-End: 68-544
acaacatgtacacttttgcaatctcttggccagtgaagcttgcgtccagaaagagggtgaagatgcaatgaccggggacacagacaaatatcttgggccacaggaccttaaggaattgggtgatgattccctgcctgcagagggttacatgggctttagtctcggagcgcgttctgccagcctccgctccttcagttcggataggtcttacaccttgaacagaagctcctatgcacgggacagcatgatgattgaagaactccttgtgccatccaaagagcagcatctaacattcacaagggaatttgattcagattctcttagacattacagctgggctgcagacaccttagacaatgtcaatcttgtttcaagccccattcattctgggtttctggttagctttatggtggacgcgagagggggctccatgagaggaagccgtcatcacgggatgagaatcatcattcctccacgcaagtgtacggcccccactcgaatcacctgccgtttggtaaagagacataaactggccaacccaccc

SEQ ID NO: 107340 - DNA, 677 bp, Homo sapiens
  Payload ID: 1067
  Gene Symbol: ANK3
  Gene Name: ankyrin 3, node of Ranvier (ankyrin G)
  ENST ID: ENST00000460468
  CDS Start-End: 1-261
atgaatgttccagaaacgatgaatgaagttcttgatatgtctgatgatgaaggtaatagatgcacatggtacaaaattcccaaggtacaagagtttacggtgaaaagtgaagatgcaatgaccggggacacagacaaatatcttgggccacaggaccttaaggaattgggtgatgattccctgcctgcagagggttacatgggctttagtctcggagcgcgttctgccaggtacttcgttgttgctgtctttcatagttaatttaaaacaaccatgatttgtcataaatcaaaatcatgttcatttttcacattatcccaaaatgtgttctttggatgaagatgtgaatttagcgaaatgttctcgacgcaaatacacatgctctgctattttcttttgtggtttgcggttgttaatttcatgtgattgaacatgttaattgtgtgttctttttttttttcccactttgcagtcatgctgccagcacagtagcaaaagagctcactgacaaaactgggagaaccaatctgagtcacatatttcaaaattaagttttgttccatattgaaagaaagtattatttgctaataagtgagaaatatgtgtatagattgttcactattctctgttactgaaataataattcatgattaaaagagagcatttttgaaaaaaaa

SEQ ID NO: 107341 - DNA, 651 bp, Homo sapiens
  Payload ID: 1067
  Gene Symbol: ANK3
  Gene Name: ankyrin 3, node of Ranvier (ankyrin G)
  ENST ID: ENST00000514197
  CDS Start-End: 1-651
aactggcaagggaactgaatttttcagtggatgaaatcaatcaaatacgtgtggaaaatccaaattctttaatttctcagagcttcatgttattaaaaaaatgggttaccagagacggaaaaaatgccacaactgatgccttaacttcggtcttgacaaaaattaatcgaatagatatagtgacactgctagaaggaccaatatttgattatggaaatatttcaggcaccagaagttttgcagatgagaacaatgttttccatgaccctgttgatgtcagtccaaatgtactgtcttccataggttatccttcccttcaagtggaactggaaacccccacagggttgcactacacaccacctacccctttccagcaagatgattattttagtgatatctctagcatagaatctccccttagaacccctagtagactgagtgatgggctagtgccttcccaggggaacatagagcattccgcagatggacctccagtcgtaactgcagaagacgcttccttagaagacagcaaactggaagactcagtgcctttaacagaaatgcctgaagcagtggatgtagatgagagccagttggagaatgtatgtctgagttggcagaatgagacatcaagtggaaacctagagtcct

SEQ ID NO: 107342 - DNA, 724 bp, Homo sapiens
  Payload ID: 1067
  Gene Symbol: ANK3
  Gene Name: ankyrin 3, node of Ranvier (ankyrin G)
  ENST ID: ENST00000613207
  CDS Start-End: 1-724
aaacagtagctaccaaaggtctagattttgacccttggtctaataaccgaggggatgatgaagtttttgacagtaaatcacgggaagatgaaactaagccatttgggctggcggtagaagaccgctctccagcaacaacccctgatacaacgccagccagaacgccaactgatgaaagtaccccaactagtgagcctaaccccttcccatttcatgaaggaaaaatgtttgagatgactcgcagtggtgcaattgacatgagcaagagggattttgttgaagagaggctccaatttttccagattggtccacagagtccatgtgaacggacagatatcaggatggcaatagtagccgatcacctgggacttagttggacagaactggcaagggaactgaatttttcagtggatgaaatcaatcaaatacgtgtggaaaatccaaattctttaatttctcagagcttcatgttattaaaaaaatgggttaccagagacggaaaaaatgccacaactgatgccttaacttcggtcttgacaaaaattaatcgaatagatatagtgacactgctagaaggaccaatatttgattatggaaatatttcaggcaccagaagttttgcagatgagaacaatgttttccatgaccctgttgatggttatccttcccttcaagtggaactggaaacccccacagggttgcactacacaccacctaccccttt

SEQ ID NO: 107343 - DNA, 4930 bp, Homo sapiens
  Payload ID: 1067
  Gene Symbol: ANK3
  Gene Name: ankyrin 3, node of Ranvier (ankyrin G)
  ENST ID: ENST00000610321
  CDS Start-End: 1-4930
gtttctggttagctttatggtggacgcgagagggggctccatgagaggaagccgtcatcacgggatgagaatcatcattcctccacgcaagtgtacggcccccactcgaatcacctgccgtttggtaaagagacataaactggccaacccaccccccatggtggaaggagagggattagccagtaggctggtagaaatgggtcctgcaggggcacaatttttaggccctgtcatagtggaaatccctcactttgggtccatgagaggaaaagagagagaactcattgttcttcgaagtgaaaatggtgaaacttggaaggagcatcagtttgacagcaaaaatgaagatttaaccgagttacttaatggcatggatgaagaacttgatagcccagaagagttagggaaaaagcgtatctgcaggattatcacgaaagatttcccccagtattttgcagtggtttcccggattaagcaggaaagcaaccagattggtcctgaaggtggaattctgagcagcaccacagtgccccttgttcaagcatctttcccagagggtgccctaactaaaagaattcgagtgggcctccaggcccagcctgttccagatgaaattgtgaaaaagatccttggaaacaaagcaacttttagcccaattgtcactgtggaaccaagaagacggaaattccataaaccaatcacaatgaccattccggtgcccccgccctcaggagaaggtgtatccaatggatacaaaggggacactacacccaatctgcgtcttctctgtagcattacagggggcacttcgcctgctcagtgggaagacatcacaggaacaactcctttgacgtttataaaagattgtgtctcctttacaaccaatgtttcagccagattttggcttgcagactgccatcaagttttagaaactgtggggttagccacgcaactgtacagagaattgatatgtgttccatatatggccaagtttgttgtttttgccaaaatgaatgatcccgtagaatcttccttgcgatgtttctgcatgacagatgacaaagtggacaaaactttagagcaacaagagaattttgaggaagtcgcaagaagcaaagatattgaggttctggaaggaaaacctatttatgttgattgttatggaaatttggccccacttaccaaaggaggacagcaacttgtttttaacttttattctttcaaagaaaatagactgccattttccatcaagattagagacaccagccaagagccctgtggtcgtctgtcttttctgaaagaaccaaagacaacaaaaggactgcctcaaacagcggtttgcaacttaaatatcactctgccagcacataaaaagattgagaaaacagatagacgacagagcttcgcatccttagctttacgtaagcgctacagctacttgactgagcctggaatgaaaacagttgaacggagtacaggagcaacaagatccctccccaccacttactcatacaagccattcttttctacaagaccataccagtcctggacaacagctccgattacagtgcctgggccagccaagtcaggcttcacttccttatcaagttcttcctctaatacgccatcagcttctccgttaaaatcaatatggtctgtttcgacaccttctccaatcaaatccacattaggcgcgtcaactacatcttcagttaaatccattagtgacgtggcatctccaattagatcctttcggacaatgtcttcgccgataaaaactgtggtgtcacaatctccatacaatatccaagtttcctctggtaccctggctagagctccagcagtcacggaagctacgcccttaaaagggctggcatccaattctacgttttcctctcgaacctctccagtgactacagcagggtctcttttggagaggtcatcaattactatgacaccccctgcctcccccaaatcaaacattaatatgtattcctcaagtttgccatttaagtcaattattacatcagcagcaccgctaatatcttcacctttaaagtcagtggtgtctccagttaaatcagcagttgatgtcatttcatcagccaaaattacaatggcatcttctctctcatcacctgtgaagcagatgcctggacatgcagaggtagcattagtcaatggatctatttcccctctaaaatatccatcatcctcaactttaattaatggatgcaaagccactgccacgttacaggaaaaaatttcttctgctacaaactctgtgagctctgtggtcagtgcagccactgacacagttgagaaagtgttttctaccacgactgcaatgccattttccccactcaggtcatatgtttctgcagcaccatcagcttttcagtctctaagaactccttccgcaagtgcactctatacatcccttgggtcgtcaatatctgcaactacctcatctgtaacttcatcaattataacagtgccagtatactctgtagtcaatgttttgccagaaccagcattaaagaaacttccagactctaattcatttacaaaatcagcagcagccttgctgtcacccattaaaacattgactacggagacacatcctcagcctcacttcagtcgaacttcatctccagttaagtcatctttgttccttgcaccctctgcccttaagttgtctacaccatcttctttatcttccagtcaggagatactaaaagatgtagctgaaatgaaagaggacctaatgcggatgaccgcaatactacagacagatgtgcctgaggagaagccattccaacctgaactcccaaaggaagggagaatagatgatgaagaacctttcaaaattgtagagaaagtaaaggaagacttagtgaaagttagtgaaatccttaaaaaggatgtatgtgtagataataaaggatcacccaaatcaccaaagagtgacaaaggacactctcctgaagatgactggatagaatttagttcggaagaaatccgggaagccagacaacaagctgctgcgagccagtctccatctctgccagagagagtgcaagtaaaagcaaaagccgcctccgaaaaggattataacttgaccaaagttattgattacctaacaaatgatattgggagtagttcactgacaaacttaaaatacaagtttgaggatgcaaagaaggatggtgaggagagacagaaaagagttttaaaaccagcaattgctttgcaggaacacaaactcaaaatgcctccagcctccatgaggacttccacctctgagaaagaattgtgtaaaatggctgattccttttttggaacagatactattttagagtctcctgatgacttttctcaacacgaccaagataaaagtcccttgtctgacagtggctttgaaacaagaagtgaaaagacaccttcagccccacaaagcgctgaaagcactggtcctaaaccactttttcatgaagttcccatccctcctgtcattacagaaacaagaactgaagtggttcatgttatcaggagctatgatccctcagctggggatgttccccagacccaaccagaggagcctgtgtcacctaaaccttcacctacttttatggaattggaaccaaagcccaccacctctagtattaaagaaaaggttaaagcatttcaaatgaaagccagtagtgaagaagatgaccacaatcgggttttaagcaaaggcatgcgtgttaaagaagagactcacataaccacaaccaccagaatggtttatcattctccaccaggcggtgaaggtgcatctgaaagaattgaagaaaccatgtcagtccatgacatcatgaaggcctttcagtccgggcgggatccttccaaagaactggcaggtctgtttgaacataagtcggcagtgtctccagatgttcacaagtctgctgctgaaacctcagcccagcatgcagagaaggacaaccaaatgaaacccaaactggagcgtataatagaagtccacatcgaaaaaggtccacagagtccatgtgaacggacagatatcaggatggcaatagtagccgatcacctgggacttagttggacagaactggcaagggaactgaatttttcagtggatgaaatcaatcaaatacgtgtggaaaatccaaattctttaatttctcagagcttcatgttattaaaaaaatgggttaccagagacggaaaaaatgccacaactgatgccttaacttcggtcttgacaaaaattaatcgaatagatatagtgacactgctagaaggaccaatatttgattatggaaatatttcaggcaccagaagttttgcagatgagaacaatgttttccatgaccctgttgatggttggcagaatgagacatcaagtggaaacctagagtcctgcgctcaagctcgaagagtaactggtgggttactagatcgactggatgacagccctgaccagtgtagagattccattacctcatatctcaaaggagaagctggcaaatttgaagcaaatggaagccatacagaaatcactccagaagcaaagacaaaatcttactttccagaatcccaaaatgatgtaggaaaacagagtaccaaggaaactctgaaaccaaaaatacatggatctggtcatgttgaagaaccagcatcaccactagcagcatatcagaaatctctagaagaaaccagcaagcttataatagaagagactaaaccctgtgtgcctgtcagtatgaaaaagatgagtaggacttctccagcagatggcaagccaaggcttagcctccatgaagaagaggggtccagtgggtctgagcaaaagcagggagaaggttttaaggtgaaaacgaagaaagaaatccggcatgtggaaaagaagagccactcgtaa

SEQ ID NO: 107344 - DNA, 3166 bp, Homo sapiens
  Payload ID: 1067
  Gene Symbol: ANK3
  Gene Name: ankyrin 3, node of Ranvier (ankyrin G)
  ENST ID: ENST00000621739
  CDS Start-End: 1-2606
tagacctcccagatgaaagtgtatctgtgcaaaaagattttatggtattaaaaaccaaagatgagcatgcccaaagcaacgaaattgttgtaaatgattctggctctgataatgtgaaaaaacagagaactgaaatgtcaagtaaagcaatgcctgactctttttctgagcagcaggctaaagacttggcatgtcatataacctcagatttagcaactaggggaccatgggacaaaaaggtctttagaacatgggagagttcgggagccactaacaataagtctcagaaagaaaaactttcgcatgtacttgttcatgatgtaagagagaatcacattggtcaccctgagagtaaaagtgttgatcaaaagaatgaatttatgtctgtgactgagagagaacgcaaattgttaacaaacggctctctctcagaaattaaagaaatgactgtaaaatctccctccaaaaaagtcttatatagggaatatgttgtgaaagaaggggaccatccaggcggattgcttgatcagccttccaggaggagcgagagctcagcagtgtcacacattcccgtcagagttgctgatgagaggagaatgctgtcttctaatattcccgatggtttttgtgaacagtcggcatttccaaaacatgaactatcacaaaaattgtcccagtcaagcatgagtaaagagacagttgagacacagcactttaattctatagaagatgaaaaagttacctattcagaaatcagcaaagtttccaaacaccagagttatgtaggtttatgcccacctctcgaggaaaccgaaacctcccccaccaaatctcctgattctttagagtttagcccaggaaaggaatctccctctagtgatgtattcgaccacagtcccattgatggattggaaaaactcgcaccactagcccagacagagggagggaaagagataaaaactttacccgtttatgtcagttttgtacaagtggggaagcaatatgaaaaggagatacaacaaggaggtgtaaaaaaaatcataagtcaggaatgtaagacagtacaagaaaccagggggaccttttatacaactagacagcaaaagcaacctccttctccccaaggtagtccagaagatgatactctagagcaagtatcctttctagacagctctgggaaaagccctttaaccccagaaacacccagttcagaggaagtgagttatgaatttacatctaagacacctgactcgctcatagcttatataccaggcaaacccagcccaattcccgaggtttctgaggagtcagaggaggaggaacaggccaagtcaacctcccttaagcagactacagtggaggaaacagcagttgagcgtgaaatgcctaatgacgtgagcaaagactctaaccaaagacccaaaaataacagagttgcctatattgaatttccccctcctccaccactggatgcggaccagattgagtcagataagaagcatcattatctcccagaaaaagaggttgacatgattgaagtcaatctgcaagatgagcatgacaagtaccagctggctgaacctgtcattagagtgcagccaccttcaccagttcctcccggggcagacgtcagtgattcaagcgatgacgaatctatttatcagccagtcccagttaaaaaatataccttcaaattaaaggaagtggacgatgaacaaaaagaaaaacccaaagcttctgctgaaaaggcttccaaccagaaagaactggaaagtaatggatctggaaaagataatgaatttggccttggccttgattcacctcagaatgaaattgcccagaatgggaacaacgaccagtccatcacagagtgttccattgccaccacagcagagttttctcatgacacggatgccacagagatcgactctctggatggctatgacctgcaagatgaagatgatggcttgacagagagtgattctaaactcccaattcaagccatggaaattaagaaagatatctggaacacagagggcattctgaagccagctgaccgctcttttagccaaagtaaacttgaagttatcgaggaggagggaaaggtgggaccagatgaggacaagccaccttctaaaagttcttcatctgaaaagactcctgataagactgatcagaagtcaggggcccagttcttcacactggaaggcagacatcctgacagatcagtgtttcctgatacttacttcagttacaaagtagatgaagaatttgccactccttttaaaacagtagctaccaaaggtctagattttgacccttggtctaataaccgaggggatgatgaagtttttgacagtaaatcacgggaagatgaaactaagccatttgggctggcggtagaagaccgctctccagcaacaacccctgatacaacgccagccagaacgccaactgatgaaagtaccccaactagtgagcctaaccccttcccatttcatgaaggaaaaatgtttgagatgactcgcagtggtgcaattgacatgagcaagagggattttgttgaagagaggctccaatttttccagattgtggtgagaccttaaagcttgtggaccgcctctctgaagaagaaaaaaagatgcagtccgagttgtccgatgaggaagaaagtacctcaagaaacacgtcgttgtccgagacttcccggggtggccagccttcggttacaacgaagtctgctagagataagaaaacagaggcagcacctttaaaatcaaagagtgaaaaggccggcagtgagaaaaggagcagtccacagagtccatgtgaacggacagatatcaggatggcaatagtagccgatcacctgggacttagttggacagaactggcaagggaactgaatttttcagtggatgaaatcaatcaaatacgtgtggaaaatccaaattctttaatttctcagagcttcatgttattaaaaaaatgggttaccagagacggaaaaaatgccacaactgatgccttaacttcggtcttgacaaaaattaatcgaatagatatagtgacactgctagaaggaccaatatttgattatggaaatatttcaggcaccagaagttttgcagatgagaacaatgttttccatgaccctgttgatggt

SEQ ID NO: 107345 - DNA, 3459 bp, Homo sapiens
  Payload ID: 1067
  Gene Symbol: ANK3
  Gene Name: ankyrin 3, node of Ranvier (ankyrin G)
  ENST ID: ENST00000618374
  CDS Start-End: 309-2744
agctttaaaaggatgtctgcgaagtggtcaaaaggatcttaacctcaattaagtggggttttttaaaaagatttttttgggggcctgaaattttgaaaatcttcgaactctgagtggggaaagatgtataattcctcaattgcctacgaggatatcaagatgctgagaggaattcagcggtggtgaagagagtggatacaaaccagggattggtttccttgagctgttttggaggttgattctaaatcactgcttaaggaattcctggaaacatcaggaaaacatttgatcatccaagcctagtggaaatggctttaccgcagagtgaagatgcaatgaccggggacacagacaaatatcttgggccacaggaccttaaggaattgggtgatgattccctgcctgcagagggttacatgggctttagtctcggagcgcgttctgccagcctccgctccttcagttcggataggtcttacaccttgaacagaagctcctatgcacgggacagcatgatgattgaagaactccttgtgccatccaaagagcagcatctaacattcacaagggaatttgattcagattctcttagacattacagctgggctgcagacaccttagacaatgtcaatcttgtttcaagccccattcattctgggtttctggttagctttatggtggacgcgagagggggctccatgagaggaagccgtcatcacgggatgagaatcatcattcctccacgcaagtgtacggcccccactcgaatcacctgccgtttggtaaagagacataaactggccaacccaccccccatggtggaaggagagggattagccagtaggctggtagaaatgggtcctgcaggggcacaatttttaggccctgtcatagtggaaatccctcactttgggtccatgagaggaaaagagagagaactcattgttcttcgaagtgaaaatggtgaaacttggaaggagcatcagtttgacagcaaaaatgaagatttaaccgagttacttaatggcatggatgaagaacttgatagcccagaagagttagggaaaaagcgtatctgcaggattatcacgaaagatttcccccagtattttgcagtggtttcccggattaagcaggaaagcaaccagattggtcctgaaggtggaattctgagcagcaccacagtgccccttgttcaagcatctttcccagagggtgccctaactaaaagaattcgagtgggcctccaggcccagcctgttccagatgaaattgtgaaaaagatccttggaaacaaagcaacttttagcccaattgtcactgtggaaccaagaagacggaaattccataaaccaatcacaatgaccattccggtgcccccgccctcaggagaaggtgtatccaatggatacaaaggggacactacacccaatctgcgtcttctctgtagcattacagggggcacttcgcctgctcagtgggaagacatcacaggaacaactcctttgacgtttataaaagattgtgtctcctttacaaccaatgtttcagccagattttggcttgcagactgccatcaagttttagaaactgtggggttagccacgcaactgtacagagaattgatatgtgttccatatatggccaagtttgttgtttttgccaaaatgaatgatcccgtagaatcttccttgcgatgtttctgcatgacagatgacaaagtggacaaaactttagagcaacaagagaattttgaggaagtcgcaagaagcaaagatattgaggttctggaaggaaaacctatttatgttgattgttatggaaatttggccccacttaccaaaggaggacagcaacttgtttttaacttttattctttcaaagaaaatagactgccattttccatcaagattagagacaccagccaagagccctgtggtcgtctgtcttttctgaaagaaccaaagacaacaaaaggactgcctcaaacagcggtttgcaacttaaatatcactctgccagcacataaaaagattgagaaaacagatagacgacagagcttcgcatccttagctttacgtaagcgctacagctacttgactgagcctggaatgagtccacagagtccatgtgaacggacagatatcaggatggcaatagtagccgatcacctgggacttagttggacagaactggcaagggaactgaatttttcagtggatgaaatcaatcaaatacgtgtggaaaatccaaattctttaatttctcagagcttcatgttattaaaaaaatgggttaccagagacggaaaaaatgccacaactgatgccttaacttcggtcttgacaaaaattaatcgaatagatatagtgacactgctagaaggaccaatatttgattatggaaatatttcaggcaccagaagttttgcagatgagaacaatgttttccatgaccctgttgatggttatccttcccttcaagtggaactggaaacccccacagggttgcactacacaccacctacccctttccagcaagatgattattttagtgatatctctagcatagaatctccccttagaacccctagtagactgagtgatgggctagtgccttcccaggggaacatagagcattccgcagatggacctccagtcgtaactgcagaagacgcttccttagaagacagcaaactggaagactcagtgcctttaacagaaatgcctgaagcagtgatgtagatgagagccagttggagaatgtatgtctgagttggcagaatgagacatcaagtggaaacctagagtcctgcgctcaagctcgaagagtaactggtgggttactagatcgactggatgacagccctgaccagtgtagagattccattacctcatatctcaaaggagaagctggcaaatttgaagcaaatggaagccatacagaaatcactccagaagcaaagacaaaatcttactttccagaatcccaaaatgatgtaggaaaacagagtaccaaggaaactctgaaaccaaaaatacatggatctggtcatgttgaagaaccagcatcaccactagcagcatatcagaaatctctagaagaaaccagcaagcttataatagaagagactaaaccctgtgtgcctgtcagtatgaaaaagatgagtaggacttctccagcagatggcaagccaaggcttagcctccatgaagaagaggggtccagtgggtctgagcaaaagcagggagaaggttttaaggtgaaaacgaagaaagaaatccggcatgtggaaaagaagagccactcgtaacagcgaacggtcagtcaaggatcataagtttttactgccagtattgagaaattcgtggaagaaatgtcagcaggaagtaaaaattcaccgagaagtgtgtgtgtgttcgctgcttccacacattaatggcatgattttttttatgc

SEQ ID NO: 107346 - DNA, 965 bp, Homo sapiens
  Payload ID: 1067
  Gene Symbol: ANK3
  Gene Name: ankyrin 3, node of Ranvier (ankyrin G)
  ENST ID: ENST00000610901
  CDS Start-End: 1-965
tgggaccagatgaggacaagccaccttctaaaagttcttcatctgaaaagactcctgataagactgatcagaagtcaggggcccagttcttcacactggaaggcagacatcctgacagatcagtgtttcctgatacttacttcagttacaaagtagatgaagaatttgccactccttttaaaacagtagctaccaaaggtctagattttgacccttggtctaataaccgaggggatgatgaagtttttgacagtaaatcacgggaagatgaaactaagccatttgggctggcggtagaagaccgctctccagcaacaacccctgatacaacgccagccagaacgccaactgatgaaagtaccccaactagtgagcctaaccccttcccatttcatgaaggaaaaatgtttgagatgactcgcagtggtgcaattgacatgagcaagagggattttgttgaagagaggctccaatttttccagattggtccacagagtccatgtgaacggacagatatcaggatggcaatagtagccgatcacctgggacttagttggacagaactggcaagggaactgaatttttcagtggatgaaatcaatcaaatacgtgtggaaaatccaaattctttaatttctcagagcttcatgttattaaaaaaatgggttaccagagacggaaaaaatgccacaactgatgccttaacttcggtcttgacaaaaattaatcgaatagatatagtgacactgctagaaggaccaatatttgattatggaaatatttcaggcaccagaagttttgcagatgagaacaatgttttccatgaccctgttgatggttggcagaatgagacatcaagtggaaacctagagtcctgcgctcaagctcgaagagtaactggtgggttactagatcgactggatgacagccctgaccagtgtagagattccattacctcatatctc

SEQ ID NO: 107347 - DNA, 1466 bp, Homo sapiens
  Payload ID: 1067
  Gene Symbol: ANK3
  Gene Name: ankyrin 3, node of Ranvier (ankyrin G)
  ENST ID: ENST00000459732
  CDS Start-End: 1-290
aactggcaagggaactgaatttttcagtggatgaaatcaatcaaatacgtgtggaaaatccaaattctttaatttctcagagcttcatgttattaaaaaaatgggttaccagagacggaaaaaatgccacaactgatgccttaacttcggtcttgacaaaaattaatcgaatagatatagtgacactgctagaaggaccaatatttgattatggaaatatttcaggcaccagaagttttgcagatgagaacaatgttttccatgaccctgttgatggtaatcgaatttagtgttcatatttatttaatcatttgataaaatttgaaagtgcagtcagacaaggcagtcacttaaaagcaactaaactgtgatttgcttgacttagtttctcattttctctgccagagtctgcaaataaacactctgatatcagagcaaacttggtaaatacctctgtttatatacaatataaatatacaatataaatcatgacgtatgaacgcctaaggtatctgaaagagttggtatttctaatatttcataaaagttaaatatctagagaatgcattgcttttgtcacttttaatttttatattaaccctcctaaactagttacctcttttattcgtatataggtaaaacaaacgatgagccatttttatcaaataagcaaggtattgagtaaagtgtaagcatatagtatacaaattgtaaggtaaaatggcaatttactgtgtggcaccaggtatttaaatgtgcactgaaaaaatttaatgtatcattcaagtatgtgctttagttatttagcgttcgttgttattttaacttcatgaatatgctgccatttattctttggaaaaactgcttgatctattgtatatcaaaggcagcataatttctaattcagtcggcatacatgttactaacaacaattcctctttcacattagcttaatttatataatgatcttgtcattttttcctcattatgtaaattgtgctttcttcactgaaatattaagaaaaacataataaatatcttcctatgtttttcaaaatagtcctgtcttaggctcacaaatgaaaatttattcctacaatgaatttttgttctgtttttgagacgaagtctcgctctgtcgcctaagctggagtgcaatggcacgatctcggctcactgcaacctctgcctcctgggttcaagccattctcctgtctcagcctcctgagtagctgggattacaggcatgcaccaccgtgcccagcaaattttttgtatttttagtaaagatgggggtttcaccacgttggccaggctggtctcgaactcttgacctcaagtgatccacccacctctgcctcccaaagtgctggaattacaggcatgagccaccccacccagcctctataatgaattttgagtagaaaatttgatgatggtgtggaggcaggaataagaactaagga

SEQ ID NO: 107348 - DNA, 545 bp, Homo sapiens
  Payload ID: 1067
  Gene Symbol: ANK3
  Gene Name: ankyrin 3, node of Ranvier (ankyrin G)
  ENST ID: ENST00000617800
  CDS Start-End: 1-526
atcaccactagcagcatatcagaaatctctagaagaaaccagcaagcttataatagaagagactaaaccctgtgtgcctgtcagtatgaaaaagatgagtaggacttctccagcagatggcaagccaaggcttagcctccatgaagaagaggggtccagtgggtctgagcaaaaggtcaaaagtccgggtgcggctcctacacggatgactgcctgctgttataaggacttgaaagacagtgagagtgattcaagctcagaggaagagcggagagtcactacccgagttattcgccggcgtttgattataaagggagaggaagcaaaaaacattcctggtgaatctgtcacagaagaacaatttactgatgaagaaggcaacctcatcaccagaaaaatcactcggaaagtattaagacgaattgttatcccacaagagagaaaacgtgatgatgtgcagggagaaggttttaaggtgaaaacgaagaaagaaatccggcatgtggaaaagaagagccactcgtaacagcgaacggtcagtcaag

SEQ ID NO: 107349 - DNA, 681 bp, Homo sapiens
  Payload ID: 1067
  Gene Symbol: ANK3
  Gene Name: ankyrin 3, node of Ranvier (ankyrin G)
  ENST ID: ENST00000612776
  CDS Start-End: 1-536
gttggcagaatgagacatcaagtggaaacctagagtcctgcgctcaagctcgaagagtaactggtgggttactagatcgactggatgacagccctgaccagtgtagagattccattacctcatatctcaaaggagaagctggcaaatttgaagcaaatggaagccatacagaaatcactccagaagcaaagacaaaatcttactttccagaatcccaaaatgatgtaggaaaacagagtaccaaggaaactctgaaaccaaaaatacatggatctggtcatgttgaagaaccagcatcaccactagcagcatatcagaaatctctagaagaaaccagcaagcttataatagaagagactaaaccctgtgtgcctgtcagtatgaaaaagatgagtaggacttctccagcagatggcaagccaaggcttagcctccatgaagaagaggggtccagtgggtctgagcaaaagggagaaggttttaaggtgaaaacgaagaaagaaatccggcatgtggaaaagaagagccactcgtaacagcgaacggtcagtcaaggatcataagtttttactgccagtattgagaaattcgtggaagaaatgtcagcaggaagtaaaaattcaccgagaagtgtgtgtgtgttcgctgcttccacacattaatggcatgattttttttatg

SEQ ID NO: 107350 - DNA, 604 bp, Homo sapiens
  Payload ID: 1067
  Gene Symbol: ANK3
  Gene Name: ankyrin 3, node of Ranvier (ankyrin G)
  ENST ID: ENST00000618080
  CDS Start-End: 1-604
gtgaagatgcaatgaccggggacacagacaaatatcttgggccacaggaccttaaggaattgggtgatgattccctgcctgcagagggttacatgggctttagtctcggagcgcgttctgccagtcccaagataagcctccgctccttcagttcggataggtcttacaccttgaacagaagctcctatgcacgggacagcatgatgattgaagaactccttgtgccatccaaagagcagcatctaacattcacaagggaatttgattcagattctcttagacattacagctgggctgcagacaccttagacaatgtcaatcttgtttcaagccccattcattctggctattcttctccacttcctcagtatgattcaaggtttctggttagctttatggtggacgcgagagggggctccatgagaggaagccgtcatcacgggatgagaatcatcattcctccacgcaagtgtacggcccccactcgaatcacctgccgtttggtaaagagacataaactggccaacccaccccccatggtggaaggagagggattagccagtaggctggtagaaatgggtcctgcaggggcacaatttttagg

SEQ ID NO: 107351 - DNA, 2939 bp, Homo sapiens
  Payload ID: 1067
  Gene Symbol: ANK3
  Gene Name: ankyrin 3, node of Ranvier (ankyrin G)
  ENST ID: ENST00000616444
  CDS Start-End: 1-2920
ccctgtcatagtggaaatccctcactttgggtccatgagaggaaaagagagagaactcattgttcttcgaagtgaaaatggtgaaacttggaaggagcatcagtttgacagcaaaaatgaagatttaaccgagttacttaatggcatggatgaagaacttgatagcccagaagagttagggaaaaagcgtatctgcaggattatcacgaaagatttcccccagtattttgcagtggtttcccggattaagcaggaaagcaaccagattggtcctgaaggtggaattctgagcagcaccacagtgccccttgttcaagcatctttcccagagggtgccctaactaaaagaattcgagtgggcctccaggcccagcctgttccagatgaaattgtgaaaaagatccttggaaacaaagcaacttttagcccaattgtcactgtggaaccaagaagacggaaattccataaaccaatcacaatgaccattccggtgcccccgccctcaggagaaggtgtatccaatggatacaaaggggacactacacccaatctgcgtcttctctgtagcattacagggggcacttcgcctgctcagtgggaagacatcacaggaacaactcctttgacgtttataaaagattgtgtctcctttacaaccaatgtttcagccagattttggcttgcagactgccatcaagttttagaaactgtggggttagccacgcaactgtacagagaattgatatgtgttccatatatggccaagtttgttgtttttgccaaaatgaatgatcccgtagaatcttccttgcgatgtttctgcatgacagatgacaaagtggacaaaactttagagcaacaagagaattttgaggaagtcgcaagaagcaaagatattgaggttctggaaggaaaacctatttatgttgattgttatggaaatttggccccacttaccaaaggaggacagcaacttgtttttaacttttattctttcaaagaaaatagactgccattttccatcaagattagagacaccagccaagagccctgtggtcgtctgtcttttctgaaagaaccaaagacaacaaaaggactgcctcaaacagcggtttgcaacttaaatatcactctgccagcacataaaaaggagacagagtcagatcaagatgatgagattgagaaaacagatagacgacagagcttcgcatccttagctttacgtccacagagtccatgtgaacggacagatatcaggatggcaatagtagccgatcacctgggacttagttggacagaactggcaagggaactgaatttttcagtggatgaaatcaatcaaatacgtgtggaaaatccaaattctttaatttctcagagcttcatgttattaaaaaaatgggttaccagagacggaaaaaatgccacaactgatgccttaacttcggtcttgacaaaaattaatcgaatagatatagtgacactgctagaaggaccaatatttgattatggaaatatttcaggcaccagaagttttgcagatgagaacaatgttttccatgaccctgttgatggttatccttcccttcaagtggaactggaaacccccacagggttgcactacacaccacctacccctttccagcaagatgattattttagtgatatctctagcatagaatctccccttagaacccctagtagactgagtgatgggctagtgccttcccaggggaacatagagcattccgcagatggacctccagtcgtaactgcagaagacgcttccttagaagacagcaaactggaagactcagtgcctttaacagaaatgcctgaagcagtggatgtagatgagagccagttggagaatgtatgtctgagtgagtatcctcaataccttggaaatttggctgggtccccaaaagatgttaaaccagcagagcctagaaaactaggagtaagctctgagcagcaggagaaaggaaaatctggtcctgatgaggagatgatggaagagaaactcaaatctctatttgaggacattcaacttgaagaaggagtagagtctgaggagatgacagaagaaaaagtacaggctattcttaagcgtgttcagcaagcagaactggaaatgtcttcaattacaggttggcagaatgagacatcaagtggaaacctagagtcctgcgctcaagctcgaagagtaactggtgggttactagatcgactggatgacagccctgaccagtgtagagattccattacctcatatctcaaaggagaagctggcaaatttgaagcaaatggaagccatacagaaatcactccagaagcaaagacaaaatcttactttccagaatcccaaaatgatgtaggaaaacagagtaccaaggaaactctgaaaccaaaaatacatggatctggtcatgttgaagaaccagcatcaccactagcagcatatcagaaatctctagaagaaaccagcaagcttataatagaagagactaaaccctgtgtgcctgtcagtatgaaaaagatgagtaggacttctccagcagatggcaagccaaggcttagcctccatgaagaagaggggtccagtgggtctgagcaaaaggacttgaaagacagtgagagtgattcaagctcagaggaagagcggagagtcactacccgagttattcgccggcgtttgattataaagggagaggaagcaaaaaacattcctggtgaatctgtcacagaagaacaatttactgatgaagaaggcaacctcatcaccagaaaaatcactcggaaagtattaagacgaattgttatcccacaagagagaaaacgtgatgatgtgcagggagaaggttttaaggtgaaaacgaagaaagaaatccggcatgtggaaaagaagagccactcgtaacagcgaacggtcagtcaag

SEQ ID NO: 107352 - DNA, 5071 bp, Homo sapiens
  Payload ID: 1067
  Gene Symbol: ANK3
  Gene Name: ankyrin 3, node of Ranvier (ankyrin G)
  ENST ID: ENST00000622427
  CDS Start-End: 383-1735
tctctctctttctctctctctcaccatttccaggctcaaatcactgtggaggaacaagcaacaaagtcttgtcaggaccttatctcagggtaacgattagttaaaaatgaaaggctaaaatattgattttctttagaagaataattgactgtttgatatagagaacacccagtttcttcctgaggaaagctgaacagggctacattagcagcccgcgtctctctgacagcagcaggggctgggtttaagcagcggctgctttgcctggggagcacccgtaaatggactttggtctcaatgctttgactctttgccgtggttttggatgttggaataccggcggtgatctgtcttttataaactcacctgatttaaaggaaagatgagtgaagaaccaaaggagaaaaatgcaaaacctgctcataggaaaaggaaaggaaaaaagtctgatgccaatgcaagttacttaagagcagctcgagctggacaccttgaaaaggccctcgactacataaaaaatggagttgacatcaacatttgcaatcagaatgggttgaacgctctccaccttgcttccaaagaaggccatgtagaggttgtttctgagctgctgcagagagaagccaatgtggatgcagctacaaagaaaggaaacacagcattgcacatcgcatctttggctgggcaagcagaggtggtaaaagtcttggttacaaatggagccaatgtcaatgcacaatctcagaatggtttcacgccattgtatatggcagcccaggaaaatcacctggaagttgtcaagtttcttcttgacaatggtgcaagccagagcctagccacagaggatggcttcacaccattggcagtggctttgcaacaaggtcacgaccaagtcgtttcgctcctgctagagaatgacaccaaaggaaaagtgcgtctcccagctcttcatatcgcggcccgaaaagacgacacgaaagccgccgccctgctgctgcagaatgacaacaatgcagatgtggaatcaaagagtggcttcactccgctccacatagctgctcactatggaaatatcaatgtagccacgttgctgttaaaccgagcggctgctgtggatttcaccgcaaggaatgacatcactcctttacatgttgcatcaaaaagaggaaatgcaaatatggtaaaactattgctcgatcgaggagctaaaatcgatgccaaaaccagggatggtctgacaccactgcactgtggagcaaggagtggccacgagcaggtggtagaaatgttgcttgatcgagctgcccccattctttcaaaaaccaagaatggattatctccattgcacatggccacacaaggggatcatttaaactgcgtccagcttctcctccagcataatgtacccgtggatgatgtcaccaatgactacctgactgccctacacgtggctgcccactgtggccattacaaagttgccaaggttctcttggataagaaagctaaccccaatgccaaagccctgaatggctttacccctcttcatattgcctgcaagaagaatcgaattaaagtaatggaactccttctgaaacacggtgcatccatccaagctgtaaccgagtcgggccttaccccaatccatgttgctgccttcatggggcatgtaaatattgtatcacaactaatgcatcatggagcctcaccaaacaccaccaatgtgagctgcagctaatttactttggctcatgttccccagagaggagaaacagcactgcacatggcagctcgctccggccaagctgaagttgtgcggtatctggtacaagacggagctcaggtagaagctaaagctaaggatgaccaaacaccactccacatttcagcccgactggggaaagcagacatagtacaacagctgttgcagcaaggggcatctccaaatgcagccacaacttctgggtacaccccacttcacctttccgcccgagaggggcatgaggatgtggccgcgttccttttggatcatggagcgtctttatctataacaacaaagaaaggatttactcctcttcatgtggcagcaaaatatggaaagcttgaagtcgccaatctcctgctacagaaaagtgcatctccagatgctgctgggaagagcgggctaacaccactgcatgtagctgcacattacgataatcagaaagtggcccttctgcttttggaccaaggagcctcacctcacgcagccgcaaagaatggttatacgccactgcacatcgctgccaaaaagaaccagatggacatagcgacaactctgctggaatatggtgctgatgccaacgcagttacccggcaaggaattgcttccgtccatctcgcagctcaggaagggcacgtggacatggtgtcgctgctcctcggtagaaatgcgaatgtgaacctgagcaataagagcggcctgaccccactccatttggctgctcaagaagatcgagtgaatgtggcagaagtcctcgtaaaccaaggggctcatgtggacgcccagacaaagatgggatacacaccactgcatgtgggctgccactatggaaatatcaagattgttaatttcctgctccagcattctgcaaaagttaatgccaaaacaaagaatgggtatacgccattacatcaagcagcacagcaggggcatacgcatataataaatgtcttacttcagaacaacgcctcccccaatgaactcactgtgaatgggaatactgcccttggcattgcccggcgcctcggctacatctcagtagtggacaccctgaagatagtgaccgaagagaccatgaccacaactactgtcacagagaagcacaaaatgaatgttccagaaacgatgaatgaagttcttgatatgtctgatgatgaaggtgaagatgcaatgaccggggacacagacaaatatcttgggccacaggaccttaaggaattgggtgatgattccctgcctgcagagggttacatgggctttagtctcggagcgcgttctgccagtcccaagataagttcggataggtcttacaccttgaacagaagctcctatgcacgggacagcatgatgattgaagaactccttgtgccatccaaagagcagcatctaacattcacaagggaatttgattcagattctcttagacattacagctgggctgcagacaccttagacaatgtcaatcttgtttcaagccccattcattctggctattcttctccacttcctcagtatgattcaaggtttctggttagctttatggtggacgcgagagggggctccatgagaggaagccgtcatcacgggatgagaatcatcattcctccacgcaagtgtacggcccccactcgaatcacctgccgtttggtaaagagacataaactggccaacccaccccccatggtggaaggagagggattagccagtaggctggtagaaatgggtcctgcaggggcacaatttttaggccctgtcatagtggaaatccctcactttgggtccatgagaggaaaagagagagaactcattgttcttcgaagtgaaaatggtgaaacttggaaggagcatcagtttgacagcaaaaatgaagatttaaccgagttacttaatggcatggatgaagaacttgatagcccagaagagttagggaaaaagcgtatctgcaggattatcacgaaagatttcccccagtattttgcagtggtttcccggattaagcaggaaagcaaccagattggtcctgaaggtggaattctgagcagcaccacagtgccccttgttcaagcatctttcccagagggtgccctaactaaaagaattcgagtgggcctccaggcccagcctgttccagatgaaattgtgaaaaagatccttggaaacaaagcaacttttagcccaattgtcactgtggaaccaagaagacggaaattccataaaccaatcacaatgaccattccggtgcccccgccctcaggagaaggtgtatccaatggatacaaaggggacactacacccaatctgcgtcttctctgtagcattacagggggcacttcgcctgctcagtgggaagacatcacaggaacaactcctttgacgtttataaaagattgtgtctcctttacaaccaatgtttcagccagattttggcttgcagactgccatcaagttttagaaactgtggggttagccacgcaactgtacagagaattgatatgtgttccatatatggccaagtttgttgtttttgccaaaatgaatgatcccgtagaatcttccttgcgatgtttctgcatgacagatgacaaagtggacaaaactttagagcaacaagagaattttgaggaagtcgcaagaagcaaagatattgaggtaccttgttcacaaaaacaagttcatttcattacgtactccagatatgaggttttattttgtggtcttaatagcactcactataaaataccaagtgcattattgattttacttttactttaaaaaatttgatatagattaatactcaaatttttttatcttttttaatttaatttaatttaatttttttttttttgagacggagccttgctctgttgccgaggctggagtgcagtggcgcggtctcagcttactgcaacctccgcctcctgggttcaaacaattctcctgcctcagcctcccaagtagctcggattacaggcgcctgccaccatgcccagctaattttctgtattttcagtagagatggggtttcaccatgttagccaggctggtctcaaactcctgacctcgtgatccacccaccttggcctcccaaagcgctggcattacatgagtcaccacgcccggccaatactcaaattattttaagtgtctctggggctgtcttagctggttaaaacatagcactaatgaatttaagttatggtctccattttcctgtggccacttgagttacctacttttcagaatcactgtttatacacattactatgattttcctttttcaaacccagtgagcatgtaagtatctaacagtgc

SEQ ID NO: 107353 - DNA, 493 bp, Homo sapiens
  Payload ID: 1067
  Gene Symbol: ANK3
  Gene Name: ankyrin 3, node of Ranvier (ankyrin G)
  ENST ID: ENST00000486349
  CDS Start-End: 176-367
tgctgagaggaattcagcggtggtgaagagagtggatacaaaccagggattggtttccttgagctgttttggaggttgattctaaatcactgcttaaggaattcctggaaacatcaggaaaacatttgatcatccaagcctagtggaaatggctttaccgcagagtgaagatgcaatgaccggggacacagacaaatatcttgggccacaggaccttaaggaattgggtgatgattccctgcctgcagagggttacatgggctttagtctcggagcgcgttctgccagtcatgctgccagcacagtagcaaaagagctcactgacaaaactgggagaaccaatctgagtcacatatttcaaaattaagttttgttccatattgaaagaaagtattatttgctaataagtgagaaatatgtgtatagattgttcactattctctgttactgaaataataattcatgattaaaagagagcatttttgaaaaaaaa

SEQ ID NO: 107354 - DNA, 4391 bp, Homo sapiens
  Payload ID: 1068
  Gene Symbol: ANKAR
  Gene Name: ankyrin and armadillo repeat containing
  Uniprot ID: Q7Z5J8
  ENST ID: ENST00000313581
  CDS Start-End: 65-4369
gataatcttttccttcttattcattgcagaagcttcaaaaaggacacactagatttaattagaaatgttaagattgcccaaaaaaggattacctagatttgagcaagttcaggatgaagacacctacctggaaaatttagcaatacaaagaaatgcatctgctttttttgaaaaatatgatcggagtgaaatacaagagttactaactactgcactagttagctggttgtctgccaaagaggatgtgcgctctcaagtagacctcccatgtggaattatgagtcaaatgaataacgtaggcttctccactgcaatcctactgactcccgtggaccctactgccctcttagactatagagaggtccatcaaatgataagagagttggctattggaatttattgcctaaatcaaatcccttccatcagtttagaagctaattatgatcagagttcttcttgtcaattacctccagcttattatgataccagaattgggcaaattctgatcaatattgactacatgctgaaagcactatggcatggaatatatatgcccaaagaaaaacgagctagattctctgaattgtggcgtgccatcatggacattgatcctgatggaaaacctcaaacaaataaagacattttttcagagtttagttcagcaggtttgactgatattacaaaggatccagactttaatgaaatctatgatgaagacgtgaatgaagatccaacatatgatcccaacagccctgaagaaacagctgtatttatgaaatatgctgaaaatattatgctaaagttaacattcagtaccacacaaattcaacagtatgaaaatgtctttatatttgaaacaggctattggcttactaatgctataaaatataatcaggattatcttgatatctgtacctaccagagactacagcaaagattatatcttcaaaaaaagattattcaaaaacactttgagaagaaaaaagatatcagaagagggataggatacctaaagttaatatgttttctgattccatttctactgagtttaaagaagaaaatgaaagttccatatttaagtagtctgcttcagcctttttcagatgacaaggtcaagacagagcgagaattgcctccatttatttatggaagagattttaaatgccagaattttcactacaaagagaatcaatattttcatgttcatggaggaattgaatttgatatcagcaccccttcaattgagaatgccttggaagattttcagaaaaatttagaaaaaatacgagattgtgctgctaatacatttatagaagattcaggatataaagaatattactcaataccagtcatggaatttcatggaaaaagctactatgtgatctattttgaactagaaactttctatcagcaactatataagacacagtggtggggagccataaatgaaatagtgaacaatctgagactgaaaagacttccactgacagatgctcaattacatgaacaatttaagaaaaagcttggtttcaaaagagctatgaaatgcaagagtattccatttggtatgaagtccgctgttgaaagagggttgtctgcagttttccacacatttagccgtaaaacctcaagctcaacaatcaatgtttcagatgaagcaggttatactatttttcatcatgctgccctgcacaacagagtttctattatatgtcaactgtgcaatgctaacttcaaggtcaaccagaggcgctttgttacgttcagccaaggtccaacacctctacaccttgctgcacaggcttgctcattagaaacaacagtttgtctactgtgttccaaagctgattacacgctttctgaaaaaagaggctggatgccgattcactttgccgctttctatgacaacgtttgcatcattattgctctctgtaggaaggatcctagtttgctagaagctgaggcaacagctgagaatcagtgcactccactgttacttgctgccacttcaggagcactggacactattcaatacctgttttctatcggtgctaactggagaaaaacagatattaaaggaaataatataatccatttatcagtgttaacctttcatacagaggttctcaaatatataataaaattaaatattcctgaactcccagtgtggaaaactttggtagaaatgttacagtgtgaaagctataaacgaaggatgatggccgtcatgtccttggaagtaatttgcttagcaaatgatcaatactggagatgtattttggatgcaggcaccattcctgccttaatcaatctattaaaaagttccaaaataaaactgcagtgcaaaactgttgggttattgagtaatatctcaacccacaaaagtgcagtgcatgctttggtagaagcgggaggcattccatctctaatcaacctactggtttgtgatgagcctgaagtacactctcgctgtgctgtcattctatatgatattgctcaatgtgaaaacaaggatgttattgccaaatataatggaatcccaagcctgataaatctattgaacttaaacatagaaaatgtgctagtaaatgtaatgaactgtatacgggtattgtgtataggaaatgaaaacaatcaaagagctgtgagagaacataaaggcctcccatatcttatcagatttctgagttctgattcagatgtgttgaaggctgtatcttctgctgcaattgctgaggttgggcgtgacaataaggaaattcaggatgctatagctatggagggagcgattcctcctctggtggctctttttaaagggaaacaaattagtgtccaaatgaaaggtgcaatggctgtggaatcactggcaagtcacaacgctcttatacagaaagcatttctggaaaaatcgttaactaaatatcttttaaaactcctaaaggcatttcaaatagatgttaaggaacaaggagctgttgcactttgggccttggcaggacaaacactaaaacaacaaaaatatatggcagaacaaattggatacagctttataataaatatgcttttgtcaccatcagctaaaatgcagtatgttggaggtgaagctgtcatagctctaagtaaggacagcaggatgcatcaaaatcaaatatgtgaagggaatggaattgcaccattggttcgcttactaagaattagtacgattgctgaaggcacacttctcagtgtcatcagagcagtgggatccatttgtattggtgtagcccatacaagcaatcctgtcagtcaacaattggttgtagatgaaaatgcctttccagtacttatccaactactaagaaatcacccttctcctaacattaaggttgaagtggcattttccttggcatgcattgtcctagggaatgatgtgttacagaaagacttacatgaaaatgaaggatttgaatatgctgatgtcctttatcttcttcactcaacagaaaaggatatttgcttaagagcaggctatgcattaacactttttgccttcaataatcgctttcaacaatacttaatattggaaagtggaataatgaccatatctatttttgaacgttttcttgaatcaacagttgaaactgagaaggcaatggcagcatttcagattgttgtactggctaaagtcattagagatatggaccatattactttgtctgcaagaggtgttactattttagttgatagtctgtattcagttcagacttctactattgtcttgacagggaatttaatagcaagcctggctcattctagagctggtatcccagaagcatttaccacattaggaacaatccaacggctctgctatcatttgtactcgggaatagaagaggttcgtgcagcttgttcctctgctcttggctacttaacatacaatgcaaatgctttccgcatcctattaaaagaatgcaggaataaacctaatcagttcattcgtataaaaaataatatcagcagagatgcaagtattaacccagcatttttaaaggaatttcaaatgcaacaaacactggtgggacttccttccttaagtctggagaagaatggaggaccatccataattcctatctttaaaagagggaaggagcaccgaagaaaattaaaacctaaaattcaaccaaaagattctttgactttattacctcctgtaactaacttcatgggactcttcaaagcaacaaaaaagaccaaggattcccataatattttttctttttcatctacaattacatcagatatcacaaatgtatcaagaccaagaatagtgtgtttgaaccaacttgggaaacatgtccagaaagccaacccagagcctgcagaaggctaataaaacattttagaatgaaagg

SEQ ID NO: 107355 - DNA, 3980 bp, Homo sapiens
  Payload ID: 1068
  Gene Symbol: ANKAR
  Gene Name: ankyrin and armadillo repeat containing
  ENST ID: ENST00000433782
  CDS Start-End: 302-3331
ctcacaagaagctgagcagatgctggtgccatgcttgtacagcctgcagaattaagcttcaaaaaggacacactagatttaattagaaatgttaagattgcccaaaaaaggattacctagatttgagcaagttcaggatgaagacacctacctggaaaatttagcaatacaaagaaatgcatctgctttttttgaaaaatatgatcggagtgaaatacaagagttactaactactgcactagttagctggttgtctgccaaagaggatgtgcgctctcaagtagacctcccatgtggaattatgagtcaaatgaataacgtaggcttctccactgcaatcctactgactcccgtggaccctactgccctcttagactatagagaggtccatcaaatgataagagagttggctattggaatttattgcctaaatcaaatcccttccatcagtttagaagctaattatgatcagagttcttcttgtcaattacctccagcttattatgataccagaattgggcaaattctgatcaatattgactacatgctgaaagcactatggcatggaatatatatgcccaaagaaaaacgagctagattctctgaattgtggcgtgccatcatggacattgatcctgatggaaaacctcaaacaaataaagacattttttcagagtttagttcagcaggtttgactgatattacaaaggatccagactttaatgaaatctatgatgaagacgtgaatgaagatccaacatatgatcccaacagccctgaagaaacagctgtatttatgaaatatgctgaaaatattatgctaaagttaacattcagtaccacacaaattcaacagtatgaaaatgtctttatatttgaaacaggctattggcttactaatgctataaaatataatcaggattatcttgatatctgtacctaccagagactacagcaaagattatatcttcaaaaaaagattattcaaaaacactttgagaagaaaaaagatatcagaagagggataggatacctaaagttaatatgttttctgattccatttctactgagtttaaagaagaaaatgaaagttccatatttaagtagtctgcttcagcctttttcagatgacaaggtcaagacagagcgagaattgcctccatttatttatggaagagattttaaatgccagaattttcactacaaagagaatcaatattttcatgttcatggaggaattgaatttgatatcagcaccccttcaattgagaatgccttggaagattttcagaaaaatttagaaaaaatacgagattgtgctgctaatacatttatagaagattcaggatataaagaatattactcaataccagtcatggaatttcatggaaaaagctactatgtgatctattttgaactagaaactttctatcagcaactatataagacacagtggtggggagccataaatgaaatagtgaacaatctgagactgaaaagacttccactgacagatgctcaattacatgaacaatttaagaaaaagcttggtttcaaaagagctatgaaatgcaagagtattccatttggtatgaagtccgctgttgaaagagggttgtctgcagttttccacacatttagccgtaaaacctcaagctcaacaatcaatgtttcagatgaagcaggttatactatttttcatcatgctgccctgcacaacagagtttctattatatgtcaactgtgcaatgctaacttcaaggtcaaccagaggcgctttgttacgttcagccaaggtccaacacctctacaccttgctgcacaggcttgctcattagaaacaacagtttgtctactgtgttccaaagctgattacacgctttctgaaaaaagaggctggatgccgattcactttgccgctttctatgacaacgtttgcatcattattgctctctgtaggaaggatcctagtttgctagaagctgaggcaacagctgagaatcagtgcactccactgttacttgctgccacttcaggagcactggacactattcaatacctgttttctatcggtgctaactggagaaaaacagatattaaaggaaataatataatccatttatcagtgttaacctttcatacagaggttctcaaatatataataaaattaaatattcctgaactcccagtgtggaaaactttggtagaaatgttacagtgtgaaagctataaacgaaggatgatggccgtcatgtccttggaagtaatttgcttagcaaatgatcaatactggagatgtattttggatgcaggcaccattcctgccttaatcaatctattaaaaagttccaaaataaaactgcagtgcaaaactgttgggttattgagtaatatctcaacccacaaaagtgcagtgcatgctttggtagaagcgggaggcattccatctctaatcaacctactggtttgtgatgagcctgaagtacactctcgctgtgctgtcattctatatgatattgctcaatgtgaaaacaaggatgttattgccaaatataatggaatcccaagcctgataaatctattgaacttaaacatagaaaatgtgctagtaaatgtaatgaactgtatacgggtattgtgtataggaaatgaaaacaatcaaagagctgtgagagaacataaaggcctcccatatcttatcagatttctgagttctgattcagatgtgttgaaggctgtatcttctgctgcaattgctgaggttgggcgtgacaataaggaaattcaggatgctatagctatggagggagcgattcctcctctggtggctctttttaaagggaaacaaattagtgtccaaatgaaaggtgcaatggctgtggaatcactggcaagtcacaacgctcttatacagaaagcatttctggaaaaatcgttaactaaatatcttttaaaactcctaaaggcatttcaaatagatgttaaggaacaaggagctgttgcactttgggccttggcaggacaaacactaaaacaacaaaaatatatggcagaacaaattggatacagctttataataaatatgcttttgtcaccatcagctaaaatgcagtatgttggaggtgaagctgtcatagctctaagtaaggacagcaggatgcatcaaaatcaaatatgtgaagggaatggaattgcaccattggttcgcttactaagaattagtacgattgctgaaggcacacttctcagtgtcatcagagcagtgggatccatttgtattggatatttgcttaagagcaggctatgcattaacactttttgccttcaataatcgctttcaacaatacttaatattggaaagtggaataatgaccatatctatttttgaacgttttcttgaatcaacagttgaaactgagaaggcaatggcagcatttcagattgttgtactggctaaagtcattagagatatggaccatattactttgtctgcaagaggtgttactattttagttgatagtctgtattcagttcagacttctactattgtcttgacagggaatttaatagcaagcctggctcattctagagctggtatcccagaagcatttaccacattaggaacaatccaacggctctgctatcatttgtactcgggaatagaagagtctggagaagaatggaggaccatccataattcctatctttaaaagagggaaggagcaccgaagaaaattaaaacctaaaattcaaccaaaagattctttgactttattacctcctgtaactaacttcatgggactcttcaaagcaacaaaaaagaccaaggattcccataatattttttctttttcatctacaattacatcagatatcacaaatgtatcaagaccaagaatagtgtgtttgaaccaacttgggaaacatgtccagaaagccaacccagagcctgcagaaggctaataaaacattttagaatg

SEQ ID NO: 107356 - DNA, 3734 bp, Homo sapiens
  Payload ID: 1068
  Gene Symbol: ANKAR
  Gene Name: ankyrin and armadillo repeat containing
  Uniprot ID: Q7Z5J8
  ENST ID: ENST00000441800
  CDS Start-End: 649-3054
gtattccaactcgggactgcctcaacgcccggcgctgtctcctctgctactctgtttcggtgttttagcagaggcagatagtgagggcggcacagtgcccacggcatgccgctggactaagcgctaagcgggcttgggatgatgcgcacgcggggggtctgagccagccaaggggccgggcgccgcctgggggcgctgcggctgctgcgggacgcaccaggcctagtcgcccgcaggctccgcccgaggagcagcccagccaccccagggcccggaggaccaaccgcttcgacccgcgcccgggcggcggcagtgttggccggcgaggcgaggagggccgggccgccacggtggggcgaaaagccctgaaagttcctctcagttccttccggtgcgcctcccgctcgcccttgcggaggccctgagggcggattcaaggccccgcgagaagccatctgaggcggcgacgactgttctcagccccacgggaacgccgcggacgcagcgtccctctcccggacaagaaaacagccattctagagtttgactgatattacaaaggatccagactttaatgaaatctatgatgaagacgtgaatgaagatccaacatatgatcccaacagccctgaagaaacagctgtatttatgaaatatgctgaaaatattatgctaaagttaacattcagtaccacacaaattcaacagtatgaaaatgtctttatatttgaaacaggctattggcttactaatgctataaaatataatcaggattatcttgatatctgtacctaccagagactacagcaaagattatatcttcaaaaaaagattattcaaaaacactttgagaagaaaaaagatatcagaagagggataggatacctaaagttaatatgttttctgattccatttctactgagtttaaagaagaaaatgaaagttccatatttaagtagtctgcttcagcctttttcagatgacaaggtcaagacagagcgagaattgcctccatttatttatggaagagattttaaatgccagaattttcactacaaagagaatcaatattttcatgttcatggaggaattgaatttgatatcagcaccccttcaattgagaatgccttggaagattttcagaaaaatttagaaaaaatacgagattgtgctgctaatacatttatagaagattcaggatataaagaatattactcaataccagtcatggaatttcatggaaaaagctactatgtgatctattttgaactagaaactttctatcagcaactatataagacacagtggtggggagccataaatgaaatagtgaacaatctgagactgaaaagacttccactgacagatgctcaattacatgaacaatttaagaaaaagcttggtttcaaaagagctatgaaatgcaagagtattccatttggtatgaagtccgctgttgaaagagggttgtctgcagttttccacacatttagccgtaaaacctcaagctcaacaatcaatgtttcagatgaagcaggttatactatttttcatcatgctgccctgcacaacagagtttctattatatgtcaactgtgcaatgctaacttcaaggtcaaccagaggcgctttgttacgttcagccaaggtccaacacctctacaccttgctgcacaggcttgctcattagaaacaacagtttgtctactgtgttccaaagctgattacacgctttctgaaaaaagaggctggatgccgattcactttgccgctttctatgacaacgtttgcatcattattgctctctgtaggaaggatcctagtttgctagaagctgaggcaacagctgagaatcagtgcactccactgttacttgctgccacttcaggagcactggacactattcaatacctgttttctatcggtgctaactggagaaaaacagatattaaaggaaataatataatccatttatcagtgttaacctttcatacagaggttctcaaatatataataaaattaaatattcctgaactcccagtgtggaaaactttggtagaaatgttacagtgtgaaagctataaacgaaggatgatggccgtcatgtccttggaagtaatttgcttagcaaatgatcaatactggagatgtattttggatgcaggcaccattcctgccttaatcaatctattaaaaagttccaaaataaaactgcagtgcaaaactgttgggttattgagtaatatctcaacccacaaaagtgcagtgcatgctttggtagaagcgggaggcattccatctctaatcaacctactggtttgtgatgagcctgaagtacactctcgctgtgctgtcattctatatgatattgctcaatgtgaaaacaaggatgttattgccaaatataatggaatcccaagcctgataaatctattgaacttaaacatagaaaatgtgctagtaaatgtaatgaactgtatacgggtattgtgtataggaaatgaaaacaatcaaagagctgtgagagaacataaaggcctcccatatcttatcagatttctgagttctgattcaggtttatttaacttgttcttaaattcatttgaagatgtgttgaaggctgtatcttctgctgcaattgctgaggttgggcgtgacaataaggaaattcaggatgctatagctatggagggagcgattcctcctctggtggctctttttaaagggaaacaaattagtgtccaaatgaaaggtgcaatggctgtggaatcactggcaagtcacaacgctcttatacagaaagcatttctggaaaaatcgttaactaaatatcttttaaaactcctaaaggcatttcaaatagatgttaaggaacaaggagctgttgcactttgggccttggcaggacaaacactaaaacaacaaaaatatatggcagaacaaattggatacagctttataataaatatgcttttgtcaccatcagctaaaatgcagtatgttggatatttgcttaagagcaggctatgcattaacactttttgccttcaataatcgctttcaacaatacttaatattggaaagtggaataatgaccatatctatttttgaacgttttcttgaatcaacagttgaaactgagaaggcaatggcagcatttcagattgttgtactggctaaagtcattagagatatggaccatattactttgtctgcaagaggtgttactattttagttgatagtctgtattcagttcagacttctactattgtcttgacagggaatttaatagcaagcctggctcattctagagctggtatcccagaagcatttaccacattaggaacaatccaacggctctgctatcatttgtactcgggaatagaagaggttcgtgcagcttgttcctctgctcttggctacttaacatacaatgcaaatgctttccgcatcctattaaaagaatgcaggaataaacctaatcagttcattcgtataaaaaataatatcagcagagatgcaagtattaacccagcatttttaaaggaatttcaaatgcaacaaacactggtgggacttccttccttaagtctggagaagaatggaggaccatccataattcctatctttaaaagagttttcctaggacttcagctgagaccatgaaacatagaagtggagaaaagaaggaatgcattactgaaggaaaatcaataaatacggaagctgggaa

SEQ ID NO: 107357 - DNA, 4410 bp, Homo sapiens
  Payload ID: 1068
  Gene Symbol: ANKAR
  Gene Name: ankyrin and armadillo repeat containing
  Uniprot ID: Q7Z5J8
  ENST ID: ENST00000520309
  CDS Start-End: 89-4393
ctcacaagaagctgagcagatgctggtgccatgcttgtacagcctgcagaattaagcttcaaaaaggacacactagatttaattagaaatgttaagattgcccaaaaaaggattacctagatttgagcaagttcaggatgaagacacctacctggaaaatttagcaatacaaagaaatgcatctgctttttttgaaaaatatgatcggagtgaaatacaagagttactaactactgcactagttagctggttgtctgccaaagaggatgtgcgctctcaagtagacctcccatgtggaattatgagtcaaatgaataacgtaggcttctccactgcaatcctactgactcccgtggaccctactgccctcttagactatagagaggtccatcaaatgataagagagttggctattggaatttattgcctaaatcaaatcccttccatcagtttagaagctaattatgatcagagttcttcttgtcaattacctccagcttattatgataccagaattgggcaaattctgatcaatattgactacatgctgaaagcactatggcatggaatatatatgcccaaagaaaaacgagctagattctctgaattgtggcgtgccatcatggacattgatcctgatggaaaacctcaaacaaataaagacattttttcagagtttagttcagcaggtttgactgatattacaaaggatccagactttaatgaaatctatgatgaagacgtgaatgaagatccaacatatgatcccaacagccctgaagaaacagctgtatttatgaaatatgctgaaaatattatgctaaagttaacattcagtaccacacaaattcaacagtatgaaaatgtctttatatttgaaacaggctattggcttactaatgctataaaatataatcaggattatcttgatatctgtacctaccagagactacagcaaagattatatcttcaaaaaaagattattcaaaaacactttgagaagaaaaaagatatcagaagagggataggatacctaaagttaatatgttttctgattccatttctactgagtttaaagaagaaaatgaaagttccatatttaagtagtctgcttcagcctttttcagatgacaaggtcaagacagagcgagaattgcctccatttatttatggaagagattttaaatgccagaattttcactacaaagagaatcaatattttcatgttcatggaggaattgaatttgatatcagcaccccttcaattgagaatgccttggaagattttcagaaaaatttagaaaaaatacgagattgtgctgctaatacatttatagaagattcaggatataaagaatattactcaataccagtcatggaatttcatggaaaaagctactatgtgatctattttgaactagaaactttctatcagcaactatataagacacagtggtggggagccataaatgaaatagtgaacaatctgagactgaaaagacttccactgacagatgctcaattacatgaacaatttaagaaaaagcttggtttcaaaagagctatgaaatgcaagagtattccatttggtatgaagtccgctgttgaaagagggttgtctgcagttttccacacatttagccgtaaaacctcaagctcaacaatcaatgtttcagatgaagcaggttatactatttttcatcatgctgccctgcacaacagagtttctattatatgtcaactgtgcaatgctaacttcaaggtcaaccagaggcgctttgttacgttcagccaaggtccaacacctctacaccttgctgcacaggcttgctcattagaaacaacagtttgtctactgtgttccaaagctgattacacgctttctgaaaaaagaggctggatgccgattcactttgccgctttctatgacaacgtttgcatcattattgctctctgtaggaaggatcctagtttgctagaagctgaggcaacagctgagaatcagtgcactccactgttacttgctgccacttcaggagcactggacactattcaatacctgttttctatcggtgctaactggagaaaaacagatattaaaggaaataatataatccatttatcagtgttaacctttcatacagaggttctcaaatatataataaaattaaatattcctgaactcccagtgtggaaaactttggtagaaatgttacagtgtgaaagctataaacgaaggatgatggccgtcatgtccttggaagtaatttgcttagcaaatgatcaatactggagatgtattttggatgcaggcaccattcctgccttaatcaatctattaaaaagttccaaaataaaactgcagtgcaaaactgttgggttattgagtaatatctcaacccacaaaagtgcagtgcatgctttggtagaagcgggaggcattccatctctaatcaacctactggtttgtgatgagcctgaagtacactctcgctgtgctgtcattctatatgatattgctcaatgtgaaaacaaggatgttattgccaaatataatggaatcccaagcctgataaatctattgaacttaaacatagaaaatgtgctagtaaatgtaatgaactgtatacgggtattgtgtataggaaatgaaaacaatcaaagagctgtgagagaacataaaggcctcccatatcttatcagatttctgagttctgattcagatgtgttgaaggctgtatcttctgctgcaattgctgaggttgggcgtgacaataaggaaattcaggatgctatagctatggagggagcgattcctcctctggtggctctttttaaagggaaacaaattagtgtccaaatgaaaggtgcaatggctgtggaatcactggcaagtcacaacgctcttatacagaaagcatttctggaaaaatcgttaactaaatatcttttaaaactcctaaaggcatttcaaatagatgttaaggaacaaggagctgttgcactttgggccttggcaggacaaacactaaaacaacaaaaatatatggcagaacaaattggatacagctttataataaatatgcttttgtcaccatcagctaaaatgcagtatgttggaggtgaagctgtcatagctctaagtaaggacagcaggatgcatcaaaatcaaatatgtgaagggaatggaattgcaccattggttcgcttactaagaattagtacgattgctgaaggcacacttctcagtgtcatcagagcagtgggatccatttgtattggtgtagcccatacaagcaatcctgtcagtcaacaattggttgtagatgaaaatgcctttccagtacttatccaactactaagaaatcacccttctcctaacattaaggttgaagtggcattttccttggcatgcattgtcctagggaatgatgtgttacagaaagacttacatgaaaatgaaggatttgaatatgctgatgtcctttatcttcttcactcaacagaaaaggatatttgcttaagagcaggctatgcattaacactttttgccttcaataatcgctttcaacaatacttaatattggaaagtggaataatgaccatatctatttttgaacgttttcttgaatcaacagttgaaactgagaaggcaatggcagcatttcagattgttgtactggctaaagtcattagagatatggaccatattactttgtctgcaagaggtgttactattttagttgatagtctgtattcagttcagacttctactattgtcttgacagggaatttaatagcaagcctggctcattctagagctggtatcccagaagcatttaccacattaggaacaatccaacggctctgctatcatttgtactcgggaatagaagaggttcgtgcagcttgttcctctgctcttggctacttaacatacaatgcaaatgctttccgcatcctattaaaagaatgcaggaataaacctaatcagttcattcgtataaaaaataatatcagcagagatgcaagtattaacccagcatttttaaaggaatttcaaatgcaacaaacactggtgggacttccttccttaagtctggagaagaatggaggaccatccataattcctatctttaaaagagggaaggagcaccgaagaaaattaaaacctaaaattcaaccaaaagattctttgactttattacctcctgtaactaacttcatgggactcttcaaagcaacaaaaaagaccaaggattcccataatattttttctttttcatctacaattacatcagatatcacaaatgtatcaagaccaagaatagtgtgtttgaaccaacttgggaaacatgtccagaaagccaacccagagcctgcagaaggctaataaaacattttagaatg

SEQ ID NO: 107358 - DNA, 1965 bp, Homo sapiens
  Payload ID: 1069
  Gene Symbol: ABTB1
  Gene Name: ankyrin repeat and BTB (POZ) domain containing 1
  Uniprot ID: Q969K4
  ENST ID: ENST00000232744
  CDS Start-End: 87-1523
cggggcggggctgagcgtgtttacatccgccgggtgcgcggcttcgccgcccgaggtcgttcggctcgggtaccatcctccgcgccatggacaccagcgacctgttcgccagctgcaggaagggggatgtgggccgagtgcggtacctgctggagcagcgagacgtggaggtgaatgtgcgggacaagtgggacagcacccccttgtactatgcctgcttgtgtgggcacgaggagctggtactctaccttctggccaatggagcccgctgcgaggccaacaccttcgatggtgagcgctgcctctatggggcactgagtgaccccatccgccgggctctacgcgattacaagcaggtcacggcttcctgcaggaggcgggattactatgacgacttcttgcagcggcttctagagcagggcatccacagtgacgtggtctttgtagtacacgggaagccattccgggtgcatcgctgcgtcctgggtgcacgtagtgcctactttgccaacatgctggacaccaaatggaagggcaagagtgtcgtggttctcaggcacccactgatcaaccccgtggcctttggggccctgctgcagtacctgtacacaggccgcctggacattggcgtagagcatgtgagtgactgtgagcgcctggccaagcaatgccagctgtgggacctgctcagcgacctggaggccaagtgcgagaaggtgtctgagtttgtggcgtctaagccaggcacgtgtgtgaaggtgctgaccatcgagcccccacctgcagacccccgcctccgggaggacatggcgctgctggccgattgtgccctgccccccgagctccgaggtgatctttgggagctgcccttcccttgtcctgacggcttcaacagctgccctgacatctgcttccgagtggctggctgcagcttcctctgccacaaggcctttttctgtggccgcagtgactacttccgagccctgctggatgaccacttccgagagagcgaggagccagcgacctcagggggccccccagccgtcaccctgcatggcatctcacccgacgtcttcactcacgtgctctactacatgtacagcgaccacactgagctgtcccccgaggcagcctatgatgtgctgagcgtcgccgacatgtacctgctgccaggcctgaagaggctgtgcggccgcagcctggctcagatgctagacgaggacactgtggtgggtgtgtggcgcgtggccaagctcttccgcctggcgcggcttgaggaccagtgcactgagtacatggccaaggtcattgagaagctggtggagcgggaggacttcgtggaggcggtgaaggaggaggcagcggctgtggcagcccggcaggagacggactctatcccgctggtggacgacatccgcttccacgtggccagcacggtgcagacctacagcgccatagaggaggcgcagcagcgtctgcgggcactcgaggacctgctcgtgtccatcggtctggactgttgagcccctggctgggcagccccaggggccaggagctctcttggagacaagcatgtgtatgcgtttgtgtgcagctcttcttcctgctccctgcacattgagggcttcatggggggtgcgaggggctcagtggggcttctcttccctccatgagcctggagaccccaggggaggatccatttgggatgagccccctccccccaatgcacaagccagcccccaagaccctgggggtggacaccactcagggaaacctggggtgggggtgggctttggtcttagcactttccttctccagatcccccctacccaccccagtcccaaatccagtcctctggcccttgcctagccctgaattgcttctctaagctggtgttcccatgcacagggccattcaggaagggctgggggagtgtgtgtggcaataaagcttgaaggcaccgtg

SEQ ID NO: 107359 - DNA, 1961 bp, Homo sapiens
  Payload ID: 1069
  Gene Symbol: ABTB1
  Gene Name: ankyrin repeat and BTB (POZ) domain containing 1
  Uniprot ID: Q969K4
  ENST ID: ENST00000453791
  CDS Start-End: 506-1516
gtttacatccgccgggtgcgcggcttcgccgcccgaggtcgttcggctcgggtaccatcctccgcgccatggacaccagcgacctgttcgccagctgcaggaagggggatgtgggccgagtgcgaccatgaacccgtcctgacccaggctctgacctccttcctgcccaggtacctgctggagcagcgagacgtggaggtactatgcctgcttgtgtgggcacgaggagctggtactctaccttctggccaatggagcccgctgcgaggccaacaccttcgatggtgagcgctgcctctatggggcactgagtgaccccatccgccgggctctacgcgattacaagcaggtcacggcttcctgcaggaggcgggattactatgacgacttcttgcagcggcttctagagcagggcatccacagtgacgtggtctttgtagtacacgggaagccattccgggtgcatcgctgcgtcctgggtgcacgtagtgcctactttgccaacatgctggacaccaaatggaagggcaagagtgtcgtggttctcaggcacccactgatcaaccccgtggcctttggggccctgctgcagtacctgtacacaggccgcctggacattggcgtagagcatgtgagtgactgtgagcgcctggccaagcaatgccagctgtgggacctgctcagcgacctggaggccaagtgcgagaaggtgtctgagtttgtggcgtctaagccaggcacgtgtgtgaaggtgctgaccatcgagcccccacctgcagacccccgcctccgggaggacatggcgctgctggccgattgtgccctgccccccgagctccgaggtgatctttgggagctgcccttcccttgtcctgacggcttcaacagctgccctgacatctgcttccgagtggctggctgcagcttcctctgccacaaggcctttttctgtggccgcagtgactacttccgagccctgctggatgaccacttccgagagagcgaggagccagcgacctcagggggccccccagccgtcaccctgcatggcatctcacccgacgtcttcactcacgtgctctactacatgtacagcgaccacactgagctgtcccccgaggcagcctatgatgtgctgagcgtcgccgacatgtacctgctgccaggcctgaagaggctgtgcggccgcagcctggctcagatgctagacgaggacactgtggtgggtgtgtggcgcgtggccaagctcttccgcctggcgcggcttgaggaccagtgcactgagtacatggccaaggtcattgagaagctggtggagcgggaggacttcgtggaggcggtgaaggaggaggcagcggctgtggcagcccggcaggagacggactctatcccgctggtggacgacatccgcttccacgtggccagcacggtgcagacctacagcgccatagaggaggcgcagcagcgtctgcgggcactcgaggacctgctcgtgtccatcggtctggactgttgagcccctggctgggcagccccaggggccaggagctctcttggagacaagcatgtgtatgcgtttgtgtgcagctcttcttcctgctccctgcacattgagggcttcatggggggtgcgaggggctcagtggggcttctcttccctccatgagcctggagaccccaggggaggatccatttgggatgagccccctccccccaatgcacaagccagcccccaagaccctgggggtggacaccactcagggaaacctggggtgggggtgggctttggtcttagcactttccttctccagatcccccctacccaccccagtcccaaatccagtcctctggcccttgcctagccctgaattgcttctctaagctggtgttcccatgcacagggccattcaggaagggctgggggagtgtgtgtggcaataaagcttgaaggcaccgtggga

SEQ ID NO: 107360 - DNA, 2065 bp, Homo sapiens
  Payload ID: 1069
  Gene Symbol: ABTB1
  Gene Name: ankyrin repeat and BTB (POZ) domain containing 1
  Uniprot ID: Q969K4
  ENST ID: ENST00000468137
  CDS Start-End: 617-1627
aaaggtccagcctcggcactggctctggcttctgtccctgtagcccatcgtcccccagcactgatagcacacagtgtctgcctgttcgaccccacctccacatccttgcctgcactttgccttgagtgcctctcctgctctggtctgcctgtcacctgccctcacctgggggaggcttccccataccaaaagggatgttttctctccgttcctttccacgggccttctttctcagaccatgaacccgtcctgacccaggctctgacctccttcctgcccaggtacctgctggagcagcgagacgtggaggtactatgcctgcttgtgtgggcacgaggagctggtactctaccttctggccaatggagcccgctgcgaggccaacaccttcgatggtgagcgctgcctctatggggcactgagtgaccccatccgccgggctctacgcgattacaagcaggtcacggcttcctgcaggaggcgggattactatgacgacttcttgcagcggcttctagagcagggcatccacagtgacgtggtctttgtagtacacgggaagccattccgggtgcatcgctgcgtcctgggtgcacgtagtgcctactttgccaacatgctggacaccaaatggaagggcaagagtgtcgtggttctcaggcacccactgatcaaccccgtggcctttggggccctgctgcagtacctgtacacaggccgcctggacattggcgtagagcatgtgagtgactgtgagcgcctggccaagcaatgccagctgtgggacctgctcagcgacctggaggccaagtgcgagaaggtgtctgagtttgtggcgtctaagccaggcacgtgtgtgaaggtgctgaccatcgagcccccacctgcagacccccgcctccgggaggacatggcgctgctggccgattgtgccctgccccccgagctccgaggtgatctttgggagctgcccttcccttgtcctgacggcttcaacagctgccctgacatctgcttccgagtggctggctgcagcttcctctgccacaaggcctttttctgtggccgcagtgactacttccgagccctgctggatgaccacttccgagagagcgaggagccagcgacctcagggggccccccagccgtcaccctgcatggcatctcacccgacgtcttcactcacgtgctctactacatgtacagcgaccacactgagctgtcccccgaggcagcctatgatgtgctgagcgtcgccgacatgtacctgctgccaggcctgaagaggctgtgcggccgcagcctggctcagatgctagacgaggacactgtggtgggtgtgtggcgcgtggccaagctcttccgcctggcgcggcttgaggaccagtgcactgagtacatggccaaggtcattgagaagctggtggagcgggaggacttcgtggaggcggtgaaggaggaggcagcggctgtggcagcccggcaggagacggactctatcccgctggtggacgacatccgcttccacgtggccagcacggtgcagacctacagcgccatagaggaggcgcagcagcgtctgcgggcactcgaggacctgctcgtgtccatcggtctggactgttgagcccctggctgggcagccccaggggccaggagctctcttggagacaagcatgtgtatgcgtttgtgtgcagctcttcttcctgctccctgcacattgagggcttcatggggggtgcgaggggctcagtggggcttctcttccctccatgagcctggagaccccaggggaggatccatttgggatgagccccctccccccaatgcacaagccagcccccaagaccctgggggtggacaccactcagggaaacctggggtgggggtgggctttggtcttagcactttccttctccagatcccccctacccaccccagtcccaaatccagtcctctggcccttgcctagccctgaattgcttctctaagctggtgttcccatgcacagggccattcaggaagggctgggggagtgtgtgtggcaataaagcttgaaggcac

SEQ ID NO: 107361 - DNA, 563 bp, Homo sapiens
  Payload ID: 1069
  Gene Symbol: ABTB1
  Gene Name: ankyrin repeat and BTB (POZ) domain containing 1
  ENST ID: ENST00000497162
  CDS Start-End: 1-425
agccaggcacgtgtgtgaaggtgctgaccatcgagcccccacctgcagacccccgcctccgggaggacatggcgctgctggccgattgtgccctgccccccgagctccgaggtgatctttgggagctgcccttcccttgtcctgacggcttcaacagctgccctgacatctgcttccgagtggctggctgcagcttcctctgccacaaggcctttttctgtggccgcagtgactacttccgagccctgctggatgaccacttccgagagagcgaggagccagcgacctcagggggccccccagccgtcaccctgcatggcatctcacccgacgtcttcactcacgtgctctactacatgtacagcgaccacactgagcccccgcaggtaggcatggttatctatacctcatggactgggaactagaggcacagggaggtgcagtgacttgcccagggccccacagctagaagtgtcagacccagctgtcccccgaggcagcctatgatgtgctgagcgtcgccgacatgtacctgctgccaggcctgaagaggctgtgcggcc

SEQ ID NO: 107362 - DNA, 1915 bp, Homo sapiens
  Payload ID: 1069
  Gene Symbol: ABTB1
  Gene Name: ankyrin repeat and BTB (POZ) domain containing 1
  ENST ID: ENST00000475042
  CDS Start-End: 69-242
gtttacatccgccgggtgcgcggcttcgccgcccgaggtcgttcggctcgggtaccatcctccgcgccatggacaccagcgacctgttcgccagctgcaggaagggggatgtgggccgagtgcggtacctgctggagcagcgagacgtggaggtactatgcctgcttgtgtgggcacgaggagctggtactctaccttctggccaatggagcccgctgcgaggccaacaccttcgatggtgagcgctgcctctatggggcactgagtgaccccatccgccgggctctacgcgattacaagcaggtcacggcttcctgcaggaggcgggattactatgacgacttcttgcagcggcttctagagcagggcatccacagtgacgtggtctttgtagtacacgggaagccattccgggtgcatcgctgcgtcctgggtgcacgtagtgcctactttgccaacatgctggacaccaaatggaagggcaagagtgtcgtggttctcaggcacccactgatcaaccccgtggcctttggggccctgctgcagtacctgtacacaggccgcctggacattggcgtagagcatgtgagtgactgtgagcgcctggccaagcaatgccagctgtgggacctgctcagcgacctggaggccaagtgcgagaaggtgtctgagtttgtggcgtctaagccaggcacgtgtgtgaaggtgctgaccatcgagcccccacctgcagacccccgcctccgggaggacatggcgctgctggccgattgtgccctgccccccgagctccgaggtgatctttgggagctgcccttcccttgtcctgacggcttcaacagctgccctgacatctgcttccgagtggctggctgcagcttcctctgccacaaggcctttttctgtggccgcagtgactacttccgagccctgctggatgaccacttccgagagagcgaggagccagcgacctcagggggccccccagccgtcaccctgcatggcatctcacccgacgtcttcactcacgtgctctactacatgtacagcgaccacactgagctgtcccccgaggcagcctatgatgtgctgagcgtcgccgacatgtacctgctgccaggcctgaagaggctgtgcggccgcagcctggctcagatgctagacgaggacactgtggtgggtgtgtggcgcgtggccaagctcttccgcctggcgcggcttgaggaccagtgcactgagtacatggccaaggtcattgagaagctggtggagcgggaggacttcgtggaggcggtgaaggaggaggcagcggctgtggcagcccggcaggagacggactctatcccgctggtggacgacatccgcttccacgtggccagcacggtgcagacctacagcgccatagaggaggcgcagcagcgtctgcgggcactcgaggacctgctcgtgtccatcggtctggactgttgagcccctggctgggcagccccaggggccaggagctctcttggagacaagcatgtgtatgcgtttgtgtgcagctcttcttcctgctccctgcacattgagggcttcatggggggtgcgaggggctcagtggggcttctcttccctccatgagcctggagaccccaggggaggatccatttgggatgagccccctccccccaatgcacaagccagcccccaagaccctgggggtggacaccactcagggaaacctggggtgggggtgggctttggtcttagcactttccttctccagatcccccctacccaccccagtcccaaatccagtcctctggcccttgcctagccctgaattgcttctctaagctggtgttcccatgcacagggccattcaggaagggctgggggagtgtgtgtggcaataaagcttgaaggcaccgtggga

SEQ ID NO: 107363 - DNA, 1027 bp, Homo sapiens
  Payload ID: 1069
  Gene Symbol: ABTB1
  Gene Name: ankyrin repeat and BTB (POZ) domain containing 1
  ENST ID: ENST00000483857
  CDS Start-End: 92-265
cggggcggggcggggctgagcgtgtttacatccgccgggtgcgcggcttcgccgcccgaggtcgttcggctcgggtaccatcctccgcgccatggacaccagcgacctgttcgccagctgcaggaagggggatgtgggccgagtgcggtacctgctggagcagcgagacgtggaggtactatgcctgcttgtgtgggcacgaggagctggtactctaccttctggccaatggagcccgctgcgaggccaacaccttcgatggtgagcgctgcctctatggggcactgagtgaccccatccgccgggctctacgcgattacaagcaggtcacggcttcctgcaggaggcgggattactatgacgacttcttgcagcggcttctagagcagggcatccacagtgacgtggtctttgtagtacacgggaagccattccgggtgcatcgctgcgtcctgggtgcacgtagtgcctactttgccaacatgctggacaccaaatggaagggcaagagtgtcgtggttctcaggcacccactgatcaaccccgtggcctttggggccctgctgcagtacctgtacacaggtgaccccctgggtccagggtaggaggagagggagtgggccgtccttctggacagcagtacacctaggtgtggctgggctgacctttcacctctagacacttcatggtccccccggggtggttccagctgcctctcgggttgggttgcaagagagaggactagtgtgcctgctcaggaagagcttgtcccacccacatgctgaggccctcccatctgttccctggggcctgtagaacagcttttgatggggaaaccatggtggcaagtgggcccaggagtcctagtcctgcagccaggtggccaggtgggaggggatcaccctttttctgtgggcctgatgacagctgaggtcccgcaggccctcatcctccccactgcccccaggccgcctggacattggcgtagagcatgtgagtgactgtgagcgcctggccaagcaatgcc

SEQ ID NO: 107364 - DNA, 4902 bp, Homo sapiens
  Payload ID: 1070
  Gene Symbol: ABTB2
  Gene Name: ankyrin repeat and BTB (POZ) domain containing 2
  Uniprot ID: Q8N961
  ENST ID: ENST00000435224
  CDS Start-End: 426-3503
agaagtttgcagagcgctttctcgccggctggtcccggactcgcgctgcgccctgcgccctgcgccgccgcctcctccttctgccgccgccgccctgttctcccgggattccttctctgtggaggactgactctctgcttgtgggaattagaggtggacaagggggagtgccggggggtagcgacggggttctttccagtggcagctgcgagtcgggacgccgggagcgtggggctcctgctggccacggatctcggccaccttcccgcggcctccgggcaggcaatgcggccgccgagccccgcgacgcagagaggaaggagggtggcccggagggcctagagcttgtttctgcccacttgggaaagagggcatggagttgtgagtgcccctcgctcggcgacgccgccctcggcaggctccccatggccgggacgtacagctcgactctgaagacgctggaggacttgaccttggactccgggtatggggccggggactcgtgccgctcgctcagcctctcgtcctccaagtccaactcgcaggcgctcaactcttcggcgcagcagcaccgcggggcggcctggtggtgctactccggctccatgaacagccgccacaacagctgggacacggtgaacacggtgctgcccgaggaccccgaagtggccgacctcttctcgcgctgtccgcggctccccgagctggaggagttcccctggaccgaaggagacgtggcccgggtgctccgcaaaggcgctggcggccggcggctgccccagttctccgccgaggcggtgaggcgcctggccgggctgctccgcagggcactgatccgcgtggcccgcgaggcgcagcgcctgagcgtgctgcacgccaagtgcacccgctttgaggtgcagagcgccgtgcgcctggtgcacagctgggcgctggccgagagctgcgcgctggcagccgtcaaggcgctgtccctgtacagcatgagcgccggcgacgggctgcgccggggcaagtccgcgcgctgcggcctcaccttctcagtgggtcgctttttccgctggatggtggacacccgaatctccgtgcgcatccacgagtacgcagccatctccctcaccgcctgcatggagaacctggtggaggagatccgggccagggtgatggccagccacagccctgatggcggaggggccggaggcggggaggtgtctgctgaggccctggagatggtcatcaacaacgacgccgagctctggggcgtcttgcagccctatgagcatctcatctgcggcaagaacgccaatggtgtcctctccctccccgcatacttcagcccctacaacggcgggtccctgggccatgacgagcgagccgatgcctatgcccagctggagctccgaaccctggagcagtccctcctggccacctgcgtgggcagcatctcggagctgagtgacttggtctcccgtgccatgcaccacatgcaggggcgtcaccccctgtgcccgggtgccagccctgcccgccaggcccgccagccgccacagcccatcacttggtcccccgacgccctccacacgctctactactttctgcggtgtccacagatggagtccatggagaaccccaacctggaccccccgagaatgaccttgaacaatgaacggcccttcatgctgctgccgcccctcatggagtggatgcgcgtggccatcacctacgcagagcaccgccgcagcctcaccgtggacagcggcgacatccggcaggcagcccggctgctgctgcctggtctggactgtgaacctcggcagctcaaacccgaacactgtttcagttccttccggaggctggatgcccgagcagctactgaaaaattcaaccaggacctgggtttccgcatgctcaactgtgggaggacggacctcatcaaccaagccatcgaggccttgggtccggatggggttaacaccatggatgaccagggtatgacgccactgatgtacgcctgcgctgctggggacgaagcgatggtccagatgttgattgatgctggggcaaacttggacatccaggttccaagcaactcccccaggcacccttccatccaccccgacagccggcactggacctcactgacattcgctgtgctgcatggacacatctctgtggtccagttgctgctggatgctggtgcccatgtcgagggctcggcagtgaacggcggcgaggacagctatgcggagacgcccctgcagctggcctctgcggcagggaactatgagctggtcagtttgttgctgagccgaggcgccgaccccctcctcagcatgctggaggcccacggcatgggctcctccctccacgaggacatgaactgcttcagccactcagctgcccacggccacaggaacgtcctgaggaagctcctgacgcagccacagcaggctaaagcggacgtgctgtccctggaggagatcctggccgagggtgtggaggaaagtgatgcgtcgagccagggcagtggcagcgaggggcccgtgcggctgagccggacccgcaccaaggccctacaggaggccatgtactacagcgctgagcacggctacgtggacatcaccatggagctgagggcactgggagtcccctggaagctgcacatctggatcgagtctctgaggacctcgttctcgcagtcgcggtactcggtggtgcagagcctcctgcgggacttcagctccatcagagaggaggagtacaacgaggagctggtgaccgagggcttgcagctcatgttcgacatcctcaagaccagcaaaaacgactccgtcatccagcaactggctaccatcttcacccactgctatggcagcagtcccatccccagcatcccagagatccggaagaccctgccggccaggctagatccacactttttgaacaataaggagatgtcagatgtgaccttcctggtggaaggaaagctgttttatgcacataaagtcctgctggtgacagcttctaacaggttcaagacactaatgaccaataaatcagaacaggatggggacagcagcaagaccatcgagatcagcgacatgaagtaccacatttttcagatgatgatgcagtatctgtactacggaggaacagaatccatggagatccccaccactgacatcctggagctgctgtcagctgccagcctgttccagctggatgccctgcagaggcactgcgagatcctgtgctcccagaccctcagcatggagagtgccgtgaacacctacaaatatgccaagatccacaatgccccagaactggccctgttctgtgagggcttcttcctcaagcacatgaaggccctactggagcaggatgccttccggcagctcatctacggccgcagcagcaaagtgcagggcctggatccactgcaggacctgcagaacaccctggcagagcgcgtgcactctgtctacatcacctcccgggtgtgaggcagggggcggaggctgccgaggccagggcctgtggaggtgccagggcccaccatgtcggggtatggttgtaggccctcttggagccaggttcacggggctgtttcctcctcctcccccagatgtcccccctgtcaccgggcagctcaccctcatctcctctgccctagagctgtttgttcaatcactgatgggcaaaggggagatgtagctaactggtggccctcctccccatctcagtttgcaactcaagggcagccatgcactcccccggggtgtcgctctcccctcctgcaggtcagcagctgatcctgatccacctccgcccaggccctccaagctctactcacccctagggcctcagtaaactcagaccatcccaactggggctcctgggggtacaggaatccttatgaatgtatagaatgcatactgcctaggcccccagtcgtctgcagtaattcaaaagctggtatttttcttcctaaatgtcacatagcaaaggctgcccaaatccccaaacttgttcttcaaaggtttgacaggcttaatgtgggcatccagtggcctgtggacccccccctgccaccacgactgctgccacccggagttcccccattgtctttggtgcctgggcttccagagtccctcccatcaggactaccagcttgctcagttagcagcagagggcagttccccagcttgatggtttctgagctaagtctggcatggaggggcaaggggtaggggatggggtgctgtgtaggaatggcctcagctcttgttttgctgctggttttaggggccaaagtaaatgggtggattctggaacctcaggcctagactaggttgcctttgtgggggcgatgaagcagagtcccctggtcaagtctctcggctcctttaatgtaggattgagagctgggcaaacaggtcccactggggactgtgactcttggagattaaaggacagggcattgatggaaggtaagggccaggagaagaggcctttctgctgtgtcccctcacggccttgccctcgaattctgcaggccctgggctcccctgacacctgtcatatttatggaccagacactggggcagcatcaggcacagtctgtctgggtgcaacttcttcagctgtctggccgcaccttaaaaactatttattcaccaaaagccccaggcatttcagaaggtggcactcaggtcaccctgaaaagcccccaggggcttgcaattctggaaaatattttgactagctgcttggctggatgtacaaagaaataggcattattttattgctgtaatattgtatgatactttaactgtacaataatgttgtcacttactgtaaatgtactatggttttattaacaataaacactcattaacaatg

SEQ ID NO: 107365 - DNA, 3110 bp, Homo sapiens
  Payload ID: 1071
  Gene Symbol: ANKDD1A
  Gene Name: ankyrin repeat and death domain containing 1A
  Uniprot ID: Q495B1
  ENST ID: ENST00000319580
  CDS Start-End: 30-1598
agcgcgcgcaggggctgcggagcggcaggatgcaggaggagctggcgtgggagaccgacggcctgcttcctctggagaggcagctccacgaggccgcccgccagaacaatgtcggcaggatgcaggagctgattgggaggagggttaacaccagggccagaaaccacgtgggcagggtggccctgcactgggctgcaggtgcagggcacgagcaggctgtgcgtctgcttctggagcacgaggctgctgtggacgaggaggatgcggtaggggccctcacagaggcacgtctgtgttttgggatgaatgcgcttctcctgtctgcctggttcggccacttacgaatcctccagatcttggtaaactcaggggccaagatccactgtgagagcaaggatggcctgaccttactgcactgcgcagcccaaaaaggccatgtgcctgtgctggcgttcataatggaggacctggaggatgtggccctggaccacgtagacaagctggggaggacggcgtttcacagggcagctgagcacgggcagctggatgctctggacttcctcgtgggctctggctgtgaccacaatgtcaaagacaaggaggggaacactgcccttcatctggctgctggtcggggccatatggctgtgctgcagcgacttgtggacatcgggctggacctggaggagcagaatgcggaaggtctgactgccctgcattcggctgctggaggatcccaccctgactgtgtgcagctcctcctcagggctgggagcaccgtgaatgccctcacccagaaaaacctaagctgccttcactatgcagccctcagtggctcggaggatgtgtctcgggtcctcatccacgcaggaggctgcgccaacgtggttgatcatcagggtgcctctcctctgcacctcgctgtgaggcacaacttccctgccttggtccggctcctcatcaactccgacagtgacgtgaatgccgtggacaataggcagcagacgccccttcacctggctgcagagcacgcctggcaggacatagcagatatgctcctcattgctggggttgacttaaacctgagagataagcagggaaaaaccgccctggcagtggccgtccgcagcaaccatgtcagcctggtggacatgatcataaaagctgatcgtttctacagatgggagaaggaccaccccagtgatccctctgggaagagcttgtcctttaagcaggaccatcggcaggaaacacagcagctccgttctgtgctgtggcggctggcctccaggtatctgcagccccgtgagtggaagaagctggcatattcctgggagttcacggaggcacatgtcgacgccatcgagcaacagtggacaggcaccaggagctatcaggagcacggccaccgaatgctgctcatttggctgcatggcgtggccacggctggtgagaaccccagcaaagcgctgttcgagggcctcgtggccattggcaggagggacctggctggctggagtacaatggcgagatctcagctcacggcaacctccgcctcccgggttcaaatgattcttgtgcctcagcctcccgagtagctgggattacaggtgcatgccatcacagctggctaatttttgtatttttagtagagatggggtttggccatgatggccaggctggaaaattgaaacataatttcacaattattcctttttccaccttaaataataagagtagaatactttctgtgtttttatcttatacacatgaataaatgctatggcttatcacagttacaatgtgttttctgaaagtaaagattattttaccttgaaattacaaaaattattttcagttttccaaaattctatctttaaacctaaataattcaatttcatggatgcacaaatgtttattgagagtctcatattcatgcttttcttcacagcactataaagttggacttggaaaatttggacagccatttgccattgtaatttttattcttttttctcctgattatttgacaaaacttgtatccacattgtagctgttcatgtgtctgcttctattgcatattgtaaaattattaactacttcccaaaatagtatttctctcagcagatatttctttggtactaccatgtattgtgtaacttttgggaaagtaaggtggcttccctgctctcagtgaagcattttattaaaagaataattataattaaaaaaacacgatacagatcagtgcatatagtatattactaatagtatgctgttaattgtgtaagaaagaaaggaaattagaaaacatatttgcataaataaaagctagacaaaggctaagaaactaatcaggtggtttccctggggtagtaggataatggggaacagtggggctgggaccgggtgggagaaagagttctcagtggttcctttctatacagttttaacttttgaaatgtgtgagagtgttacttactgaaaactgaaaggatatgacatgctggaacaggcaaaactacaaagacagtaaaaagatcagtgatttccaggagctgcaagggcagtgagaggaagggagggatgaggaggtggagcgcaggggatgttagggcagtgaaaggttctgtatgacactgtgatggtgggtacatgacattgggcattggtcaaaacccatagcatgtacagcacaaagcgtttgctctaatgtgagctatggactttagttaatagtaacgtgtcaatattggttcatcagttgtatcaaatgtaccacactgatgccagatgttaataatcggggaaactgtgtgtgctgaagagtacgtgggagctctctgtgctatctgctcaatttttctctaaacctaaaactgttctaaaatagaaagtctgtgaaaaaaaacaaaagtaaagttataaaaggaaaagaaaacagaggctttaaattaaatcatctattccttgggaaaggtattttgtaccatatgggactgaaatcatttatctggatgaattttataaaatgaattttgtaatttttttctgagaaaaaaaagttcttaaatacaataaaattgaaatgttgaaatatatctctcaaa

SEQ ID NO: 107366 - DNA, 1518 bp, Homo sapiens
  Payload ID: 1071
  Gene Symbol: ANKDD1A
  Gene Name: ankyrin repeat and death domain containing 1A
  ENST ID: ENST00000395720
  CDS Start-End: 1-1272
atgaatgcgcttctcctgtctgcctggttcggccacttacgaatcctccagatcttggtaaactcaggggccaagatccactgtgagagcaaggatggcctgaccttactgcactgcgcagcccaaaaaggccatgtgcctgtgctggcgttcataatggaggacctggaggatgtggccctggaccacgtagacaagctggggaggacggcgtttcacagggcagctgagcacgggcagctggatgctctggacttcctcgtgggctctggctgtgaccacaatgtcaaagacaaggaggggaacactgcccttcatctggctgctggtcggggccatatggctgtgctgcagcgacttgtggacatcgggctggacctggaggagcagaatgcggaaggtctgactgccctgcattcggctgctggaggatcccaccctgactgtgtgcagctcctcctcagggctgggagcaccgtgaatgccctcacccagaaaaacctaagctgccttcactatgcagccctcagtggctcggaggatgtgtctcgggtcctcatccacgcaggaggctgcgccaacgtggttgatcatcagggtgcctctcctctgcacctcgctgtgaggcacaacttccctgccttggtccggctcctcatcaactccgacagtgacgtgaatgccgtggacaataggcagcagacgccccttcacctggctgcagagcacgcctggcaggacatagcagatatgctcctcattgctggggttgacttaaacctgagagataagcagggaaaaaccgccctggcagtggccgtccgcagcaaccatgtcagcctggtggacatgatcataaaagctgatcgtttctacagatgggagaaggaccaccccagtgatccctctgggaagagcttgtcctttaagcaggaccatcggcaggaaacacagcagctccgttctgtgctgtggcggctggcctccaggtatctgcagccccgtgagtggaagaagctggcatattcctgggagttcacggaggcacatgtcgacgccatcgagcaacagtggacaggcaccaggagctatcaggagcacggccaccgaatgctgctcatttggctgcatggcgtggccacggctggtgagaaccccagcaaagcgctgttcgagggcctcgtggccattggcaggagggacctggctgaaaatatcaggaagaaagcaaacgcagccccgagtgcccccaggaggtgcacagccatgtaaccggaggggccagaccttcaggcacgtgggacctcagcgtgtggagccacctgaacagaagatgaccatcatttaagggctttttaaaaaatcactgttaacagacctccaggtgattctactgaaatgcacagtcatgcagagcccaggaggcaaatgtttgtacactgatctttttcatgaggatgggtccaagggcctgtaatcccgtccaacaggtatggtccttttgagctcttggcacac

SEQ ID NO: 107367 - DNA, 1250 bp, Homo sapiens
  Payload ID: 1071
  Gene Symbol: ANKDD1A
  Gene Name: ankyrin repeat and death domain containing 1A
  ENST ID: ENST00000395723
  CDS Start-End: 1-1200
atgaatgcgcttctcctgtctgcctggttcggccacttacgaatcctccagatcttggtaaactcaggggccaagatccactgtgagagcaaggatggcctgaccttactgcactgcgcagcccaaaaaggccatgtgcctgtgctggcgttcataatggaggacctggaggatgtggccctggaccacgtagacaagctggggaggacggcgtttcacagggcagctgagcacgggcagctggatgctctggacttcctcgtgggctctggctgtgaccacaatgtcaaagacaaggaggggaacactgcccttcatctggctgctggtcggggccatatggctgtgctgcagcgacttgtggacatcgggctggacctggaggagcagaatgcggaaggtctgactgccctgcattcggctgctggaggatcccaccctgactgtgtgcagctcctcctcagggctgggagcaccgtgaatgccctcacccagaaaaacctaagctgccttcactatgcagccctcagtggctcggaggatgtgtctcgggtcctcatccacgcaggaggctgcgccaacgtggttgatcatcagggtgcctctcctctgcacctcgctgtgaggcacaacttccctgccttggtccggctcctcatcaactccgacagtgacgtgaatgccgtggacaataggcagcagacgccccttcacctggctgcagagcacgcctggcaggacatagcagatatgctcctcattgctggggttgacttaaacctgagagataaggaccaccccagtgatccctctgggaagagcttgtcctttaagcaggaccatcggcaggaaacacagcagctccgttctgtgctgtggcggctggcctccaggtatctgcagccccgtgagtggaagaagctggcatattcctgggagttcacggaggcacatgtcgacgccatcgagcaacagtggacaggcaccaggagctatcaggagcacggccaccgaatgctgctcatttggctgcatggcgtggccacggctggtgagaaccccagcaaagcgctgttcgagggcctcgtggccattggcaggagggacctggctggctggagtacaatggcgagatctcagctcacggcaacctccgcctcccgggttcaaatgattcttgtgcctcagcctcccgagtagctgggattacaggtgcatgccatcacagctggctaatttttgtattttta

SEQ ID NO: 107368 - DNA, 1477 bp, Homo sapiens
  Payload ID: 1071
  Gene Symbol: ANKDD1A
  Gene Name: ankyrin repeat and death domain containing 1A
  ENST ID: ENST00000496660
  CDS Start-End: 54-599
gcggagcggcaggatgcaggaggagctggcgtgggagaccgacggcctttgggatgaatgcgcttctcctgtctgcctggttcggccacttacgaatcctccagatcttggtaaactcaggggccaagatccactgtgagagcaaggatggcctgaccttactgcactgcgcagcccaaaaaggccatgtgcctgtgctggcgttcataatggaggacctggaggatgtggccctggaccacgtagacaagctggggaggacggcgtttcacagggcagctgagcacgggcagctggatgctctggacttcctcgtgggctctggctgtgaccacaatgtcaaagacaaggaggggaacactgcccttcatctggctgctggtcggggccatatggctgtgctgcagcgacttgtggacatcgggctggacctggaggagcagaatgcggaaggtctgactgccctgcattcggctgctggaggatcccaccctgactgtgtgcagctcctcctcagggctgggagcaccgtgaatgccctcacccaggtagccaggccctcccaagactgcggtcggctcttggctgctgagccatagccatgtcggcagtaacggccacagggattcctgaaccctgagtgaatagaggcttcgaggcagcagacaaggttctgatcttggcttctccactgctgagccctgtgacctggagcaagttacttaacctctctgagccttgtttcccaactataaagtgcagtgacatttacttttttacattgttgtgaggattaaatacctaacacagtgcccaggacataatagggcccaacacctcaatacctgttagtgtttttttgttttaatttttttgagatgggtcttactctgtcgcccaggctgaagtgcaatggtgcgatcttggctcactgtaacctccgcctcctgggttcaagcagttttcctgactcagcctcccaagaggctgggactacaggtgtgtgccactacccccggctcatttttgtattttttgggtagagacagggtttcaccatgttggccaggctggtcttgaactcctgacctcaagtgatccacctgcctcagccttccaaagtgttgggattataggcgggatagccattgcacctggccctgttagtgtcttctatttgttgagctcttgatcgttcacaaagccccttcataactgttaccccagaaaaattccacccattttgcagatgagaaaactggagctttgagggcactttctcagggtcacaagctagtacgaggcaaagctgagtctcaaaagccttttcccctgactccagagctcccacccactgatgaagcttttcccctgacagagctggggcttgaggtgtgaccctggatgaacctcttctctctctccccgttgtactcatcagttctgccagtaaaaattctcctctatgacctggaaa

SEQ ID NO: 107369 - DNA, 1280 bp, Homo sapiens
  Payload ID: 1071
  Gene Symbol: ANKDD1A
  Gene Name: ankyrin repeat and death domain containing 1A
  ENST ID: ENST00000483400
  CDS Start-End: 1-402
attgggaggagggttaacaccagggccagaaaccacgtgggcagggtggccctgcactgggctgcaggtgcagggcacgagcaggctgtgcgtctgcttctggagcacgaggctgctgtggacgaggaggatgcggtaggggccctcacagaggaggggaacactgcccttcatctggctgctggtcggggccatatggctgtgctgcagcgacttgtggacatcgggctggacctggaggagcagaatgcggaaggtctgactgccctgcattcggctgctggaggatcccaccctgactgtgtgcagctcctcctcagggctgggagcaccgtgaatgccctcacccaggtagccaggccctcccaagactgcggtcggctcttggctgctgagccatagccatgtcggcagtaacggccacagggattcctgaaccctgagtgaatagaggcttcgaggcagcagacaaggttctgatcttggcttctccactgctgagccctgtgacctggagcaagttacttaacctctctgagccttgtttcccaactataaagtgcagtgacatttacttttttacattgttgtgaggattaaatacctaacacagtgcccaggacataatagggcccaacacctcaatacctgttagtgtttttttgttttaatttttttgagatgggtcttactctgtcgcccaggctgaagtgcaatggtgcgatcttggctcactgtaacctccgcctcctgggttcaagcagttttcctgactcagcctcccaagaggctgggactacaggtgtgtgccactacccccggctcatttttgtattttttgggtagagacagggtttcaccatgttggccaggctggtcttgaactcctgacctcaagtgatccacctgcctcagccttccaaagtgttgggattataggcgggatagccattgcacctggccctgttagtgtcttctatttgttgagctcttgatcgttcacaaagccccttcataactgttaccccagaaaaattccacccattttgcagatgagaaaactggagctttgagggcactttctcagggtcacaagctagtacgaggcaaagctgagtctcaaaagccttttcccctgactccagagctcccacccactgatgaagcttttcccctgacagagctggggcttgaggtgtgaccctggatgaacctcttctctctctccccgttgtactcatcagttctgccagtaaaaattctcctctatgacctggaaa

SEQ ID NO: 107370 - DNA, 1448 bp, Homo sapiens
  Payload ID: 1071
  Gene Symbol: ANKDD1A
  Gene Name: ankyrin repeat and death domain containing 1A
  ENST ID: ENST00000513267
  CDS Start-End: 4-375
aggatgcaggaggagctggcgtgggagaccgacggcctgcttcctctggagaggcagctccacgaggccgcccgccagaacaatgtcggcaggatgcaggagctgattgggaggagggttaacaccagggccagaaaccacgtgggcagggtggccctgcactgggctgcaggtgcagggcacgagcaggctgtgcgtctgcttctggagcacgaggctgctgtggacgaggaggatgcgtttgggatgaatgcgcttctcctgtctgcctggttcggccacttacgaatcctccagatcttggtaaactcaggggccaagatccactgtgagagcaagcccaaaaaggccatgtgcctgtgctggcgttcataatggaggacctggaggatgtggccctggaccacgtagacaagctggggaggacggcgtttcacagggcagctgagcacgggcagctggatgctctggacttcctcgtgggctctggctgtgaccacaatgtcaaagacaaggaggggaacactgcccttcatctggctgctggtcggggccatatggctgtgctgcagcgacttgtggacatcgggctggacctggaggagcagaatgcggaaggtctgactgccctgcattcggctgctggaggatcccaccctgactgtgtgcagctcctcctcagggctgggagcaccgtgaatgccctcacccaggtagccaggccctcccaagactgcggtcggctcttggctgctgagccatagccatgtcggcagtaacggccacagggattcctgaaccctgagtgaatagaggcttcgaggcagcagacaaggttctgatcttggcttctccactgctgagccctgtgacctggagcaagttacttaacctctctgagccttgtttcccaactataaagtgcagtgacatttacttttttacattgttgtgaggattaaatacctaacacagtgcccaggacataatagggcccaacacctcaatacctgttagtgtttttttgttttaatttttttgagatgggtcttactctgtcgcccaggctgaagtgcaatggtgcgatcttggctcactgtaacctccgcctcctgggttcaagcagttttcctgactcagcctcccaagaggctgggactacaggtgtgtgccactacccccggctcatttttgtattttttgggtagagacagggtttcaccatgttggccaggctggtcttgaactcctgacctcaagtgatccacctgcctcagccttccaaagtgttgggattataggcgggatagccattgcacctggccctgttagtgtcttctatttgttgagctcttgatcgttcacaaagccccttcataactgttaccccagaaaaattccacccattttgcagatgagaaaactggagctttgagggcactttctca

SEQ ID NO: 107371 - DNA, 3079 bp, Homo sapiens
  Payload ID: 1071
  Gene Symbol: ANKDD1A
  Gene Name: ankyrin repeat and death domain containing 1A
  ENST ID: ENST00000620154
  CDS Start-End: 1-1272
atgaatgcgcttctcctgtctgcctggttcggccacttacgaatcctccagatcttggtaaactcaggggccaagatccactgtgagagcaaggatggcctgaccttactgcactgcgcagcccaaaaaggccatgtgcctgtgctggcgttcataatggaggacctggaggatgtggccctggaccacgtagacaagctggggaggacggcgtttcacagggcagctgagcacgggcagctggatgctctggacttcctcgtgggctctggctgtgaccacaatgtcaaagacaaggaggggaacactgcccttcatctggctgctggtcggggccatatggctgtgctgcagcgacttgtggacatcgggctggacctggaggagcagaatgcggaaggtctgactgccctgcattcggctgctggaggatcccaccctgactgtgtgcagctcctcctcagggctgggagcaccgtgaatgccctcacccagaaaaacctaagctgccttcactatgcagccctcagtggctcggaggatgtgtctcgggtcctcatccacgcaggaggctgcgccaacgtggttgatcatcagggtgcctctcctctgcacctcgctgtgaggcacaacttccctgccttggtccggctcctcatcaactccgacagtgacgtgaatgccgtggacaataggcagcagacgccccttcacctggctgcagagcacgcctggcaggacatagcagatatgctcctcattgctggggttgacttaaacctgagagataagcagggaaaaaccgccctggcagtggccgtccgcagcaaccatgtcagcctggtggacatgatcataaaagctgatcgtttctacagatgggagaaggaccaccccagtgatccctctgggaagagcttgtcctttaagcaggaccatcggcaggaaacacagcagctccgttctgtgctgtggcggctggcctccaggtatctgcagccccgtgagtggaagaagctggcatattcctgggagttcacggaggcacatgtcgacgccatcgagcaacagtggacaggcaccaggagctatcaggagcacggccaccgaatgctgctcatttggctgcatggcgtggccacggctggtgagaaccccagcaaagcgctgttcgagggcctcgtggccattggcaggagggacctggctgaaaatatcaggaagaaagcaaacgcagccccgagtgcccccaggaggtgcacagccatgtaaccggaggggccagaccttcaggcacgtgggacctcagcgtgtggagccacctgaacagaagatgaccatcatttaagggctttttaaaaaatcactgttaacagacctccaggtgattctactgaaatgcacagtcatgcagagcccaggaggcaaatgtttgtacactgatctttttcatgaggatgggtccaagggcctgtaatcccgtccaacaggctggagtacaatggcgagatctcagctcacggcaacctccgcctcccgggttcaaatgattcttgtgcctcagcctcccgagtagctgggattacaggtgcatgccatcacagctggctaatttttgtatttttagtagagatggggtttggccatgatggccaggctggaaaattgaaacataatttcacaattattcctttttccaccttaaataataagagtagaatactttctgtgtttttatcttatacacatgaataaatgctatggcttatcacagttacaatgtgttttctgaaagtaaagattattttaccttgaaattacaaaaattattttcagttttccaaaattctatctttaaacctaaataattcaatttcatggatgcacaaatgtttattgagagtctcatattcatgcttttcttcacagcactataaagttggacttggaaaatttggacagccatttgccattgtaatttttattcttttttctcctgattatttgacaaaacttgtatccacattgtagctgttcatgtgtctgcttctattgcatattgtaaaattattaactacttcccaaaatagtatttctctcagcagatatttctttggtactaccatgtattgtgtaacttttgggaaagtaaggtggcttccctgctctcagtgaagcattttattaaaagaataattataattaaaaaaacacgatacagatcagtgcatatagtatattactaatagtatgctgttaattgtgtaagaaagaaaggaaattagaaaacatatttgcataaataaaagctagacaaaggctaagaaactaatcaggtggtttccctggggtagtaggataatggggaacagtggggctgggaccgggtgggagaaagagttctcagtggttcctttctatacagttttaacttttgaaatgtgtgagagtgttacttactgaaaactgaaaggatatgacatgctggaacaggcaaaactacaaagacagtaaaaagatcagtgatttccaggagctgcaagggcagtgagaggaagggagggatgaggaggtggagcgcaggggatgttagggcagtgaaaggttctgtatgacactgtgatggtgggtacatgacattgggcattggtcaaaacccatagcatgtacagcacaaagcgtttgctctaatgtgagctatggactttagttaatagtaacgtgtcaatattggttcatcagttgtatcaaatgtaccacactgatgccagatgttaataatcggggaaactgtgtgtgctgaagagtacgtgggagctctctgtgctatctgctcaatttttctctaaacctaaaactgttctaaaatagaaagtctgtgaaaaaaaacaaaagtaaagttataaaaggaaaagaaaacagaggctttaaattaaatcatctattccttgggaaaggtattttgtaccatatgggactgaaatcatttatctggatgaattttataaaatgaattttgtaatttttttctgagaaaaaaaagttcttaaatacaataaaattgaaatgttgaaatata

SEQ ID NO: 107372 - DNA, 2569 bp, Homo sapiens
  Payload ID: 1072
  Gene Symbol: ANKDD1B
  Gene Name: ankyrin repeat and death domain containing 1B
  Uniprot ID: A6NHY2
  ENST ID: ENST00000601380
  CDS Start-End: 177-1763
cagcgaaccgccacaacagagagcggactcgatcctgcgctccggccgggctgacctgcctgcgtccagcccccgcgccctgggcctgcctgggtctggatctgtgtccgagtctgggtctggatctgggtccgagtctgggtctggccctgcgctcagggcccgcggaggagactatggaccccgccgggcgcgcccggggccaaggggccacggcaggggggctgctgctccgggctgctgcggccgccaagggtctcagggaagacctgtggggcgcggccgccctgccttggaggagcctgtcccggatcccgaagcgggagggtcttggagaggaggacacagcagttgccggacacgagctcctactcccaaatgagagaagctttcagaatgctgctaaaagcaataatttggatcttatggagaagctgtttgaaaagaaggttaacattaatgttgtgaacaatatgaaccgcacagccctgcattttgcagtggggagaaatcatttatctgcagtggatttcttgcttaaacacaaggccagggtggatgttgctgataagcacggcttgacagtaattcaccttgcagcctggtctgggagccttgaggtcatgctcatgctggttaaagctggagcagaccagagagccaagaatcaggatggaatgagcgccctccactttgccactcagagcaatcatgtgcgcatcgtggagtatcttattcaagatctgcacctcaaggacctgaaccagcctgatgagaaaggaagaaaaccatttcttttggcagctgagaggggccatgttgaaatgatagaaaaacttaccttcctaaacctgcatacttcagaaaaggacaaggggggaaacactgccttgcacctcgctgcgaagcatggtcacagtcctgcagtgcaggtgctgctagcccagtggcaagacataaatgagatgaatgagctcaatatcagtagtttgcagatagcaaccaggaacggccatgcatcccttgtcaactttcttctcagtgagaacgttgatctgcaccagaaagtggaacctaaggagtcccctcttcatttagttgttatcaacaaccacatcacggttgtaaacagtttattaagtgcacagcatgatattgacatcttaaatcagaagcagcaaacccctctgcatgtagctgctgatcgtggaaatgtggaactggtggaaaccctgctgaaggcaggctgtgacttgaaggctgttgacaagcaaggaaagactgccctggctgtggcctccaggagcaaccatagccttgtcgtgggcatgctcattaaagcagagagatactacgcctggagagaggagcatcatgagagcatcagggacccgtcaacaggctttactctgacattcaagcaagatcacagtctggagaccagacacattcgcacgcttctctgggacctggcttaccatcagctgaaggccaatgagtggcagaggctggcccgttcgtggaactttacagatgaccagattagagccattgaggagcagtggtcgggaaatgaaagcttccgtgaacatggccacagggctctgcttatctggctacacgggaccctgatgactcagggtgacccggccaagcaactgtatgaagagctggtacacgcaggtttcccaaaactagctgaaaagactcgtcatttcaaaagcaaaactgactcaaactccaagaaatgtgtagtttcataaatgcctaaagaaattgtatttacatgattttccactcagcattcagttcttttaatgccataaatttcttctagcagtagcactgattttcaactatgatgatggtggtgacagggaactctaacagatgaaagaagagtaataccatgatacttttcaaccactaaaaagtcaaatatagttttttttgctgagggcaagttgtatgtgattttcccatttctatcaatcatttgatgtaatccatgtaataagataatctaggacggttttgtatgtcatgtttttttaaaaaactcatgggagcagcatcatggtacagtaaaaaaacaagggtttttataatagacaaatatggttttgaacttggttttgccacttattagatgtgaacctttgggcatgttaatgttgtttacgttcttagatcttcagtttccttctctataaactgggagagatgtctatttaatccatagggttggaatgaagatgaagggaaaatgcctgtgtagcctcacgcccatagtacggaaatcaactgctatttctctttcagtaagagaaactgggtttggaatttatagtcattgttgactttaaatcacacattttgtgtaatatattacttaggaaagaccagaagtatgtacaccatttttttttttttttaaatctcttggtgatgtaattacagatgattattttctttgtacttttgggtacattccattctttttttcacaaagaacatgcattatttttgtaatctaagagttatgaaataaatgtaaaattgagtgtca

SEQ ID NO: 107373 - DNA, 5303 bp, Homo sapiens
  Payload ID: 1073
  Gene Symbol: ANKEF1
  Gene Name: ankyrin repeat and EF-hand domain containing 1
  Uniprot ID: Q9NU02
  ENST ID: ENST00000378380
  CDS Start-End: 330-2660
ccccgccccctgcgctcacctgcccgcgcgctcgccttccggggacccggggcccatggacacatacacccagccctgctgtcccgcgcgccagctcaccagccctacccaagggacatcattcacgcctgggcgcctccgccgggctccgggagcccaaggtcgcggctgggccagcgctgagcgtcagaggacgagagcaggggcctccccggtcgccccagcaggcccaggcacataggtgcccagagatccctggcttctgatcgcccggaagactaagagctttagttttggtccagaaagcattttcaaggagctggtcaagcatggctttagcagataagagacttgagaacttacagatctacaaagttcttcaatgtgtgcggaacaaagacaagaagcagatagagaagctgaccaagcttggataccctgaactaatcaattatacagaacccattaatggacttagtgctttgcacttagcctcagtttccaatgatattgatatggtcagctttctccttgaccttggtgctcaccctgatgtgcaagaccgaatgggctgtactcccacaatgagggctgcagaactgggccatgaattgtcaatggaaatattagcaaaggcaaaggctgatatgactatagttgataatgaaggaaaaggtgttttgttttactgcattttaccgactaagcggcattatcgctgtgctctgatcgcccttgaacatggtgcagatgtcaacaattctacctatgaaggaaagccaatattccttagagcttgtgaagatgcacatgatgttaaagatgtgtgcctgacatttttggaaaaaggagccaatcctaatgcaatcaactcatccacaggccgcacagctttaatggaagcgtcaagagaaggggtagtggaaatagttcgaggcatattggaaagaggaggtgaagtgaatgcatttgacaacgacaggcatcacgctgctcattttgctgctaaaggaggctttttcgatatattgaagcttctttttgcctacaatggagacgtggggctgatttcgataaatgggaacacaccacttcattatgctgccatgggtggttttgcagactgctgtaaatatatagctcagcgaggatgtgacctgaaatggaagaatttagatcataaaacgcccagggctgtggctaaggaaggcggcttcaaagcagcaagcaaagaaatacgccgagcagagagaatcgctaataaactagccaggccaggagccaaaaatccaaatccactgtgggcccttagactgcacgattggtccgtagaacgtgaggctttcctccgggaagcctttgcggttttagacaggggtgatggaagcatcagcaagaacgacttcgtgatggtgttggaggaaaggcaggattatgcaagctcagaacagctggctgccatcgctcaccttcatgagaaaacccggggaggaggggtcaatattaatgaattctttaaaggaaccagatatttaaacaagtcttttgtcttaggatcgtatggacctaagaaaaaggaaaaagggatgggcaaaaaaggaaagaaagggaaatttgtcttaccccttccaatctgtgtcattcctgagtacgcgtttccacgccggcaggatggtgggccaccgtattacatgattgagacctacaagaatgtcactgatagcagccggtttaatagagatcatcccccagaacatcccattcaggatgactctgtttggtacattgatgattcagagaaggtattttcaaacattaatattatcaccaaagcaggggatctggcttctctgaaaaaggcctttgaatcaggaatacctgtggatatgaaggataattattacaaaactccgctaatgacggcgtgtgcaagtggaaacatagatgtggtcaagtttcttcttgaaaaaggagctaacgttaatgcaacagataactttctgtggactccacttcattttgcatgccatgcaggccaacaagacattgttgagcttcttgttgaatctggagctttaatagatgcagcttcaatcaacaactcaactcctttaaatagagccattgaaagctgcagactggatacagtaaaatacctacttgatattggtgctaaattccagctggaaaatagaaaagggcatagtgccatggacgttgcaaaggcatatgctgattatagaataattgatctgattaaagaaaagctagataacttgccgaaaccagcagaaaatcaaaaactaaaaggcaagacacctcctatactgaagactgaaggccctgaaattaagaaagaagaggaactgctgtcatcaatttatggtgtaccaaccacatcagagggaaagaaagtacagaagggtaatgtggttcatctgaattcattgattaccagtggttatactaagaaagtggatatcacatttattccacggaggatttggagtcctgaagccacaacagcagagctgatcaggaagagggaactacggcgagagaggtttacacatgaggtggacttcgacgattttatgatgccttttcagaagaacatcacagagaaagctcgagcactggaagctgccttgaagacctaagtcatagcagttatttcttggggtaaatgctttgaggcccagggaccaatctttggagaaagtagatatttccatcaaagccaaagcaatccatacaccaagaacttgttaccaagaatttctttttgctttaacaactataaatattcttagctgtctagagaaaagatgtatgttattttgaaatgaatggtatgtcattctggataaatccccaagcccctttatgaatgtagtgaaatacatggcatgtgggttataaacgttgctgtcaaaagatttaccaggtctacaccattatgcttattatttttttaattatcctttttatttattaaatagagacagagtctcactatattgccccagctggtctcgaactcttgagctcaggcagtcctcccaacttggccgtcgaaagtgctgggattataggcatgagctactgtgcccagcctgcttattgaagatacatttctagtggaaattgatgaaacaatttaggttttggaaaaagaagtaatatttaatcttttaaggaaggagtttatttctcacatgccattataaactatgtgtattagataccttgggttgaatacacttttaacagccctagatcgatagccctagccctagatagatagccctagccctagatagatagctattaggttggtgcaaaagtaattgtggtttttgccataacctttaattgcagcaaaaaccgcaattacttttgctccaacctgacagctaggtatctagctagctagaaaggcagatagacagatatatagatgatagatagatagatgatagatagatagatagatgatagatagatagatagatagatagatagatagatagatagagatttattgcaaataattggtttacataattttgggccccagatggttaagtgctaaatttgtagggtaggctatcaggaagtgcaggctggaaacatgcaggagctgtccctgaagtccacaagtggaatttcttcttcatcatggaaacctcagttttgttcatacacctaaatacttcagtatgtctttcctaaaataaaaggcatccatttacctaaccagattacgattgtgaaaatttcaactgttgttaaagcgactgatgggatcagtttcacctagattatctaaagcagtctcctttacataaagtcaatgaattgtaaatattggttgcatgtacacaattccttcaccacaacacctaagattagtatttgattgagttactgggtgctacaacctagccaagttgagtcataaaactgaccatctctggaggtgtactctgcagtaaaaagctagctgaggcattattcacaccaagaaatgcagtgggtaccgaacaggagctccaaaaatatccaacgtctcattgacagaaagaagccactttagaatctgccttaccagaaggcaccaattgcagattacagctctgtcagtcacgtatggattaaacccctttcctctaacctcctccctctctttccaaccttggagggaccttccacaggagccagttagggaggagaagggaagagagagaatgaagcaggtaaccaggcccacccctctggaggagacagacctgaacaggggttgcttacaagcattgcatttggatcccaagatttgctattacaactaaattttgtctgttttgtaaggttttggttggtttttttgttctctcttttctttttgttttgacataatttcatatttatggaaaagttgcaataatttgacaaagaattcttatatgccctttacccagattacctaaatgttaaccacttaccacatttgctctatctctttctccctctacatatatgcatatgtatgtttaatttttgtccccgaactatctgtgtgtccgttgaagacatgatgaagacatgatgttcttcacatgatgttttcatatttgtgtgtcagttgaagacatgatgttttaaatatttcattgtgtatttcctaaaatcacgatgttcttttgcataacaatattaccattggcaaactaaggaaattaacacttaagtgaactatttaatctatagaccttattcagattttgctatttatcccaataatttcctttgtactcccaggtcatgaaatacattcgcttgccccatctctttagtctcttttagtttagaacaacctgtatttcttgtttgtttgtttgtttgtttgtttatgacagtatataagaagaacacaagccacttttatcttgtaaaatgtctctcaactttggtttgtcttaaatgtcttcaagaatagattcaggtgatgcttttggggcagcagtgctacagatgtcattgcacccttctcagtacatcatatcaggaggcacatgatgttgatacctgatataaactttaactgcatttgcagttgagagaaatgtaaataaaagtaaagctgcagtaataaatcataactgcataaaattaactgtagtacatactgtacaactgtaataatttcatagccacctcctgttgctattgtgttgagttcaattgttgtcttttctcaagcttactttattgcacaaatacagtatttataacatacaaaa

SEQ ID NO: 107374 - DNA, 2894 bp, Homo sapiens
  Payload ID: 1073
  Gene Symbol: ANKEF1
  Gene Name: ankyrin repeat and EF-hand domain containing 1
  Uniprot ID: Q9NU02
  ENST ID: ENST00000378392
  CDS Start-End: 402-2732
ggcttccaccccgccccctgcgctcacctgcccgcgcgctcgccttccggggacccggggcccatggacacatacacccagccctgctgtcccgcgcgccagctcaccagccctacccaagggacatcattcacgcctgggcgcctccgccgggctccgggagcccaaggtcgcggctgggccagcgctgagcgtcagaggacgagagcaggggcctccccggtcgccccagcaggcccaggcacataggtgcccagagatccctggcttctgatcgcccggaagactaagagtcccatgaagtgggcaccattgctattgccagttcacagatgcagaaactgaggtaaaaactagctttagttttggtccagaaagcattttcaaggagctggtcaagcatggctttagcagataagagacttgagaacttacagatctacaaagttcttcaatgtgtgcggaacaaagacaagaagcagatagagaagctgaccaagcttggataccctgaactaatcaattatacagaacccattaatggacttagtgctttgcacttagcctcagtttccaatgatattgatatggtcagctttctccttgaccttggtgctcaccctgatgtgcaagaccgaatgggctgtactcccacaatgagggctgcagaactgggccatgaattgtcaatggaaatattagcaaaggcaaaggctgatatgactatagttgataatgaaggaaaaggtgttttgttttactgcattttaccgactaagcggcattatcgctgtgctctgatcgcccttgaacatggtgcagatgtcaacaattctacctatgaaggaaagccaatattccttagagcttgtgaagatgcacatgatgttaaagatgtgtgcctgacatttttggaaaaaggagccaatcctaatgcaatcaactcatccacaggccgcacagctttaatggaagcgtcaagagaaggggtagtggaaatagttcgaggcatattggaaagaggaggtgaagtgaatgcatttgacaacgacaggcatcacgctgctcattttgctgctaaaggaggctttttcgatatattgaagcttctttttgcctacaatggagacgtggggctgatttcgataaatgggaacacaccacttcattatgctgccatgggtggttttgcagactgctgtaaatatatagctcagcgaggatgtgacctgaaatggaagaatttagatcataaaacgcccagggctgtggctaaggaaggcggcttcaaagcagcaagcaaagaaatacgccgagcagagagaatcgctaataaactagccaggccaggagccaaaaatccaaatccactgtgggcccttagactgcacgattggtccgtagaacgtgaggctttcctccgggaagcctttgcggttttagacaggggtgatggaagcatcagcaagaacgacttcgtgatggtgttggaggaaaggcaggattatgcaagctcagaacagctggctgccatcgctcaccttcatgagaaaacccggggaggaggggtcaatattaatgaattctttaaaggaaccagatatttaaacaagtcttttgtcttaggatcgtatggacctaagaaaaaggaaaaagggatgggcaaaaaaggaaagaaagggaaatttgtcttaccccttccaatctgtgtcattcctgagtacgcgtttccacgccggcaggatggtgggccaccgtattacatgattgagacctacaagaatgtcactgatagcagccggtttaatagagatcatcccccagaacatcccattcaggatgactctgtttggtacattgatgattcagagaaggtattttcaaacattaatattatcaccaaagcaggggatctggcttctctgaaaaaggcctttgaatcaggaatacctgtggatatgaaggataattattacaaaactccgctaatgacggcgtgtgcaagtggaaacatagatgtggtcaagtttcttcttgaaaaaggagctaacgttaatgcaacagataactttctgtggactccacttcattttgcatgccatgcaggccaacaagacattgttgagcttcttgttgaatctggagctttaatagatgcagcttcaatcaacaactcaactcctttaaatagagccattgaaagctgcagactggatacagtaaaatacctacttgatattggtgctaaattccagctggaaaatagaaaagggcatagtgccatggacgttgcaaaggcatatgctgattatagaataattgatctgattaaagaaaagctagataacttgccgaaaccagcagaaaatcaaaaactaaaaggcaagacacctcctatactgaagactgaaggccctgaaattaagaaagaagaggaactgctgtcatcaatttatggtgtaccaaccacatcagagggaaagaaagtacagaagggtaatgtggttcatctgaattcattgattaccagtggttatactaagaaagtggatatcacatttattccacggaggatttggagtcctgaagccacaacagcagagctgatcaggaagagggaactacggcgagagaggtttacacatgaggtggacttcgacgattttatgatgccttttcagaagaacatcacagagaaagctcgagcactggaagctgccttgaagacctaagtcatagcagttatttcttggggtaaatgctttgaggcccagggaccaatctttggagaaagtagatatttccatcaaagccaaagcaatccatacaccaagaacttgttaccaagaatttctttttgctttaacaactataaatattcttagctgtctaga

SEQ ID NO: 107375 - DNA, 7418 bp, Homo sapiens
  Payload ID: 1074
  Gene Symbol: ANKFY1
  Gene Name: ankyrin repeat and FYVE domain containing 1
  Uniprot ID: Q9P2R3
  ENST ID: ENST00000341657
  CDS Start-End: 37-3546
acttctcgcgaggttgcaggcagtgccgggccagacatggcggaagaggaggtggccaagttggagaagcacttgatgcttctgcggcaggagtatgtcaagctgcagaagaagctggcggagacagagaagcgctgcgctctcttggctgcgcaggcaaacaaggagagcagcagcgagtccttcatcagccgtctgctggccatcgtggcagacctctacgagcaggagcagtacagcgatctgaagataaaggttggggacaggcacatcagtgctcacaagtttgtcctggcagcccgcagtgacagctggagtctggctaacttgtcttccactaaagagttggacctgtcagatgctaatcctgaggtgacgatgacaatgcttcgctggatctatacagatgagctggagttcagagaggatgatgtgttcctgactgaactgatgaaactagcaaatcggtttcagctacagctcctcagggagagatgtgagaagggtgttatgtctctagtgaatgtcaggaactgtattcgcttctaccagacggcagaggagctgaatgccagcacactgatgaactactgtgcagaaattattgcaagtcattgggacgacctgaggaaggaggatttcagcagcatgagcgctcagttgttatacaaaatgatcaaatccaagacagagtacccgctacataaagccatcaaagtggagagagaagacgtggtcttcctgtatctgattgaaatggattcccagctccctgggaagctgaatgaagcggatcataacggagatctggcattagatctagccctctcacgacgactggagagtattgccaccacgctggttagtcacaaagctgatgtggacatggtggacaagagtggctggagcttgttacacaaaggaatccaaagaggagatctctttgctgccactttcctcattaagaatggggcctttgtcaacgctgctacactgggtgcccaggagacaccactgcaccttgtggccttgtacagttcaaagaaacactcagcagatgtgatgtctgagatggcgcagattgcagaggcccttctgcaggctggtgccaaccccaacatgcaggacagcaaggggaggactcctttacatgtgtccatcatggccgggaatgaatatgtgttcagtcagctgctgcagtgcaaacaactagatttagaactcaaagaccacgagggcagcacggctctgtggctggcagtgcagcatatcacagtgtcttctgaccagtctgtgaaccccttcgaagatgtccccgtggtaaatgggacttcatttgatgagaacagctttgcagccagactcatccagcgcggcagccacacagacgcacctgacacggcgacaggaaactgtttactacagcgggcagctggagcaggaaacgaggcagcagctcttttcctggcaaccaacggtgcccatgtcaaccacagaaacaagtggggagaaaccccgttgcacacagcgtgtcggcatggcctggccaacctcacggcagagctcctgcagcaaggcgccaacccaaacctgcagacggaggaagctctgcctctgccaaaggaggccgcatccctgaccagcttggcggacagcgtccatctgcagacgccactgcacatggcgatcgcctataaccatccggatgtggtgtctgtcatcctggagcagaaagccaatgctcttcatgccaccaacaacttgcagatcattccggacttcagcctcaaagattcccgagaccagactgtgctgggcctggcattatggactggcatgcacacgatcgcagcccagctgctgggctctggagccgccatcaatgacaccatgtcggatgggcagacgctactgcacatggccatacagcggcaggacagcaagagcgcactcttcctgctggagcaccaggcagatataaatgtcaggactcaggacggggagacagccctccagctggccatcagaaaccagcttccactcgtagttgatgccatatgcacccgaggagctgacatgtctgtgccagatgagaaggggaaccccccgctgtggcttgcattggcaaacaatctggaggacatcgcatccactctggtcagacatggctgtgatgccacatgctggggtccgggacctggtgggtgccttcagacgctcctgcacagagccattgatgaaaacaacgagcccaccgcctgctttcttattcgcagtggctgtgacgtgaacagtcccagacaaccaggcgccaatggagaaggagaggaagaggctagagatgggcagacccctttgcatttggcagcctcttgggggctggaagagacagtacagtgtcttctggagtttggtgccaacgtgaacgcacaggatgcagaaggaagaacccccatccacgtggccatcagcagccaacacggtgtcatcattcagctgttggtttctcaccccgatatccatttgaatgtacgagacagacaagggctgaccccgtttgcctgtgccatgactttcaagaacaacaagtcagccgaggccattctcaaacgagagtccggggctgctgagcaggtggataacaagggccggaatttccttcatgtggcagttcagaactctgatattgaaagtgtgctgttcctgatcagtgtccacgctaatgtgaattcaagagtccaggatgcctccaagttgacccccctgcacctcgctgtccaagcaggctcagaaattattgtccgcaatttgcttcttgcgggagccaaagtgaacgaattaaccaagcatcgccagactgccctccatcttgctgcccagcaggacctgcccaccatctgctcagtcctcctagagaatggcgtggactttgctgccgtggatgagaatggaaacaatgctcttcatcttgctgtcatgcacggccggctcaacaacatccgggttctcctgacagagtgcacagtggacgccgaagcctttaatctcagaggccagtcaccactgcacattttgggacaatatggcaaggagaatgcagcggccatctttgatctcttcctagaatgcatgccggggtatcctctggacaagccggatgcagacggcagcacggtgctgctcctggcatacatgaaagggaacgccaacttgtgccgcgccatcgtccggtcgggggctcgcctcggggtgaataacaaccagggagtcaacatcttcaactaccaggtcgccaccaagcagctcctgttccgactgctggatatgctgtccaaggagcctccgtggtgtgacggctcctactgctatgagtgcactgccaggttcggagtcaccactcgcaaacaccactgtcgtcactgcggacgtcttctttgccataaatgctcgaccaaggagattcctattataaagtttgatctgaacaagcctgtgcgggtttgcaacatttgttttgatgtactgactctgggtggggtttcttagtgagccccccggagggtccaggccacgtccttggtcacctccccagcagctgctctgctcaccagcctgaccccacccagagcaggagctggcgggtgtcttcctgcggcaatagactggaacgattaaggaccatggtgtgatagatcccatttcaaatgattccatatgattgtcagtgtgtgtgtcagactgtgatcgatttcactagatgtctcactcatcagaccaggccattgggcctaagtggtaaatgtgattaggaattagacctctccccattctgctagcaacatacagggacacttggaaaaccatttccccttccagtagcttggtgtccatcccagagcattcatgaagtcttcccgcctgggctgactgatgaggcagagcctctcagcgtaggaagctggctgcttaatgagctggctttactctagggtaagtggctgtggacttttctgcacagtgttttcataaagataataggatcctcttgccctgaagtctttttttctttttacgctaagctgtatttttagtgagctaccccttttaaaaaggtgaaatctttcttaacagggttcaaagatgagagctgaaaaatcgtggccttaacaactgaaagctttacagtgttcatgctactgaggtgtcaggagtgcagctgggccgcttgacacctcgtagcagccgtctcattctctcgtcttgctgcgtcctgtctgtggagtcctcagtcactctgctgttggagagtgctggaggaaatgcacttttactgtgctgcactttttatagagctgcattgtcggtgattccaatttaaaaatccatattcaaaaataccctcacacatccctgcatcagtgattctaatgatcagctttgactggacctcagctcacacgaatctccaaggaaaaactctacagagcatcttttagagcaagagattcatacaggccaagtgatgagagggggagtcaccaaggcttcagccccaagggcatctccagcctcaggccggcaggtcctatgtccttgacacaaatgcttcttgctgaaatcctccctagtgatgctgcgagtgctgttggtcccagttctgtgtagcttgccctgccccatgaagggccaccagccaagggccctggccacgtgtgcgccaccttactttggaagtctctggcttgtgtgctggatgaggctgccagaacttgttgggcgttcatcgctgttagtacatatattaaccgtgaggtgttaaacttttcttttgaaggtttggccagtttctaaaaaatgcacatttaaagagaagcatctaccacggctttaaaacaaaacaactctgagatgaacaatatgtgttatactcagagattaacaatctcaatcatacatactgattctttcagacatttaataaccactacatttttttgcattaatgaagtttgactatatgtgtaaagggactaaatatttttgcaacagcctgttctttgttcattcttttctggatagtgtgtcctctgtattgcggtagatttatacattctgttgcctaaatatgtgtgtaaaatgagctgataaactggagtactacttaaaaaaaagtctgtgatttataagatgtatatgctttctatgtgaatataagcttgtgcacaatgtttaaaagaaaaacaatgaattagaagagatcccccgtcccccagtctgacatatttcatacagaatgtttaaaagaaaaactctgctagtcttggcaaacatttggccatgtgaggcatgtggtcagtttccattttctattacctggaaagggccataaggaagcaggcagggcttaggtagcttggttacctaagttagaaagtaagagaatcatgattcggatatgaattgaagtggttggtacatggatacctgttctttaaaaggaatgtgggagatgagtcaagggtgaggccgattgttctgcccatgccctaccataccaatttcaataacaatcttgcctgtcattgcactcagaatcttaagatcatgtttcaaatatgttgattcaaacttgcttctaagcctgagtccagggatagcaatggtactgaccagctatggactgggagaacattgagtcctgttttccattggcttcagggcgcatccatgtggatataggaaaagcctctttccacagacttaggaagccccccgaccacgcggacgctcgctgggctgcactcagcaggctgcttgagtgggagctgactccaacatgccctgccctggctgggactaggcatgcttccagcccttcccgtgctctccctgctgtcaacacttgcgtacaaacctgcctagctgttgtaagttttcatcagtagcttaagtactagtagcaaaaacttaaattcattcagaaagttgccacttctgaatgagtagagcaggaaaagtaaactttactgaaacataatttgctgcaacagtcaacattgttatgctgaatgtgctctcaactgccctttgctcatcgccagatttattatccagtgtattcctaacagtcttttgttgtcgttgtttttaaaacaaaggtacggaccatgtgctatatataaatcgaatggcttaaactaatttgctatgatcctctaacaccgaaatttcccataaacttaagtgcctacacttaggacttttgaactttcagtcatctttttcgtggtgtctcactgaacgatgtgttagaacatgtgttccatttggagttttgggcctgtgcacggtcaaccccaattaccaatttagttgaggctggattcgattgctcagttcacctgccacgttctctccaaggagtggggtctacgtgacctttagtcctctacctcagagccccgagtcatttctgaccaccccgttctgtgtcctcactcttgtccctgaatgggtccctgtgtggatctcagtgtgtgtgtggtttctccactcctccccgctcatgtcccacacctgccatattgaaccgtttctgcactaatcttctccacgggcacggagtggagggaacgtcttgggaaaggggagagcttgacctccatctaggtttcttttatctggagaaaaagaacacttttgaactatgtaatgcttcaccctgaaaggcaagctaacgctaacttcccaggtgacagtagcaggaacaaggaagggtaatgtttccatgacagacacttgcttcccttgggacaagtcccagaagaactacctgaagcaccaaagctccccaccccagcctggtggcagaggaagcaggtggcaccaactcaccaaagggacttgggagccaccttctcactctgtggaagtactttagtgagagctgactggcaagataaaaaccctgaaattcccagaagttacagatgccttaaagactttctttggaagatcattgcctgtactattccttttttgtgtggcataaataatatattaacctgttacaactgacaacattggttttctgcagctagggagtcttgagtcgagactgctcgccttgatgacttgctcttttttggcagatgtgtggagttggctgttacgacatccctgtgtgatcccagaggaggggcagtagctgggcagaaactgcaggcacacatttgggtggatcacctggcttccagccccttcggggtggtgctcagtgtggggtgatggtatcatagaggaccacggcgcttatcagcattgtttctttggagtctgtgtaatggaatgtatttttcaaatactgatatttgcattttctgtaacaattccttataataaaatgaagtaaaattgtg

SEQ ID NO: 107376 - DNA, 570 bp, Homo sapiens
  Payload ID: 1074
  Gene Symbol: ANKFY1
  Gene Name: ankyrin repeat and FYVE domain containing 1
  ENST ID: ENST00000574736
  CDS Start-End: 391-570
actgctcaggtgacgggtgcactaacattaagaaatcaccaccgaagaacttatccgtggaaccagaaaccacctgtaccccaaagacactgaaatacgaatttaaaaaaaacagttgcggcgaacccatggaaaaacagaggaaactggccaggaggaggagcctgtgtgtgggaataaattccattgtgatttttgaatttctacacatttaagggagaaaccccgttgcacacagcgtgtcggcatggcctggccaacctcacggcagagctcctgcagcaaggcgccaacccaaacctgcagacggaggaagctctgcctctgccaaaggaggccgcatccctgaccagcttggcggacagcgtccatctgcagacgccactgcacatggcgatcgcctataaccatccggatgtggtgtctgtcatcctggagcagaaagccaatgctcttcatgccaccaacaacttgcagatcattccggacttcagcctcaaagattcccgagaccagactgtgctgggcctggcattatggactggcatgcacacgatcgcagcccagctg

SEQ ID NO: 107377 - DNA, 5033 bp, Homo sapiens
  Payload ID: 1074
  Gene Symbol: ANKFY1
  Gene Name: ankyrin repeat and FYVE domain containing 1
  Uniprot ID: Q9P2R3
  ENST ID: ENST00000574367
  CDS Start-End: 16-3528
agtgccgggccagacatggcggaagaggaggtggccaagttggagaagcacttgatgcttctgcggcaggagtatgtcaagctgcagaagaagctggcggagacagagaagcgctgcgctctcttggctgcgcaggcaaacaaggagagcagcagcgagtccttcatcagccgtctgctggccatcgtggcagacctctacgagcaggagcagtacagcgatctgaagataaaggttggggacaggcacatcagtgctcacaagtttgtcctggcagcccgcagtgacagctggagtctggctaacttgtcttccactaaagagttggacctgtcagatgctaatcctgaggtgacgatgacaatgcttcgctggatctatacagatgagctggagttcagagaggatgatgtgttcctgactgaactgatgaaactagcaaatcggtttcagctacagctcctcagggagagatgtgagaagggtgttatgtctctagtgaatgtcaggaactgtattcgcttctaccagacggcagaggagctgaatgccagcacactgatgaactactgtgcagaaattattgcaagtcattgggacgacctgaggaaggaggatttcagcagcatgagcgctcagttgttatacaaaatgatcaaatccaagacagagtacccgctacataaagccatcaaagtggagagagaagacgtggtcttcctgtatctgattgaaatggattcccagctccctgggaagctgaatgaagcggatcataacggagatctggcattagatctagccctctcacgacgactggagagtattgccaccacgctggttagtcacaaagctgatgtggacatggtggacaagagtggctggagcttgttacacaaaggaatccaaagaggagatctctttgctgccactttcctcattaagaatggggcctttgtcaacgctgctacactgggtgcccaggagacaccactgcaccttgtggccttgtacagttcaaagaaacactcagcagatgtgatgtctgagatggcgcagattgcagaggcccttctgcaggctggtgccaaccccaacatgcaggacagcaaggggaggactcctttacatgtgtccatcatggccgggaatgaatatgtgttcagtcagctgctgcagtgcaaacaactagatttagaactcaaagaccacgagggcagcacggctctgtggctggcagtgcagcatatcacagtgtcttctgaccagtctgtgaaccccttcgaagatgtccccgtggtaaatgggacttcatttgatgagaacagctttgcagccagactcatccagcgcggcagccacacagacgcacctgacacggcgacaggaaactgtttactacagcgggcagctggagcaggaaacgaggcagcagctcttttcctggcaaccaacggtgcccatgtcaaccacagaaacaagtggggagaaaccccgttgcacacagcgtgtcggcatggcctggccaacctcacggcagagctcctgcagcaaggcgccaacccaaacctgcagacggaggaagctctgcctctgccaaaggaggccgcatccctgaccagcttggcggacagcgtccatctgcagacgccactgcacatggcgatcgcctataaccatccggatgtggtgtctgtcatcctggagcagaaagccaatgctcttcatgccaccaacaacttgcagatcattccggacttcagcctcaaagattcccgagaccagactgtgctgggcctggcattatggactggcatgcacacgatcgcagcccagctgctgggctctggagccgccatcaatgacaccatgtcggatgggcagacgctactgcacatggccatacagcggcaggacagcaagagcgcactcttcctgctggagcaccaggcagatataaatgtcagcaggactcaggacggggagacagccctccagctggccatcagaaaccagcttccactcgtagttgatgccatatgcacccgaggagctgacatgtctgtgccagatgagaaggggaaccccccgctgtggcttgcattggcaaacaatctggaggacatcgcatccactctggtcagacatggctgtgatgccacatgctggggtccgggacctggtgggtgccttcagacgctcctgcacagagccattgatgaaaacaacgagcccaccgcctgctttcttattcgcagtggctgtgacgtgaacagtcccagacaaccaggcgccaatggagaaggagaggaagaggctagagatgggcagacccctttgcatttggcagcctcttgggggctggaagagacagtacagtgtcttctggagtttggtgccaacgtgaacgcacaggatgcagaaggaagaacccccatccacgtggccatcagcagccaacacggtgtcatcattcagctgttggtttctcaccccgatatccatttgaatgtacgagacagacaagggctgaccccgtttgcctgtgccatgactttcaagaacaacaagtcagccgaggccattctcaaacgagagtccggggctgctgagcaggtggataacaagggccggaatttccttcatgtggcagttcagaactctgatattgaaagtgtgctgttcctgatcagtgtccacgctaatgtgaattcaagagtccaggatgcctccaagttgacccccctgcacctcgctgtccaagcaggctcagaaattattgtccgcaatttgcttcttgcgggagccaaagtgaacgaattaaccaagcatcgccagactgccctccatcttgctgcccagcaggacctgcccaccatctgctcagtcctcctagagaatggcgtggactttgctgccgtggatgagaatggaaacaatgctcttcatcttgctgtcatgcacggccggctcaacaacatccgggttctcctgacagagtgcacagtggacgccgaagcctttaatctcagaggccagtcaccactgcacattttgggacaatatggcaaggagaatgcagcggccatctttgatctcttcctagaatgcatgccggggtatcctctggacaagccggatgcagacggcagcacggtgctgctcctggcatacatgaaagggaacgccaacttgtgccgcgccatcgtccggtcgggggctcgcctcggggtgaataacaaccagggagtcaacatcttcaactaccaggtcgccaccaagcagctcctgttccgactgctggatatgctgtccaaggagcctccgtggtgtgacggctcctactgctatgagtgcactgccaggttcggagtcaccactcgcaaacaccactgtcgtcactgcggacgtcttctttgccataaatgctcgaccaaggagattcctattataaagtttgatctgaacaagcctgtgcgggtttgcaacatttgttttgatgtactgactctgggtggggtttcttagtgagccccccggagggtccaggccacgtccttggtcacctccccagcagctgctctgctcaccagcctgaccccacccagagcaggagctggcgggtgtcttcctgcggcaatagactggaacgattaaggaccatggtgtgatagatcccatttcaaatgattccatatgattgtcagtgtgtgtgtcagactgtgatcgatttcactagatgtctcactcatcagaccaggccattgggcctaagtggtaaatgtgattaggaattagacctctccccattctgctagcaacatacagggacacttggaaaaccatttccccttccagtagcttggtgtccatcccagagcattcatgaagtcttcccgcctgggctgactgatgaggcagagcctctcagcgtaggaagctggctgcttaatgagctggctttactctagggtaagtggctgtggacttttctgcacagtgttttcataaagataataggatcctcttgccctgaagtctttttttctttttacgctaagctgtatttttagtgagctaccccttttaaaaaggtgaaatctttcttaacagggttcaaagatgagagctgaaaaatcgtggccttaacaactgaaagctttacagtgttcatgctactgaggtgtcaggagtgcagctgggccgcttgacacctcgtagcagccgtctcattctctcgtcttgctgcgtcctgtctgtggagtcctcagtcactctgctgttggagagtgctggaggaaatgcacttttactgtgctgcactttttatagagctgcattgtcggtgattccaatttaaaaatccatattcaaaaataccctcacacatccctgcatcagtgattctaatgatcagctttgactggacctcagctcacacgaatctccaaggaaaaactctacagagcatcttttagagcaagagattcatacaggccaagtgatgagagggggagtcaccaaggcttcagccccaagggcatctccagcctcaggccggcaggtcctatgtccttgacacaaatgcttcttgctgaaatcctccctagtgatgctgcgagtgctgttggtcccagttctgtgtagcttgccctgccccatgaagggccaccagccaagggccctggccacgtgtgcgccaccttactttggaagtctctggcttgtgtgctggatgaggctgccagaacttgttgggcgttcatcgctgttagtacatatattaaccgtgaggtgttaaacttttcttttgaaggtttggccagtttctaaaaaatgcacatttaaagagaagcatctaccacggctttaaaacaaaacaactctgagatgaacaatatgtgttatactcagagattaacaatctcaatcatacatactgattctttcagacatttaataaccactacatttttttgcattaatgaagtttgactatatgtgtaaagggactaaatatttttgcaacagcc

SEQ ID NO: 107378 - DNA, 6458 bp, Homo sapiens
  Payload ID: 1074
  Gene Symbol: ANKFY1
  Gene Name: ankyrin repeat and FYVE domain containing 1
  Uniprot ID: Q9P2R3
  ENST ID: ENST00000570535
  CDS Start-End: 118-3753
ggccgggcgtggttgcatgggggctccgcgggtctcgcgagccttcctgtctagcctctccggagcttctcgggccggggtccggagcgcggttcctatgacaacgtccctcccgcgatgccgaccccgcgggactgcggccggctgcggagccgggctggcaggtcccgcgccggtgctgcgtgcagccgcggggccccgagggcagcacgggaggctcttgattgccggcggtgccgggacgccgggggaaaggaggtggccaagttggagaagcacttgatgcttctgcggcaggagtatgtcaagctgcagaagaagctggcggagacagagaagcgctgcgctctcttggctgcgcaggcaaacaaggagagcagcagcgagtccttcatcagccgtctgctggccatcgtggcagacctctacgagcaggagcagtacagcgatctgaagataaaggttggggacaggcacatcagtgctcacaagtttgtcctggcagcccgcagtgacagctggagtctggctaacttgtcttccactaaagagttggacctgtcagatgctaatcctgaggtgacgatgacaatgcttcgctggatctatacagatgagctggagttcagagaggatgatgtgttcctgactgaactgatgaaactagcaaatcggtttcagctacagctcctcagggagagatgtgagaagggtgttatgtctctagtgaatgtcaggaactgtattcgcttctaccagacggcagaggagctgaatgccagcacactgatgaactactgtgcagaaattattgcaagtcattgggacgacctgaggaaggaggatttcagcagcatgagcgctcagttgttatacaaaatgatcaaatccaagacagagtacccgctacataaagccatcaaagtggagagagaagacgtggtcttcctgtatctgattgaaatggattcccagctccctgggaagctgaatgaagcggatcataacggagatctggcattagatctagccctctcacgacgactggagagtattgccaccacgctggttagtcacaaagctgatgtggacatggtggacaagagtggctggagcttgttacacaaaggaatccaaagaggagatctctttgctgccactttcctcattaagaatggggcctttgtcaacgctgctacactgggtgcccaggagacaccactgcaccttgtggccttgtacagttcaaagaaacactcagcagatgtgatgtctgagatggcgcagattgcagaggcccttctgcaggctggtgccaaccccaacatgcaggacagcaaggggaggactcctttacatgtgtccatcatggccgggaatgaatatgtgttcagtcagctgctgcagtgcaaacaactagatttagaactcaaagaccacgagggcagcacggctctgtggctggcagtgcagcatatcacagtgtcttctgaccagtctgtgaaccccttcgaagatgtccccgtggtaaatgggacttcatttgatgagaacagctttgcagccagactcatccagcgcggcagccacacagacgcacctgacacggcgacaggaaactgtttactacagcgggcagctggagcaggaaacgaggcagcagctcttttcctggcaaccaacggtgcccatgtcaaccacagaaacaagtggggagaaaccccgttgcacacagcgtgtcggcatggcctggccaacctcacggcagagctcctgcagcaaggcgccaacccaaacctgcagacggaggaagctctgcctctgccaaaggaggccgcatccctgaccagcttggcggacagcgtccatctgcagacgccactgcacatggcgatcgcctataaccatccggatgtggtgtctgtcatcctggagcagaaagccaatgctcttcatgccaccaacaacttgcagatcattccggacttcagcctcaaagattcccgagaccagactgtgctgggcctggcattatggactggcatgcacacgatcgcagcccagctgctgggctctggagccgccatcaatgacaccatgtcggatgggcagacgctactgcacatggccatacagcggcaggacagcaagagcgcactcttcctgctggagcaccaggcagatataaatgtcaggactcaggacggggagacagccctccagctggccatcagaaaccagcttccactcgtagttgatgccatatgcacccgaggagctgacatgtctgtgccagatgagaaggggaaccccccgctgtggcttgcattggcaaacaatctggaggacatcgcatccactctggtcagacatggctgtgatgccacatgctggggtccgggacctggtgggtgccttcagacgctcctgcacagagccattgatgaaaacaacgagcccaccgcctgctttcttattcgcagtggctgtgacgtgaacagtcccagacaaccaggcgccaatggagaaggagaggaagaggctagagatgggcagacccctttgcatttggcagcctcttgggggctggaagagacagtacagtgtcttctggagtttggtgccaacgtgaacgcacaggatgcagaaggaagaacccccatccacgtggccatcagcagccaacacggtgtcatcattcagctgttggtttctcaccccgatatccatttgaatgtacgagacagacaagggctgaccccgtttgcctgtgccatgactttcaagaacaacaagtcagccgaggccattctcaaacgagagtccggggctgctgagcaggtggataacaagggccggaatttccttcatgtggcagttcagaactctgatattgaaagtgtgctgttcctgatcagtgtccacgctaatgtgaattcaagagtccaggatgcctccaagttgacccccctgcacctcgctgtccaagcaggctcagaaattattgtccgcaatttgcttcttgcgggagccaaagtgaacgaattaaccaagcatcgccagactgccctccatcttgctgcccagcaggacctgcccaccatctgctcagtcctcctagagaatggcgtggactttgctgccgtggatgagaatggaaacaatgctcttcatcttgctgtcatgcacggccggctcaacaacatccgggttctcctgacagagtgcacagtggacgccgaagcctttaatctcagaggccagtcaccactgcacattttgggacaatatggcaaggagaatgcagcggccatctttgatctcttcctagaatgcatgccggggtatcctctggacaagccggatgcagacggcagcacggtgctgctcctggcatacatgaaagggaacgccaacttgtgccgcgccatcgtccggtcgggggctcgcctcggggtgaataacaaccagggagtcaacatcttcaactaccaggtcgccaccaagcagctcctgttccgactgctggatatgctgtccaaggagcctccgtggtgtgacggctcctactgctatgagtgcactgccaggttcggagtcaccactcgcaaacaccactgtcgtcactgcggacgtcttctttgccataaatgctcgaccaaggagattcctattataaagtttgatctgaacaagcctgtgcgggtttgcaacatttgttttgatgtactgactctgggtggggtttcttagtgagccccccggagggtccaggccacgtccttggtcacctccccagcagctgctctgctcaccagcctgaccccacccagagcaggagctggcgggtgtcttcctgcggcaatagactggaacgattaaggaccatggtgtgatagatcccatttcaaatgattccatatgattgtcagtgtgtgtgtcagactgtgatcgatttcactagatgtctcactcatcagaccaggccattgggcctaagtggtaaatgtgattaggaattagacctctccccattctgctagcaacatacagggacacttggaaaaccatttccccttccagtagcttggtgtccatcccagagcattcatgaagtcttcccgcctgggctgactgatgaggcagagcctctcagcgtaggaagctggctgcttaatgagctggctttactctagggtaagtggctgtggacttttctgcacagtgttttcataaagataataggatcctcttgccctgaagtctttttttctttttacgctaagctgtatttttagtgagctaccccttttaaaaaggtgaaatctttcttaacagggttcaaagatgagagctgaaaaatcgtggccttaacaactgaaagctttacagtgttcatgctactgaggtgtcaggagtgcagctgggccgcttgacacctcgtagcagccgtctcattctctcgtcttgctgcgtcctgtctgtggagtcctcagtcactctgctgttggagagtgctggaggaaatgcacttttactgtgctgcactttttatagagctgcattgtcggtgattccaatttaaaaatccatattcaaaaataccctcacacatccctgcatcagtgattctaatgatcagctttgactggacctcagctcacacgaatctccaaggaaaaactctacagagcatcttttagagcaagagattcatacaggccaagtgatgagagggggagtcaccaaggcttcagccccaagggcatctccagcctcaggccggcaggtcctatgtccttgacacaaatgcttcttgctgaaatcctccctagtgatgctgcgagtgctgttggtcccagttctgtgtagcttgccctgccccatgaagggccaccagccaagggccctggccacgtgtgcgccaccttactttggaagtctctggcttgtgtgctggatgaggctgccagaacttgttgggcgttcatcgctgttagtacatatattaaccgtgaggtgttaaacttttcttttgaaggtttggccagtttctaaaaaatgcacatttaaagagaagcatctaccacggctttaaaacaaaacaactctgagatgaacaatatgtgttatactcagagattaacaatctcaatcatacatactgattctttcagacatttaataaccactacatttttttgcattaatgaagtttgactatatgtgtaaagggactaaatatttttgcaacagcctgttctttgttcattcttttctggatagtgtgtcctctgtattgcggtagatttatacattctgttgcctaaatatgtgtgtaaaatgagctgataaactggagtactacttaaaaaaaagtctgtgatttataagatgtatatgctttctatgtgaatataagcttgtgcacaatgtttaaaagaaaaacaatgaattagaagagatcccccgtcccccagtctgacatatttcatacagaatgtttaaaagaaaaactctgctagtcttggcaaacatttggccatgtgaggcatgtggtcagtttccattttctattacctggaaagggccataaggaagcaggcagggcttaggtagcttggttacctaagttagaaagtaagagaatcatgattcggatatgaattgaagtggttggtacatggatacctgttctttaaaaggaatgtgggagatgagtcaagggtgaggccgattgttctgcccatgccctaccataccaatttcaataacaatcttgcctgtcattgcactcagaatcttaagatcatgtttcaaatatgttgattcaaacttgcttctaagcctgagtccagggatagcaatggtactgaccagctatggactgggagaacattgagtcctgttttccattggcttcagggcgcatccatgtggatataggaaaagcctctttccacagacttaggaagccccccgaccacgcggacgctcgctgggctgcactcagcaggctgcttgagtgggagctgactccaacatgccctgccctggctgggactaggcatgcttccagcccttcccgtgctctccctgctgtcaacacttgcgtacaaacctgcctagctgttgtaagttttcatcagtagcttaagtactagtagcaaaaacttaaattcattcagaaagttgccacttctgaatgagtagagcaggaaaagtaaactttactgaaacataatttgctgcaacagtcaacattgttatgctgaatgtgctctcaactgccctttgctcatcgccagatttattatccagtgtattcctaacagtcttttgttgtcgttgtttttaaaacaaaggtacggaccatgtgctatatataaatcgaatggcttaaactaatttgctatgatcctctaacaccgaaatttcccataaacttaagtgcctac

SEQ ID NO: 107379 - DNA, 3352 bp, Homo sapiens
  Payload ID: 1074
  Gene Symbol: ANKFY1
  Gene Name: ankyrin repeat and FYVE domain containing 1
  ENST ID: ENST00000572412
  CDS Start-End: 16-225
agtgccgggccagacatggcggaagaggaggtggccaagttggagaagcacttgatgcttctgcggcaggagtatgtcaagctgcagaagaagctggcggagacagagaagcgctgcgctctcttggctgcgcaggcaaacaaggagagcagcagcgagtccttcatcagccgtctgctggccatcgtggcagacctctacgagcaggagcagtacagatgctaatcctgaggtgacgatgacaatgcttcgctggatctatacagatgagctggagttcagagaggatgatgtgttcctgactgaactgatgaaactagcaaatcggtttcagctacagctcctcagggagagatgtgagaagggtgttatgtctctagtgaatgtcaggaactgtattcgcttctaccagacggcagaggagctgaatgccagcacactgatgaactactgtgcagaaattattgcaagtcattgggacgacctgaggaaggaggatttcagcagcatgagcgctcagttgttatacaaaatgatcaaatccaagacagagtacccgctacataaagccatcaaagtggagagagaagacgtggtcttcctgtatctgattgaaatggattcccagctccctgggaagctgaatgaagcggatcataacggagatctggcattagatctagccctctcacgacgactggagagtattgccaccacgctggttagtcacaaagctgatgtggacatggtggacaagagtggctggagcttgttacacaaaggaatccaaagaggagatctctttgctgccactttcctcattaagaatggggcctttgtcaacgctgctacactgggtgcccaggagacaccactgcaccttgtggccttgtacagttcaaagaaacactcagcagatgtgatgtctgagatggcgcagattgcagaggcccttctgcaggctggtgccaaccccaacatgcaggacagcaaggggaggactcctttacatgtgtccatcatggccgggaatgaatatgtgttcagtcagctgctgcagtgcaaacaactagatttagaactcaaagaccacgagggcagcacggctctgtggctggcagtgcagcatatcacagtgtcttctgaccagtctgtgaaccccttcgaagatgtccccgtggtaaatgggacttcatttgatgagaacagctttgcagccagactcatccagcgcggcagccacacagacgcacctgacacggcgacaggaaactgtttactacagcgggcagctggagcaggaaacgaggcagcagctcttttcctggcaaccaacggtgcccatgtcaaccacagaaacaagtggggagaaaccccgttgcacacagcgtgtcggcatggcctggccaacctcacggcagagctcctgcagcaaggcgccaacccaaacctgcagacggaggaagctctgcctctgccaaaggaggccgcatccctgaccagcttggcggacagcgtccatctgcagacgccactgcacatggcgatcgcctataaccatccggatgtggtgtctgtcatcctggagcagaaagccaatgctcttcatgccaccaacaacttgcagatcattccggacttcagcctcaaagattcccgagaccagactgtgctgggcctggcattatggactggcatgcacacgatcgcagcccagctgctgggctctggagccgccatcaatgacaccatgtcggatgggcagacgctactgcacatggccatacagcggcaggacagcaagagcgcactcttcctgctggagcaccaggcagatataaatgtcagcaggactcaggacggggagacagccctccagctggccatcagaaaccagcttccactcgtagttgatgccatatgcacccgaggagctgacatgtctgtgccagatgagaaggggaaccccccgctgtggcttgcattggcaaacaatctggaggacatcgcatccactctggtcagacatggctgtgatgccacatgctggggtccgggacctggtgggtgccttcagacgctcctgcacagagccattgatgaaaacaacgagcccaccgcctgctttcttattcgcagtggctgtgacgtgaacagtcccagacaaccaggcgccaatggagaaggagaggaagaggctagagatgggcagacccctttgcatttggcagcctcttgggggctggaagagacagtacagtgtcttctggagtttggtgccaacgtgaacgcacaggatgcagaaggaagaacccccatccacgtggccatcagcagccaacacggtgtcatcattcagctgttggtttctcaccccgatatccatttgaatgtacgagacagacaagggctgaccccgtttgcctgtgccatgactttcaagaacaacaagtcagccgaggccattctcaaacgagagtccggggctgctgagcaggtggataacaagggccggaatttccttcatgtggcagttcagaactctgatattgaaagtgtgctgttcctgatcagtgtccacgctaatgtgaattcaagagtccaggatgcctccaagttgacccccctgcacctcgctgtccaagcaggctcagaaattattgtccgcaatttgcttcttgcgggagccaaagtgaacgaattaaccaagcatcgccagactgccctccatcttgctgcccagcaggacctgcccaccatctgctcagtcctcctagagaatggcgtggactttgctgccgtggatgagaatggaaacaatgctcttcatcttgctgtcatgcacggccggctcaacaacatccgggttctcctgacagagtgcacagtggacgccgaagcctttaatctcagaggccagtcaccactgcacattttgggacaatatggcaaggagaatgcagcggccatctttgatctcttcctagaatgcatgccggggtatcctctggacaagccggatgcagacggcagcacggtgctgctcctggcatacatgaaagggaacgccaacttgtgccgcgccatcgtccggtcgggggctcgcctcggggtgaataacaaccagggagtcaacatcttcaactaccaggtcgccaccaagcagctcctgttccgactgctggatatgctgtccaaggagcctccgtggtgtgacggctcctactgctatgagtgcactgccaggttcggagtcaccactcgcaaacaccactgtcgtcactgcggacgtcttctttgccataaatgctcgaccaaggagattcctattataaagtttgatctgaacaag

SEQ ID NO: 107380 - DNA, 665 bp, Homo sapiens
  Payload ID: 1074
  Gene Symbol: ANKFY1
  Gene Name: ankyrin repeat and FYVE domain containing 1
  ENST ID: ENST00000575298
  CDS Start-End: 1-242
tgctgctcctggcatacatgaaagggaacgccaacttgtgccgcgccatcgtccggtcgggggctcgcctcggggtgaataacaaccagggagtcaacatcttcaactaccaggtcgccaccaagcagctcctgttccgactgctggatatgctgtccaaggagcctccgtggtgtgacggctcctactgctatgagtgcactgccaggttcggagtcaccactcgcaaacaccactggtaagaccccagcgtcactggcaaggagcgaggggactgccgctgatgtcattgcttccccccttctccaggacaggccgtgaacttgcctgggtcctgcacattgatgggcaaaccttgaccaaatggagggatgagatgagcacacccaaggatcctactgaggaacagagatgtagggaaggcagggagcctgcagacgggtggctttcctgctggaggctgaaggtgcacagtttccaggcagcctgccaggcctgtgccatccttcctgacttcctgcctgcaccaaagctgagatgagctactgccctcatggtgtgcctcagtatgggccgctttgccgagaactaaggggctgttcccattaaaatgagatagataggcgtgagccaccatgcctggcctgagctgctcttgatcttcc

SEQ ID NO: 107381 - DNA, 6081 bp, Homo sapiens
  Payload ID: 1075
  Gene Symbol: ANKIB1
  Gene Name: ankyrin repeat and IBR domain containing 1
  Uniprot ID: Q9P2G1
  ENST ID: ENST00000265742
  CDS Start-End: 377-3646
cgcagcggccggagagggatggggggcgcccacccagtctgagcctcgccgcgggcgccttcggctcacgcagcgcttcccgcgggccgccagtgcgcaccctcggccacatcagcctccgcctggcgggtgcacccgggccggcgaggaaggggcaaccgtccgggtgggtggggcgggctgggtacctgaggtcaccagctcggctgtagaggcaggggcggcggaggcggaactgcggagttgctgggtccaccgacccttaccctcagcgagagaagtaaccaatgtgaaagatgttgcagaagtgttccagaagtggctgaagatagaaggaaaaaagtgccactgcctatcagaaaaaacaaaacaaaacatgggaaatacaaccaccaaattccgtaaagcactcatcaatggtgatgaaaacctggcctgccaaatatatgaaaacaatcctcagctaaaagaatctcttgatccaaatacatcttatggggagccctaccagcacaatactccattacattatgctgctagacatggaatgaataaaatattagggacttttcttggtagagatggaaatccaaataaacggaatgtgcacaatgaaacatctatgcatttgttgtgtatgggacctcaaattatgatatctgaaggagcccttcatcctcgcttggcacgccccacagaagatgatttcagaagagcagattgtctgcagatgatcttaaaatggaaaggagcaaaacttgaccagggtgaatatgagagagcagctattgatgctgttgataacaaaaaaaacacacccttgcactatgctgctgcctcagggatgaaagcctgtgtagagcttttagtaaaacatggaggagacttgtttgctgagaatgaaaataaagatactccttgtgattgtgctgaaaagcaacaccacaaagatttggccctcaatctggaatctcaaatggtattctcacgggatcccgaggctgaagaaatagaagctgaatatgctgcattagacaaacgagagccatatgaaggattaaggcctcaggatcttcgtagactaaaagatatgcttattgtggaaactgcagacatgcttcaggctcctctctttactgctgaagctttacttcgagctcatgactgggacagggagaaattacttgaagcttggatgtccaacccggagaactgctgccaacgatcaggtgttcaaatgccaactccaccaccaagtgggtataatgcctgggacacgctcccatctccaagaactccaaggactacacgctcttctgtcacctccccagatgaaatcagcttatctcctggggatttagacaccagtttgtgtgacatttgtatgtgcagtatctctgtatttgaagaccctgtggatatgccctgtggacatgacttttgtagaggatgttgggagtcgtttttgaatctgaaaattcaagaaggtgaagctcacaacattttttgccctgcatatgattgcttccaacttgtacctgtggatatcatagaaagtgtagtttcaaaggagatggacaaacgatacctacagtttgatattaaggcctttgttgaaaataatcctgccattaaatggtgtcctactccaggctgtgacagagcagtaagactaacgaaacaagggtcaaatacatctggatctgatacactcagcttcccattgctgagagctcctgctgttgattgtggaaaaggacacctcttctgctgggagtgccttggtgaagcacatgagccttgtgactgccaaacatggaagaattggctgcaaaaaataaccgaaatgaaaccagaagaacttgtgggagttagtgaagcctacgaggatgccgccaattgtctctggttattaactaactccaagccttgtgccaactgtaagtctccaatacagaagaatgaaggctgcaatcacatgcagtgtgctaagtgcaagtatgacttttgctggatttgccttgaagagtggaaaaaacatagttcgtccactggaggttattacagatgtactcgctatgaagtcattcaacacgtggaggagcaatccaaggaaatgactgtggaggctgagaaaaaacacaaacgatttcaggaacttgacagatttatgcactattatacaagatttaaaaaccatgagcatagttatcagctagaacaacgccttcttaaaacagccaaagaaaagatggagcaattgagcagagctctcaaagaaactgaaggaggctgtccagataccactttcattgaagatgcagttcatgtgctcttaaaaactcggcgcattctcaagtgttcttatccatatggatttttcttggaacctaaaagcacaaagaaagaaatttttgaactaatgcaaacagacctagaaatggtcactgaagaccttgcccagaaagtcaataggccttaccttcgcacaccccgccacaagatcatcaaagcagcatgccttgtacagcagaagaggcaagaattcctggcatctgtggctcggggagtagctcctgcagactcaccagaagctccaaggcgcagctttgctggtggaacatgggattgggaatatttaggatttgcatcaccagaggaatatgctgaatttcagtatcggaggaggcacagacaacgtcgtcgaggagatgttcacagtctactcagtaatcctccagaccctgatgagccaagtgaaagcactttagatattccagaaggcggcagcagcagccgcaggcctggcacatccgtggtaagttctgcatctatgagtgtgctgcacagctcttccctgcgtgactacacccctgccagtcgctctgaaaaccaggactctcttcaggctctgagttccttggatgaagacgatcccaatatacttcttgcaatacagttatcactgcaagagtctgggctggccctcgatgaagaaactagagacttcctcagtaatgaagcatccttaggtgcgataggcacttctttaccttccaggctggactctgtccccagaaatacagatagccctcgggctgcattgagcagctctgagcttttggaacttggtgacagcctcatgagactaggagcagagaatgacccattttcaactgacaccctgagctcacaccctctcagtgaggcaagaagtgatttctgtccctcatctagtgatcctgactcagctggccaggaccccaacatcaatgacaatcttctcggcaacatcatggcttggtttcatgacatgaaccctcagagtattgccctgattcctccagcaactacagaaatcagtgcagattcccagctcccctgtatcaaagatgggtcagaaggtgtgaaggatgtggaactggtgctgccagaagattcaatgtttgaagatgccagtgtcagtgaaggtagaggaacccagatagaagaaaatcctttggaagaaaatattctggcgggggaagcagcatctcaagctggtgacagtggtaacgaggcagccaacagaggagatggttcagatgtttcaagtcaaacacctcaaacctcaagtgactggcttgaacaagtacatttagtgtgaactgcacacatctgggctctaaatgaattacaggtacagatggtatgctaggtggagtatgcttgatagagactttgattcacttaattccaactcagtgataaaccactgacattagggttgaatacagagaagttcccttgaatggtagcttcattttttattttaaccttacagggaatttcctttgtacttaattgaatagcttttcccctttttgctgacaaaaagaagagcaagagaaagagaaacaaaaatgaaataaataagttgtattccacactctaagaaaatgcagtcctctatttagcctaggcttgacaatacttaaattgaacatttaaactaaaggcttactccctaatctttgggtggctttcctttaaaaaaaaaaaaaaagttttcttcattctagaaatttattttggataaatccgataacatatatgtcctcaatctctttgtgctcttccataacttacttcctttttgtctgagcaatgtgaattgaagtctctttagtaccacatctaccatagtgtaattagttttaattttcacatgaatcaaaggtttcctttcatgtctatttacagtccaattgtgccaaactcttacttgtgtgctgactaacaaggcatttaggtgtgcagcatcctagagtgctccagggcagtgtcagcgttctcgggagtaaaaggtgccacttggtagcaatgatattccagaattaaatgggtttttgttgccatggagactgcatttatataaatgtagcctgtagcttaagttaactaaacctaatgctgctgttaaaaacagtttattttaatattaaaatacagttgattagcaacagcggtgctgtattttaagagacactttattggaagtgcaatcatagttatttgttttcacaattttacagtgcattctaattactgatgggtgcaattacttttaatcgtgttttataaaatagaaaaaaagtggagttttcatgagttatagtaaatcccacgattattaagaaattcagtaaaacatcctgcgcaacatgttaccgtgcctttgcctaacctaaatggatagttgccagttaaataagtgagtaattcaaatttcaatgtctcttctgaagtaactatgctatgaattgcaaagacctccataaaaccacccatggccttgcttttacactaactataacaactaaatgttcaatcagtttgtttgcctaactagcaaatgctgacatgtgtttgttctactgcgcaatactcatttgctgtgtgattactgtttagtgttgaaaaaaatcaacttcctagttatcagtgtcttactgtgaagaaaatactggtcttagttgtaattaggatacaatggtacagtgtgtaattaaaactagagtaaactgttggaatggctgttttacttaaatattatcaaaactagcataacataagcaaaatagataagtacaacactccatttagtgttttgccagattgttaccagaagtctacagataccaaactttcagttctgagtttgtacaggcaagtcctgggctgggtaaaaagttatattaatattgttatccacaagagatgtgattatgggttttgattactttttttttttccaaaccctgcttttgaaatatccttgtacttaaaattcatattgctaagacactgtattagaatatttaatattccccagatcctcttaggataaactgtgggaatcctcctatgccatggatatcaaaggtccacattagtttttatttctccagtgatcagaaacattgatatcaatccctattaaattagtggggggaatattaactttatctacagtgtattactgtatattaaactgaaatagtccattaaaggatttttttataaatttattttggattaaaaatatcaacaccaataagtttttagaccaagttgtaatttttccaatatagagtctttgcatcacactgaggcatcttgcacagctgcagttaaggtgagaaagaatgctctgtgtgaagacagtgtacacaatgggttccggtttccttgcaccttgtgcagtatcctttatttctgtgctgttctctcctgagcatgaaaaatgatcattatccaatttgtatttccttggtacatattttaaaaacaacacagtcattgactttacaattcagtaatgaagtttggcaaagcctattttgtaaacaagttaattttataatgtaaaaaaaaaaagttaatctaaccttgacttgttatttgcactttcatagtctatacttgatacattcccactttatatacagtaggattctacaaacgtgtagatgtttggccaaatgaatgctgttaataatatgtaaaattctttgattaaacatttattacttaaactac

SEQ ID NO: 107382 - DNA, 2036 bp, Homo sapiens
  Payload ID: 1075
  Gene Symbol: ANKIB1
  Gene Name: ankyrin repeat and IBR domain containing 1
  ENST ID: ENST00000422095
  CDS Start-End: 1-163
aagaatgaaggctgcaatcacatgcagtgtgctaagtgcaagtatgacttttgctggatttgccttgaagagtggaaaaaacatagttcgtccactggaggttattacagatgtactcgctatgaagtcattcaacacgtggaggagcaatccaaggaaatgactgtggaggctgagaaaaaacacaaacgatttcaggaacttgacagatttatgcactattatacaagatttaaaaaccatgagcatagttatcagctagaacaacgccttcttaaaacagccaaagaaaagatggagcaattgagcagagctctcaaagaaactgaaggaggctgtccagataccactttcattgaagatgcagttcatgtgctcttaaaaactcggcgcattctcaagtgttcttatccatatggatttttcttggaacctaaaagcacaaagaaagaaatttttgaactaatgcaaacagacctagaaatggtcactgaagaccttgcccagaaagtcaataggccttaccttcgcacaccccgccacaagatcatcaaagcagcatgccttgtacagcagaagaggcaagaattcctggcatctgtggctcggggagtagctcctgcagactcaccagaagctccaaggcgcaggaatatgctgaatttcagtatcggaggaggcacagacaacgtcgtcgaggagatgttcacagtctactcagtaatcctccagaccctgatgagccaagtgaaagcactttagatattccagaaggcggcagcagcagccgcaggcctggcacatccgtggtaagttctgcatctatgagtgtgctgcacagctcttccctgcgtgactacacccctgccagtcgctctgaaaaccaggactctcttcaggctctgagttccttggatgaagacgatcccaatatacttcttgcaatacagttatcactgcaagagtctgggctggccctcgatgaagaaactagagacttcctcagtaatgaagcatccttaggtgcgataggcacttctttaccttccaggctggactctgtccccagaaatacagatagccctcgggctgcattgagcagctctgagcttttggaacttggtgacagcctcatgagactaggagcagagaatgacccattttcaactgacaccctgagctcacaccctctcagtgaggcaagaagtgatttctgtccctcatctagtgatcctgactcagctggccaggaccccaacatcaatgacaatcttctcggcaacatcatggcttggtttcatgacatgaaccctcagagtattgccctgattcctccagcaactacagaaatcagtgcagattcccagctcccctgtatcaaagatgggtcagaaggtgtgaaggatgtggaactggtgctgccagaagattcaatgtttgaagatgccagtgtcagtgaaggtagaggaacccagatagaagaaaatcctttggaagaaaatattctggcgggggaagcagcatctcaagctggtgacagtggtaacgaggcagccaacagaggagatggttcagatgtttcaagtcaaacacctcaaacctcaagtgactggcttgaacaagtacatttagtgtgaactgcacacatctgggctctaaatgaattacaggtacagatggtatgctaggtggagtatgcttgatagagactttgattcacttaattccaactcagtgataaaccactgacattagggttgaatacagagaagttcccttgaatggtagcttcattttttattttaaccttacagggaatttcctttgtacttaattgaatagcttttcccctttttgctgacaaaaagaagagcaagagaaagagaaacaaaaatgaaataaataagttgtattccacactctaagaaaatgcagtcctctatttagcctaggcttgacaatacttaaattgaacatttaaactaaaggcttactccctaatctttgggtggctttcctttaaaaaaaaaaaaaaa

SEQ ID NO: 107383 - DNA, 642 bp, Homo sapiens
  Payload ID: 1075
  Gene Symbol: ANKIB1
  Gene Name: ankyrin repeat and IBR domain containing 1
  ENST ID: ENST00000413588
  CDS Start-End: 1-254
cgctcccatctccaagaactccaaggactacacgctcttctgtcacctccccagatgaaatcagcttatctcctggggatttagacaccagtttgtgtgacatttgtatgtgcagtatctctgtatttgaagaccctgtggatatgccctgtggacatgacttttgtagaggatgttgggagtccattgtaataagcagagagagcctacctatgatatcatctgtgaattttacctgcaagataaaaatataggtttttgaatctgaaaattcaagaaggtgaagctcacaacattttttgccctgcatatgattgcttccaacttgtacctgtggatatcatagaaagtgtagtttcaaaggagatggacaaacgatacctacagtttgatattaaggcctttgttgaaaataatcctgccattaaatggtgtcctactccaggctgtgacagagcagtaagactaacgaaacaagggtcaaatacatctggatctgatacactcagcttcccattgctgagagctcctgctgttgattgtggaaaaggacacctcttctgctgggagtgccttggtgaagcacatgagccttgtgactgccaaacatggaagaattggctgcaaaaaataaccgaaatg

SEQ ID NO: 107384 - DNA, 547 bp, Homo sapiens
  Payload ID: 1075
  Gene Symbol: ANKIB1
  Gene Name: ankyrin repeat and IBR domain containing 1
  ENST ID: ENST00000442183
  CDS Start-End: 146-547
agttcttgtttgggcaaaatttcctacatttttcactatcccacaaattggctgaaatgtgaaagatgttgcagaagtgttccagaagtggctgaagatagaaggaaaaaagtgccactgcctatcagaaaaaacaaaacaaaacatgggaaatacaaccaccaaattccgtaaagcactcatcaatggtgatgaaaacctggcctgccaaatatatgaaaacaatcctcagctaaaagaatctcttgatccaaatacatcttatggggagccctaccagcacaatactccattacattatgctgctagacatggaatgaataaaatattagggacttttcttggtagagatggaaatccaaataaacggaatgtgcacaatgaaacatctatgcatttgttgtgtatgggacctcaaattatgatatctgaaggagcccttcatcctcgcttggcacgccccacagaagatgatttcagaagagcagattgtctgcagatgatcttaaaatggaaaggagcaaaacttgaccagggtgaatatgag

SEQ ID NO: 107385 - DNA, 774 bp, Homo sapiens
  Payload ID: 1075
  Gene Symbol: ANKIB1
  Gene Name: ankyrin repeat and IBR domain containing 1
  ENST ID: ENST00000439883
  CDS Start-End: 1-487
gacttttcttggtagagatggaaatccaaataaacggaatgtgcacaatgaaacatctatgcatttgttgtgtatgggacctcaaattatgatatctgaaggagcccttcatcctcgcttggcacgccccacagaagatgatttcagaagagcagattgtctgcagatgatcttaaaatggaaaggagcaaaacttgaccagggtgaatatgagagagcagctattgatgctgttgataacaaaaaaaacacacccttgcactatgctgctgcctcagggatgaaagcctgtgtagagcttttagtaaaacatggaggagacttgtttgctgagaatgaaaataaagatactccttgtgattgtgctgaaaagcaacaccacaaagatttggccctcaatctggaatctcaaatggtattctcacgggatcccgaggctgaagaaatagaagctgaatatgctgcattagacaaacgagagtactgactgctttgaaggttattgctggtttgtttagtctgaaaatggaagcagtttatctttgcaacaggaaagagaaagccatatgaaggattaaggcctcaggatcttcgtagactaaaagatatgcttattgtggaaactgcagacatgcttcaggctcctctctttactgctgaagctttacttcgagctcatgactgggacagggagaaattacttgaagcttggatgtccaacccggagaactgctgccaacgatcaggtgttcaaatgccaactccaccaccaag

SEQ ID NO: 107386 - DNA, 2062 bp, Homo sapiens
  Payload ID: 1076
  Gene Symbol: ANKHD1
  Gene Name: ankyrin repeat and KH domain containing 1
  ENST ID: ENST00000246149
  CDS Start-End: 1-2062
ttaaggcaggggctgatatagaacttggctgctccacacctctgatggaggcatctcaggagggacacctggaattggttaaatatttgctggcttctggcgctaatgtgcatgctacaacagcaacaggagacacagccttaacctatgcttgtgaaaatggacatacggatgttgcagatgttttacttcaagcaggggctgatttagacaagcaggaggacatgaagactattttggagggcatagatccggccaagcatcaggaacatgaatctgaaggtggaagaacacctttgatgaaagctgcaagagctggtcatttgtgcactgtgcagtttcttattagcaaaggtgccaatgttaacagggctacagccaataatgatcatacagtagtgtcgctggcatgtgcaggaggccacctggcagttgttgagcttctcttggctcatggggctgaccctactcatcgactcaaggatggttcaacaatgctcattgaagctgcaaagggtggccatactaatgtagtttcttatctgttggattatccaaataatgttctgtcagttcccaccacagatgtgtctcagctccctccaccttctcaagatcagtctcaggaacctgacagaacttcacaggagaactctcctgcccttttaggagtgcaaaaagctgtgagtaccagagtgcccactggttccaacagttcttctcagaccacagagtgtcttacacctgaatcctgttcgcagactacaagcaatgtggcttcccaatcgatgcctcctgtgtatccttcagttgacattgatgcacatactgagagcaatcatgacacagcattaacactagcttgtgcaggtggtcatgaagaacttgtatctgtgctcattgcacgggatgccaaaattgaacacagagacaaaaaaggtttcacaccactaatcctggcagcaacagcagggcatgttggagttgttgaaatccttttggataaaggtggagatatagaagcacagtctgaacgaactaaggatactccgctttcattggcatgttctggtggacgtcaggaggtggtagacttgctgctggctcgaggtgcaaataaagaacataggaacgtatctgattatacaccactgagtctagctgcgtctggaggatatgttaatatcattaagattctgcttaatgctggggcagaaattaattcaaggactgggagtaaactaggtatttctcccctgatgttggctgcaatgaatggacatgttcctgcagtaaaattgctgctcgatatgggttcagacattaatgcccaaatagagaccaatcggaacacggctctcaccctggcctgtttccagggccgagcagaagtagtgagtttgcttctggaccgaaaagccaatgttgaacatagggcaaagacgggtcttacccccttgatggaagcagcttctggagggtatgcagaggttggaagagttcttcttgataaaggagcagatgttaatgctccccctgtgccttcctcaagagatactgctttaacaatagcagcagacaaaggtcactacaaattttgtgaactcctgattcataggggagcccacattgatgttcgtaacaaaaagggaaatacgccactttggctggcatccaatggaggtcattttgatgttgtgcagttgctagtgcaagcaggtgctgatgtggatgcagcagataaccggaaaatcacacctcttatgtcagcatttcgcaagggtcatgtaaaagttgttcaatatttggtaaaggaagtaaatcagttcccttctgatatagaatgcatgagatacatagcaacaattacagataaggaactgttgaaaaaatgtcatcaatgtgtcgaaaccattgtgaaggctaaagaccagcaagctgcagaagcaaataagaatgcgagtattcttttaaaggaacttgatctggaaaagtcaagagaagagagcagaaagcaggctcttgctgctaaaagagaaaaaagaaaagaaaagagaaaaaa

SEQ ID NO: 107387 - DNA, 7606 bp, Homo sapiens
  Payload ID: 1076
  Gene Symbol: ANKHD1
  Gene Name: ankyrin repeat and KH domain containing 1
  ENST ID: ENST00000297183
  CDS Start-End: 5006-7606
gggaggcagcaggttaggcagtgagaagttagtggcgctgctgggacgggggaaaggagacgcttcttcctcttgctgctcttctcgttcccgagatcagcggcggcggtgaccgcgagtgggtcggcaccgtctccggctccgggtgcgaacaatgctgactgatagcggaggcggcggcacctcctttgaggaggacctggactctgtggctccgcgatccgccccagctggggcctcggagccgcctccgccgggaggggtcggtctggggatccgcaccgtgaggctctttggggaggccgggccagcgtcgggagtcggcagcagcggcggcggcggcagcggcagcggtacgggcggaggggacgcggcgctggatttcaagttggcggctgccgtgctgaggaccgggggtggaggtggtgcctctggcagtgacgaggacgaagtgtccgaggttgaatcatttattttggaccaagaagatctggataacccagtgcttaaaacaacatcagagatattcttatcaagtactgcagaaggagcagacttacgcactgtggatccagagacacaggcacgactagaagcattgctagaagcagcaggaattggcaaattgtcaactgctgatggtaaagcttttgcagatcctgaggtactccggagactgacatcctcagttagttgtgcactggatgaagctgctgctgcactgacacggatgaaagcagaaaacagccacaatgcaggacaagtggacactcgcagtctagcagaagcttgttcagatggggatgttaatgctgttcgtaaattgctagatgaaggcagaagtgtaaatgaacatacagaagaaggagaaagcctgctgtgtttggcttgttcagcagggtattatgaattagcacaagtattgcttgctatgcatgctaatgttgaagatcgagggaataaaggagacataactcccctgatggcagcttccagtggaggttacttagatattgtgaaattattacttcttcatgatgctgatgtcaactcccagtctgcaacaggaaacactgcgctaacttatgcatgtgctggaggatttgttgacattgttaaagtgctccttaatgaaggtgcaaatatagaagatcataatgaaaatggacatactcccttaatggaagcagccagtgcaggtcatgtggaagttgcaagagttcttttagatcatggtgcaggcatcaacactcattctaatgaattcaaagaaagtgctctaacacttgcttgctacaaaggccatttggatatggttcgctttctacttgaagctggtgcagatcaagagcacaaaacagatgagatgcacactgccttaatggaggcctgcatggatggacatgtagaggtggcacgtttgcttttggatagtggtgctcaagtgaacatgcctgcagattcatttgaatctccattgacgctagctgcctgtggaggacatgttgaattggcagctctacttattgaaaggggagcaaatcttgaagaagttaatgatgaaggatacactcccttgatggaagctgcccgggaaggacatgaagaaatggtggcactactcttagcacaaggagcaaatataaatgcccagacagaagaaactcaagaaactgctcttactttggcttgctgtggaggattttctgaagttgcagactttcttattaaggcaggggctgatatagaacttggctgctccacacctctgatggaggcatctcaggagggacacctggaattggttaaatatttgctggcttctggcgctaatgtgcatgctacaacagcaacaggagacacagccttaacctatgcttgtgaaaatggacatacggatgttgcagatgttttacttcaagcaggggctgatttagaacatgaatctgaaggtggaagaacacctttgatgaaagctgcaagagctggtcatttgtgcactgtgcagtttcttattagcaaaggtgccaatgttaacagggctacagccaataatgatcatacagtagtgtcgctggcatgtgcaggaggccacctggcagttgttgagcttctcttggctcatggggctgaccctactcatcgactcaaggatggttcaacaatgctcattgaagctgcaaagggtggccatactaatgtagtttcttatctgttggattatccaaataatgttctgtcagttcccaccacagatgtgtctcagctccctccaccttctcaagatcagtctcaggtgccacgtgtgccaacgcatacacttgccatggttgtacctccccaggaacctgacagaacttcacaggagaactctcctgcccttttaggagtgcaaaaaggtacatccaagcagaagtccagttccctccaggtagcagatcaggacctactgccatcttttcacccataccagcctttggagtgcatagtagaggagactgaaggcaagctgaatgaactgggacaaagaattagtgctattgaaaaagcacagcttaagtcactggagttaattcaaggtgaacctctgaacaaagataagatagaagaacttaaaaagaacagagaagagcaagtccagaagaagaagaaaatattgaaagaactgcagaaagtggaaaggcagttgcagatgaaaacacagcagcaatttaccaaagaatacttggaaaccaaaggtcagaaagacacagtgtctctacaccaacagtgctctcatagaggagtcttcccagaaggggaaggagatggtagtctcccagaggatcacttttcagagttacctcaggttgacacaatcttatttaaagataatgatgttgatgatgagcaacagtctccaccatcggcagaacagattgattttgtcccagtccagcctttatcatctccacagtgtaacttttccagtgacttaggttctaatgggacaaattctcttgaacttcagaaagtatcaggtaatcagcagattgtaggacagcctcagattgctattactggacatgatcaggggctgttagttcaagaaccagatggactaatggttgcaactccagctcagacgcttaccgacactcttgatgacctgatagcagctgtgagtaccagagtgcccactggttccaacagttcttctcagaccacagagtgtcttacacctgaatcctgttcgcagactacaagcaatgtggcttcccaatcgatgcctcctgtgtatccttcagttgacattgatgcacatactgagagcaatcatgacacagcattaacactagcttgtgcaggtggtcatgaagaacttgtatctgtgctcattgcacgggatgccaaaattgaacacagagacaaaaaaggtttcacaccactaatcctggcagcaacagcagggcatgttggagttgttgaaatccttttggataaaggtggagatatagaagcacagtctgaacgaactaaggatactccgctttcattggcatgttctggtggacgtcaggaggtggtagacttgctgctggctcgaggtgcaaataaagaacataggaacgtatctgattatacaccactgagtctagctgcgtctggaggatatgttaatatcattaagattctgcttaatgctggggcagaaattaattcaaggactgggagtaaactaggtatttctcccctgatgttggctgcaatgaatggacatgttcctgcagtaaaattgctgctcgatatgggttcagacattaatgcccaaatagagaccaatcggaacacggctctcaccctggcctgtttccagggccgagcagaagtagtgagtttgcttctggaccgaaaagccaatgttgaacatagggcaaagacgggtcttacccccttgatggaagcagcttctggagggtatgcagaggttggaagagttcttcttgataaaggagcagatgttaatgctccccctgtgccttcctcaagagatactgctttaacaatagcagcagacaaaggtcactacaaattttgtgaactcctgattcataggggagcccacattgatgttcgtaacaaaaagggaaatacgccactttggctggcatccaatggaggtcattttgatgttgtgcagttgctagtgcaagcaggtgctgatgtggatgcagcagataaccggaaaatcacacctcttatgtcagcatttcgcaagggtcatgtaaaagttgttcaatatttggtaaaggaagtaaatcagttcccttctgatatagaatgcatgagatacatagcaacaattacagataaggaactgttgaaaaaatgtcatcaatgtgtcgaaaccattgtgaaggctaaagaccagcaagctgcagaagcaaataagaatgcgagtattcttttaaaggaacttgatctggaaaagtcaagagaagagagcagaaagcaggctcttgctgctaaaagagaaaaaagaaaagaaaagagaaaaaagaaaaaagaggaacagaaaaggaaacaggaagaagatgaagaaaacaaacctaaggagaattcggaactaccagaggatgaagatgaagaggagaatgatgaagatgtggagcaagaagttcccatagaacctcctagtgcaaccaccaccactacgattggaatctctgcaacatctgcaacattcacaaatgtgtttgggaaaaaaagggccaatgtggtgacaactcccagcaccaatcggaaaaataagaagaacaaaacaaaagaaacccctcctacagcacatttaattttaccagaacaacatatgtctttagcccaacaaaaggcagataaaaataaaataaatggagaacctagaggtggtggtgcaggtgggaatagtgattcagataacttggacagcacagactgcaacagtgagagtagcagtggtggtaaaagccaagagttaaattttgtgatggatgtgaattcctctaaatacccctcactgctccttcattcccaagaagaaaagacaagtactgctacttccaaaactcagacacgacttgaaggtgaagtgactcctaattccttgtcaaccagctacaagacagtgtcattgccattaagctctccaaacataaagctgaatctcactagccctaaaaggggtcagaaaagagaagaagggtggaaagaagttgtacgaaggtcaaagaaattgtctgttccagcctcagtggtgtcgaggataatgggaagaggaggatgcaacatcactgcaatacaggatgttactggtgcccatattgatgtggataaacaaaaagataagaatggcgagagaatgatcacaataaggggtggcacagaatcaacaagatatgcagttcaactaatcaatgcactcattcaagatcctgctaaggaactggaagacttgattcctaaaaatcatatcagaacacctgccagcaccaaatcaattcatgctaacttctcatctggagtaggtaccacagcagcttccagtaaaaatgcatttcctttgggtgctccaactcttgtaacttcacaggcaacaacgttatctacgttccagcccgctaataaacttaataagaatgttccaacaaatgtacgttcttctttcccagtttctctacccttagcttatcctcaccctcattttgccctgctggctgctcaaactatgcaacagattcggcatcctcgcttacccatggcccagtttggaggaaccttctcaccttctcctaacacatggggaccattcccagtgagacctgtgaatcctggcaacacaaatagctctccaaagcataataacacaagccgtctacctaaccagaacgggactgttttaccctcagagtctgctggactagctactgccagttgtcctatcactgtctcttctgtagttgctgccagtcagcaactgtgtgtcactaatacccggactccttcatcagtcagaaagcagttgtttgcctgtgtgcctaagacaagtcctccagcaacagtgatttcttctgtgacaagcacttgtagttccctgccttctgtctcctctgcacctatcactagcgggcaagctcccaccacatttctacctgcaagtacttctcaagcacagctttcttcacaaaagatggagtctttctctgctgtgccacccaccaaagagaaagtgtccacacaggaccagcccatggcaaacctatgtaccccatcttcaactgcaaacagttgcagtagctctgccagcaacaccccgggagctccagaaactcacccatccagtagtcccactcctacttccagtaacacacaagaggaggcacagccatccagtgtgtctgatttaagtcctatgtcaatgccttttgcatctaactcagaacctgctccattgactttgacatcacccagaatggttgctgctgataatcaggacaccagtaatttacctcagttagctgtaccagcacctcgagtttctcatcgaatgcagcccagaggttctttttactccatggtaccaaatgcaactattcaccaggatccccagtctatttttgttacgaatccagttactttaacaccacctcaaggcccaccagctgcagtgcagctttcttcagctgtgaacattatgaatggttctcagatgcacataaacccagcaaataagtctttgccacctacatttggcccagccacacttttcaatcacttcagcagtctttttgatagtagtcaggtgccagctaaccagggctggggagatggtccactgtcctcacgagttgctacagatgcctctttcactgttcagtcagcgttcctgggtaactcagtgcttggacacttggaaaacatgcaccctgataactcaaaggcacctggcttcagaccaccttcccagcgagtttctactagtccagttgccacttctgccccaccaacgttgggccaaccaaaaggagtcagtgccagtcaagatcgaaagatacctcccccaattggaacagagagactggcccgaattcggcaaggagggtctgttgcacaagccccggcggggaccagttttgtcgctcccgttggacacagtggaatctggtcatttggtgtcaatgctgtgtcagaaggcttatcaggttggtcgcaatctgtgatggggaaccatccaatgcatcaacaattatcagacccaagcacattctcccaacatcagccaatggagagagatgattctggaatggtagccccctctaacatttttcatcagcctatggcaagtggttttgtggatttttctaaaggtctgccaatttccatgtatggaggcaccataataccctctcatcctcagcttgctgatgttccaggaggccctctgtttaatggacttcacaatccagatcctgcttggaaccctatgataaaagttatccaaaattcaactgaatgcactgatgcccagcagatttggcctggcacgtgggcacctcatattggaaacatgcatctcaaatatgtcaactaa

SEQ ID NO: 107388 - DNA, 8221 bp, Homo sapiens
  Payload ID: 1076
  Gene Symbol: ANKHD1
  Gene Name: ankyrin repeat and KH domain containing 1
  Uniprot ID: Q8IWZ3
  ENST ID: ENST00000360839
  CDS Start-End: 155-7783
gggaggcagcaggttaggcagtgagaagttagtggcgctgctgggacgggggaaaggagacgcttcttcctcttgctgctcttctcgttcccgagatcagcggcggcggtgaccgcgagtgggtcggcaccgtctccggctccgggtgcgaacaatgctgactgatagcggaggcggcggcacctcctttgaggaggacctggactctgtggctccgcgatccgccccagctggggcctcggagccgcctccgccgggaggggtcggtctggggatccgcaccgtgaggctctttggggaggccgggccagcgtcgggagtcggcagcagcggcggcggcggcagcggcagcggtacgggcggaggggacgcggcgctggatttcaagttggcggctgccgtgctgaggaccgggggtggaggtggtgcctctggcagtgacgaggacgaagtgtccgaggttgaatcatttattttggaccaagaagatctggataacccagtgcttaaaacaacatcagagatattcttatcaagtactgcagaaggagcagacttacgcactgtggatccagagacacaggcacgactagaagcattgctagaagcagcaggaattggcaaattgtcaactgctgatggtaaagcttttgcagatcctgaggtactccggagactgacatcctcagttagttgtgcactggatgaagctgctgctgcactgacacggatgaaagcagaaaacagccacaatgcaggacaagtggacactcgcagtctagcagaagcttgttcagatggggatgttaatgctgttcgtaaattgctagatgaaggcagaagtgtaaatgaacatacagaagaaggagaaagcctgctgtgtttggcttgttcagcagggtattatgaattagcacaagtattgcttgctatgcatgctaatgttgaagatcgagggaataaaggagacataactcccctgatggcagcttccagtggaggttacttagatattgtgaaattattacttcttcatgatgctgatgtcaactcccagtctgcaacaggaaacactgcgctaacttatgcatgtgctggaggatttgttgacattgttaaagtgctccttaatgaaggtgcaaatatagaagatcataatgaaaatggacatactcccttaatggaagcagccagtgcaggtcatgtggaagttgcaagagttcttttagatcatggtgcaggcatcaacactcattctaatgaattcaaagaaagtgctctaacacttgcttgctacaaaggccatttggatatggttcgctttctacttgaagctggtgcagatcaagagcacaaaacagatgagatgcacactgccttaatggaggcctgcatggatggacatgtagaggtggcacgtttgcttttggatagtggtgctcaagtgaacatgcctgcagattcatttgaatctccattgacgctagctgcctgtggaggacatgttgaattggcagctctacttattgaaaggggagcaaatcttgaagaagttaatgatgaaggatacactcccttgatggaagctgcccgggaaggacatgaagaaatggtggcactactcttagcacaaggagcaaatataaatgcccagacagaagaaactcaagaaactgctcttactttggcttgctgtggaggattttctgaagttgcagactttcttattaaggcaggggctgatatagaacttggctgctccacacctctgatggaggcatctcaggagggacacctggaattggttaaatatttgctggcttctggcgctaatgtgcatgctacaacagcaacaggagacacagccttaacctatgcttgtgaaaatggacatacggatgttgcagatgttttacttcaagcaggggctgatttagaacatgaatctgaaggtggaagaacacctttgatgaaagctgcaagagctggtcatttgtgcactgtgcagtttcttattagcaaaggtgccaatgttaacagggctacagccaataatgatcatacagtagtgtcgctggcatgtgcaggaggccacctggcagttgttgagcttctcttggctcatggggctgaccctactcatcgactcaaggatggttcaacaatgctcattgaagctgcaaagggtggccatactaatgtagtttcttatctgttggattatccaaataatgttctgtcagttcccaccacagatgtgtctcagctccctccaccttctcaagatcagtctcaggtgccacgtgtgccaacgcatacacttgccatggttgtacctccccaggaacctgacagaacttcacaggagaactctcctgcccttttaggagtgcaaaaaggtacatccaagcagaagtccagttccctccaggtagcagatcaggacctactgccatcttttcacccataccagcctttggagtgcatagtagaggagactgaaggcaagctgaatgaactgggacaaagaattagtgctattgaaaaagcacagcttaagtcactggagttaattcaaggtgaacctctgaacaaagataagatagaagaacttaaaaagaacagagaagagcaagtccagaagaagaagaaaatattgaaagaactgcagaaagtggaaaggcagttgcagatgaaaacacagcagcaatttaccaaagaatacttggaaaccaaaggtcagaaagacacagtgtctctacaccaacagtgctctcatagaggagtcttcccagaaggggaaggagatggtagtctcccagaggatcacttttcagagttacctcaggttgacacaatcttatttaaagataatgatgttgatgatgagcaacagtctccaccatcggcagaacagattgattttgtcccagtccagcctttatcatctccacagtgtaacttttccagtgacttaggttctaatgggacaaattctcttgaacttcagaaagtatcaggtaatcagcagattgtaggacagcctcagattgctattactggacatgatcaggggctgttagttcaagaaccagatggactaatggttgcaactccagctcagacgcttaccgacactcttgatgacctgatagcagctgtgagtaccagagtgcccactggttccaacagttcttctcagaccacagagtgtcttacacctgaatcctgttcgcagactacaagcaatgtggcttcccaatcgatgcctcctgtgtatccttcagttgacattgatgcacatactgagagcaatcatgacacagcattaacactagcttgtgcaggtggtcatgaagaacttgtatctgtgctcattgcacgggatgccaaaattgaacacagagacaaaaaaggtttcacaccactaatcctggcagcaacagcagggcatgttggagttgttgaaatccttttggataaaggtggagatatagaagcacagtctgaacgaactaaggatactccgctttcattggcatgttctggtggacgtcaggaggtggtagacttgctgctggctcgaggtgcaaataaagaacataggaacgtatctgattatacaccactgagtctagctgcgtctggaggatatgttaatatcattaagattctgcttaatgctggggcagaaattaattcaaggactgggagtaaactaggtatttctcccctgatgttggctgcaatgaatggacatgttcctgcagtaaaattgctgctcgatatgggttcagacattaatgcccaaatagagaccaatcggaacacggctctcaccctggcctgtttccagggccgagcagaagtagtgagtttgcttctggaccgaaaagccaatgttgaacatagggcaaagacgggtcttacccccttgatggaagcagcttctggagggtatgcagaggttggaagagttcttcttgataaaggagcagatgttaatgctccccctgtgccttcctcaagagatactgctttaacaatagcagcagacaaaggtcactacaaattttgtgaactcctgattcataggggagcccacattgatgttcgtaacaaaaagggaaatacgccactttggctggcatccaatggaggtcattttgatgttgtgcagttgctagtgcaagcaggtgctgatgtggatgcagcagataaccggaaaatcacacctcttatgtcagcatttcgcaagggtcatgtaaaagttgttcaatatttggtaaaggaagtaaatcagttcccttctgatatagaatgcatgagatacatagcaacaattacagataaggaactgttgaaaaaatgtcatcaatgtgtcgaaaccattgtgaaggctaaagaccagcaagctgcagaagcaaataagaatgcgagtattcttttaaaggaacttgatctggaaaagtcaagagaagagagcagaaagcaggctcttgctgctaaaagagaaaaaagaaaagaaaagagaaaaaagaaaaaagaggaacagaaaaggaaacaggaagaagatgaagaaaacaaacctaaggagaattcggaactaccagaggatgaagatgaagaggagaatgatgaagatgtggagcaagaagttcccatagaacctcctagtgcaaccaccaccactacgattggaatctctgcaacatctgcaacattcacaaatgtgtttgggaaaaaaagggccaatgtggtgacaactcccagcaccaatcggaaaaataagaagaacaaaacaaaagaaacccctcctacagcacatttaattttaccagaacaacatatgtctttagcccaacaaaaggcagataaaaataaaataaatggagaacctagaggtggtggtgcaggtgggaatagtgattcagataacttggacagcacagactgcaacagtgagagtagcagtggtggtaaaagccaagagttaaattttgtgatggatgtgaattcctctaaatacccctcactgctccttcattcccaagaagaaaagacaagtactgctacttccaaaactcagacacgacttgaaggtgaagtgactcctaattccttgtcaaccagctacaagacagtgtcattgccattaagctctccaaacataaagctgaatctcactagccctaaaaggggtcagaaaagagaagaagggtggaaagaagttgtacgaaggtcaaagaaattgtctgttccagcctcagtggtgtcgaggataatgggaagaggaggatgcaacatcactgcaatacaggatgttactggtgcccatattgatgtggataaacaaaaagataagaatggcgagagaatgatcacaataaggggtggcacagaatcaacaagatatgcagttcaactaatcaatgcactcattcaagatcctgctaaggaactggaagacttgattcctaaaaatcatatcagaacacctgccagcaccaaatcaattcatgctaacttctcatctggagtaggtaccacagcagcttccagtaaaaatgcatttcctttgggtgctccaactcttgtaacttcacaggcaacaacgttatctacgttccagcccgctaataaacttaataagaatgttccaacaaatgtacgttcttctttcccagtttctctacccttagcttatcctcaccctcattttgccctgctggctgctcaaactatgcaacagattcggcatcctcgcttacccatggcccagtttggaggaaccttctcaccttctcctaacacatggggaccattcccagtgagacctgtgaatcctggcaacacaaatagctctccaaagcataataacacaagccgtctacctaaccagaacgggactgttttaccctcagagtctgctggactagctactgccagttgtcctatcactgtctcttctgtagttgctgccagtcagcaactgtgtgtcactaatacccggactccttcatcagtcagaaagcagttgtttgcctgtgtgcctaagacaagtcctccagcaacagtgatttcttctgtgacaagcacttgtagttccctgccttctgtctcctctgcacctatcactagcgggcaagctcccaccacatttctacctgcaagtacttctcaagcacagctttcttcacaaaagatggagtctttctctgctgtgccacccaccaaagagaaagtgtccacacaggaccagcccatggcaaacctatgtaccccatcttcaactgcaaacagttgcagtagctctgccagcaacaccccgggagctccagaaactcacccatccagtagtcccactcctacttccagtaacacacaagaggaggcacagccatccagtgtgtctgatttaagtcctatgtcaatgccttttgcatctaactcagaacctgctccattgactttgacatcacccagaatggttgctgctgataatcaggacaccagtaatttacctcagttagctgtaccagcacctcgagtttctcatcgaatgcagcccagaggttctttttactccatggtaccaaatgcaactattcaccaggatccccagtctatttttgttacgaatccagttactttaacaccacctcaaggcccaccagctgcagtgcagctttcttcagctgtgaacattatgaatggttctcagatgcacataaacccagcaaataagtctttgccacctacatttggcccagccacacttttcaatcacttcagcagtctttttgatagtagtcaggtgccagctaaccagggctggggagatggtccactgtcctcacgagttgctacagatgcctctttcactgttcagtcagcgttcctgggtaactcagtgcttggacacttggaaaacatgcaccctgataactcaaaggcacctggcttcagaccaccttcccagcgagtttctactagtccagttgggttaccatccattgacccatcaggcagctccccatcttcctcttctgctcctctggcaagtttttccggcataccaggaacaagggttttcctgcaagggccagctcctgttgggactcctagtttcaacagacaacatttttctccccatccttggacaagcgcctcaaactcatccacttctgccccaccaacgttgggccaaccaaaaggagtcagtgccagtcaagatcgaaagatacctcccccaattggaacagagagactggcccgaattcggcaaggagggtctgttgcacaagccccggcggggaccagttttgtcgctcccgttggacacagtggaatctggtcatttggtgtcaatgctgtgtcagaaggcttatcaggttggtcgcaatctgtgatggggaaccatccaatgcatcaacaattatcagacccaagcacattctcccaacatcagccaatggagagagatgattctggaatggtagccccctctaacatttttcatcagcctatggcaagtggttttgtggatttttctaaaggtctgccaatttccatgtatggaggcaccataataccctctcatcctcagcttgctgatgttccaggaggccctctgtttaatggacttcacaatccagatcctgcttggaaccctatgataaaagttatccaaaattcaactgaatgcactgatgcccagcagatttggcctggcacgtgggcacctcatattggaaacatgcatctcaaatatgtcaactaagttagaaggtctttactctttagccttgtttaagaaacctatgaccttggaagaaccatggggatttttttttaatgtgcctaagaaattttctctgaggctttagcaatggaaatttgattgcccattgtataagaacaaattgatttcctatccacctgattatgttctctggttagtttagccattttgaacttaagatcatatgaccttagtgcttttggctaaacatacagaatactacttgtatgcagaagagaattagttgattacatgtttcaaccttttagggtgataaatacatgtataattgtttacatacttaaaaggaaaaagttgagtaaatttcttgtcatatagtggctctacgtaatgtagcctgtattaatgtgaaatatttaccagaatattcaataaaaagatgaacagtctttagaa

SEQ ID NO: 107389 - DNA, 2035 bp, Homo sapiens
  Payload ID: 1076
  Gene Symbol: ANKHD1
  Gene Name: ankyrin repeat and KH domain containing 1
  Uniprot ID: Q8IWZ3
  ENST ID: ENST00000394722
  CDS Start-End: 48-1898
ggtgaccgcgagtgggtcggcaccgtctccggctccgggtgcgaacaatgctgactgatagcggaggcggcggcacctcctttgaggaggacctggactctgtggctccgcgatccgccccagctggggcctcggagccgcctccgccgggaggggtcggtctggggatccgcaccgtgaggctctttggggaggccgggccagcgtcgggagtcggcagcagcggcggcggcggcagcggcagcggtacgggcggaggggacgcggcgctggatttcaagttggcggctgccgtgctgaggaccgggggtggaggtggtgcctctggcagtgacgaggacgaagtgtccgaggttgaatcatttattttggaccaagaagatctggataacccagtgcttaaaacaacatcagagatattcttatcaagtactgcagaaggagcagacttacgcactgtggatccagagacacaggcacgactagaagcattgctagaagcagcagcttttgcagatcctgaggtactccggagactgacatcctcagttagttgtgcactggatgaagctgctgctgcactgacacggatgaaagcagaaaacagccacaatgcaggacaagtggacactcgcagtctagcagaagcttgttcagatggggatgttaatgctgttcgtaaattgctagatgaaggcagaagtgtaaatgaacatacagaagaaggagaaagcctgctgtgtttggcttgttcagcagggtattatgaattagcacaagtattgcttgctatgcatgctaatgttgaagatcgagggaataaaggagacataactcccctgatggcagcttccagtggaggttacttagatattgtgaaattattacttcttcatgatgctgatgtcaactcccagtctgcaacaggaaacactgcgctaacttatgcatgtgctggaggatttgttgacattgttaaagtgctccttaatgaaggtgcaaatatagaagatcataatgaaaatggacatactcccttaatggaagcagccagtgcaggtcatgtggaagttgcaagagttcttttagatcatggtgcaggcatcaacactcattctaatgaattcaaagaaagtgctctaacacttgcttgctacaaaggccatttggatatggttcgctttctacttgaagctggtgcagatcaagagcacaaaacagatgagatgcacactgccttaatggaggcctgcatggatggacatgtagaggtggcacgtttgcttttggatagtggtgctcaagtgaacatgcctgcagattcatttgaatctccattgacgctagctgcctgtggaggacatgttgaattggcagctctacttattgaaaggggagcaaatcttgaagaagttaatgatgaaggatacactcccttgatggaagctgcccgggaaggacatgaagaaatggtggcactactcttagcacaaggagcaaatataaatgcccagacagaagaaactcaagaaactgctcttactttggcttgctgtggaggattttctgaagttgcagactttcttattaaggcaggggctgatatagaacttggctgctccacacctctgatggaggcatctcaggagggacacctggaattggttaaatatttgctggcttctggcgctaatgtgcatgctacaacagcaacaggagacacagccttaacctatgcttgtgaaaatggacatacggatgttgcagatgttttacttcaagcaggggctgatttagacaagcaggaggacatgaagactattttggagggcatagatccggccaagcatcaggtgagggtggcctttgatgcttgtaagctactacgtaaagaatagatgttgtaggtaaccagaactctggatatctgaattccagccaagaagttccaggaccctgctgggtgacaaaggaaatcctcttcaattgaaaaagattatgaagtcccaataaaaagagatttgtattgctggta

SEQ ID NO: 107390 - DNA, 2135 bp, Homo sapiens
  Payload ID: 1076
  Gene Symbol: ANKHD1
  Gene Name: ankyrin repeat and KH domain containing 1
  Uniprot ID: Q8IWZ3
  ENST ID: ENST00000394723
  CDS Start-End: 115-1998
ctgggacgggggaaaggagacgcttcttcctcttgctgctcttctcgttcccgagatcagcggcggcggtgaccgcgagtgggtcggcaccgtctccggctccgggtgcgaacaatgctgactgatagcggaggcggcggcacctcctttgaggaggacctggactctgtggctccgcgatccgccccagctggggcctcggagccgcctccgccgggaggggtcggtctggggatccgcaccgtgaggctctttggggaggccgggccagcgtcgggagtcggcagcagcggcggcggcggcagcggcagcggtacgggcggaggggacgcggcgctggatttcaagttggcggctgccgtgctgaggaccgggggtggaggtggtgcctctggcagtgacgaggacgaagtgtccgaggttgaatcatttattttggaccaagaagatctggataacccagtgcttaaaacaacatcagagatattcttatcaagtactgcagaaggagcagacttacgcactgtggatccagagacacaggcacgactagaagcattgctagaagcagcaggaattggcaaattgtcaactgctgatggtaaagcttttgcagatcctgaggtactccggagactgacatcctcagttagttgtgcactggatgaagctgctgctgcactgacacggatgaaagcagaaaacagccacaatgcaggacaagtggacactcgcagtctagcagaagcttgttcagatggggatgttaatgctgttcgtaaattgctagatgaaggcagaagtgtaaatgaacatacagaagaaggagaaagcctgctgtgtttggcttgttcagcagggtattatgaattagcacaagtattgcttgctatgcatgctaatgttgaagatcgagggaataaaggagacataactcccctgatggcagcttccagtggaggttacttagatattgtgaaattattacttcttcatgatgctgatgtcaactcccagtctgcaacaggaaacactgcgctaacttatgcatgtgctggaggatttgttgacattgttaaagtgctccttaatgaaggtgcaaatatagaagatcataatgaaaatggacatactcccttaatggaagcagccagtgcaggtcatgtggaagttgcaagagttcttttagatcatggtgcaggcatcaacactcattctaatgaattcaaagaaagtgctctaacacttgcttgctacaaaggccatttggatatggttcgctttctacttgaagctggtgcagatcaagagcacaaaacagatgagatgcacactgccttaatggaggcctgcatggatggacatgtagaggtggcacgtttgcttttggatagtggtgctcaagtgaacatgcctgcagattcatttgaatctccattgacgctagctgcctgtggaggacatgttgaattggcagctctacttattgaaaggggagcaaatcttgaagaagttaatgatgaaggatacactcccttgatggaagctgcccgggaaggacatgaagaaatggtggcactactcttagcacaaggagcaaatataaatgcccagacagaagaaactcaagaaactgctcttactttggcttgctgtggaggattttctgaagttgcagactttcttattaaggcaggggctgatatagaacttggctgctccacacctctgatggaggcatctcaggagggacacctggaattggttaaatatttgctggcttctggcgctaatgtgcatgctacaacagcaacaggagacacagccttaacctatgcttgtgaaaatggacatacggatgttgcagatgttttacttcaagcaggggctgatttagacaagcaggaggacatgaagactattttggagggcatagatccggccaagcatcaggtgagggtggcctttgatgcttgtaagctactacgtaaagaatagatgttgtaggtaaccagaactctggatatctgaattccagccaagaagttccaggaccctgctgggtgacaaaggaaatcctcttcaattgaaaaagattatgaagtcccaataaaaagagatttgtattgctggta

SEQ ID NO: 107391 - DNA, 3649 bp, Homo sapiens
  Payload ID: 1076
  Gene Symbol: ANKHD1
  Gene Name: ankyrin repeat and KH domain containing 1
  ENST ID: ENST00000433049
  CDS Start-End: 1-3219
cctaaggagaattcggaactaccagaggatgaagatgaagaggagaatgatgaagatgtggagcaagaagttcccatagaacctcctagtgcaaccaccaccactacgattggaatctctgcaacatctgcaacattcacaaatgtgtttgggaaaaaaagggccaatgtggtgacaactcccagcaccaatcggaaaaataagaagaacaaaacaaaagaaacccctcctacagcacatttaattttaccagaacaacatatgtctttagcccaacaaaaggcagataaaaataaaataaatggagaacctagaggtggtggtgcaggtgggaatagtgattcagataacttggacagcacagactgcaacagtgagagtagcagtggtggtaaaagccaagagttaaattttgtgatggatgtgaattcctctaaatacccctcactgctccttcattcccaagaagaaaagacaagtactgctacttccaaaactcagacacgacttgaaggtgaagtgactcctaattccttgtcaaccagctacaagacagtgtcattgccattaagctctccaaacataaagctgaatctcactagccctaaaaggggtcagaaaagagaagaagggtggaaagaagttgtacgaaggtcaaagaaattgtctgttccagcctcagtggtgtcgaggataatgggaagaggaggatgcaacatcactgcaatacaggatgttactggtgcccatattgatgtggataaacaaaaagataagaatggcgagagaatgatcacaataaggggtggcacagaatcaacaagatatgcagttcaactaatcaatgcactcattcaagatcctgctaaggaactggaagacttgattcctaaaaatcatatcagaacacctgccagcaccaaatcaattcatgctaacttctcatctggagtaggtaccacagcagcttccagtaaaaatgcatttcctttgggtgctccaactcttgtaacttcacaggcaacaacgttatctacgttccagcccgctaataaacttaataagaatgttccaacaaatgtacgttcttctttcccagtttctctacccttagcttatcctcaccctcattttgccctgctggctgctcaaactatgcaacagattcggcatcctcgcttacccatggcccagtttggaggaaccttctcaccttctcctaacacatggggaccattcccagtgagacctgtgaatcctggcaacacaaatagctctccaaagcataataacacaagccgtctacctaaccagaacgggactgttttaccctcagagtctgctggactagctactgccagttgtcctatcactgtctcttctgtagttgctgccagtcagcaactgtgtgtcactaatacccggactccttcatcagtcagaaagcagttgtttgcctgtgtgcctaagacaagtcctccagcaacagtgatttcttctgtgacaagcacttgtagttccctgccttctgtctcctctgcacctatcactagcgggcaagctcccaccacatttctacctgcaagtacttctcaagcacagctttcttcacaaaagatggagtctttctctgctgtgccacccaccaaagagaaagtgtccacacaggaccagcccatggcaaacctatgtaccccatcttcaactgcaaacagttgcagtagctctgccagcaacaccccgggagctccagaaactcacccatccagtagtcccactcctacttccagtaacacacaagaggaggcacagccatccagtgtgtctgatttaagtcctatgtcaatgccttttgcatctaactcagaacctgctccattgactttgacatcacccagaatggttgctgctgataatcaggacaccagtaatttacctcagttagctgtaccagcacctcgagtttctcatcgaatgcagcccagaggttctttttactccatggtaccaaatgcaactattcaccaggatccccagtctatttttgttacgaatccagttactttaacaccacctcaaggcccaccagctgcagtgcagctttcttcagctgtgaacattatgaatggttctcagatgcacataaacccagcaaataagtctttgccacctacatttggcccagccacacttttcaatcacttcagcagtctttttgatagtagtcaggtgccagctaaccagggctggggagatggtccactgtcctcacgagttgctacagatgcctctttcactgttcagtcagcgttcctgggtaactcagtgcttggacacttggaaaacatgcaccctgataactcaaaggcacctggcttcagaccaccttcccagcgagtttctactagtccagttgggttaccatccattgacccatcaggcagctccccatcttcctcttctgctcctctggcaagtttttccggcataccaggaacaagggttttcctgcaagggccagctcctgttgggactcctagtttcaacagacaacatttttctccccatccttggacaagcgcctcaaactcatgtgactctcctattccatctgtttcttcgggatcatcttcacctctttcagccacttctgccccaccaacgttgggccaaccaaaaggagtcagtgccagtcaagatcgaaagatacctcccccaattggaacagagagactggcccgaattcggcaaggagggtctgttgcacaagccccggcggggaccagttttgtcgctcccgttggacacagtggaatctggtcatttggtgtcaatgctgtgtcagaaggcttatcaggttggtcgcaatctgtgatggggaaccatccaatgcatcaacaattatcagacccaagcacattctcccaacatcagccaatggagagagatgattctggaatggtagccccctctaacatttttcatcagcctatgggtctgccaatttccatgtatggaggcaccataataccctctcatcctcagcttgctgatgttccaggaggccctctgtttaatggacttcacaatccagatcctgcttggaaccctatgataaaagttatccaaaattcaactgaatgcactgatgcccagcagatttggcctggcacgtgggcacctcatattggaaacatgcatctcaaatatgtcaactaagttagaaggtctttactctttagccttgtttaagaaacctatgaccttggaagaaccatggggatttttttttaatgtgcctaagaaattttctctgaggctttagcaatggaaatttgattgcccattgtataagaacaaattgatttcctatccacctgattatgttctctggttagtttagccattttgaacttaagatcatatgaccttagtgcttttggctaaacatacagaatactacttgtatgcagaagagaattagttgattacatgtttcaaccttttagggtgataaatacatgtataattgtttacatacttaaaaggaaaaagttgagtaaatttcttgtcatatagtggctctacgtaatgtagcctgtattaatgtgaaatatttaccagaatattcaataaaaagatgaacagt

SEQ ID NO: 107392 - DNA, 4079 bp, Homo sapiens
  Payload ID: 1076
  Gene Symbol: ANKHD1
  Gene Name: ankyrin repeat and KH domain containing 1
  ENST ID: ENST00000431508
  CDS Start-End: 1-3648
gtgcaagcaggtgctgatgtggatgcagcagataaccggaaaatcacacctcttatgtcagcatttcgcaagggtcatgtaaaagttgttcaatatttggtaaaggaagtaaatcagttcccttctgatatagaatgcatgagatacatagcaacaattacagataaggaactgttgaaaaaatgtcatcaatgtgtcgaaaccattgtgaaggctaaagaccagcaagctgcagaagcaaataagaatgcgagtattcttttaaaggaacttgatctggaaaagtcaagagaagagagcagaaagcaggctcttgctgctaaaagagaaaaaagaaaagaaaagagaaaaaagaaaaaagaggaacagaaaaggaaacaggaagaagatgaagaaaacaaacctaaggagaattcggaactaccagaggatgaagatgaagaggagaatgatgaagatgtggagcaagaagttcccatagaacctcctagtgcaaccaccaccactacgattggaatctctgcaacatctgcaacattcacaaatgtgtttgggaaaaaaagggccaatgtggtgacaactcccagcaccaatcggaaaaataagaagaacaaaacaaaagaaacccctcctacagcacatttaattttaccagaacaacatatgtctttagcccaacaaaaggcagataaaaataaaataaatggagaacctagaggtggtggtgcaggtgggaatagtgattcagataacttggacagcacagactgcaacagtgagagtagcagtggtggtaaaagccaagagttaaattttgtgatggatgtgaattcctctaaatacccctcactgctccttcattcccaagaagaaaagacaagtactgctacttccaaaactcagacacgacttgaaggtgaagtgactcctaattccttgtcaaccagctacaagacagtgtcattgccattaagctctccaaacataaagctgaatctcactagccctaaaaggggtcagaaaagagaagaagggtggaaagaagttgtacgaaggtcaaagaaattgtctgttccagcctcagtggtgtcgaggataatgggaagaggaggatgcaacatcactgcaatacaggatgttactggtgcccatattgatgtggataaacaaaaagataagaatggcgagagaatgatcacaataaggggtggcacagaatcaacaagatatgcagttcaactaatcaatgcactcattcaagatcctgctaaggaactggaagacttgattcctaaaaatcatatcagaacacctgccagcaccaaatcaattcatgctaacttctcatctggagtaggtaccacagcagcttccagtaaaaatgcatttcctttgggtgctccaactcttgtaacttcacaggcaacaacgttatctacgttccagcccgctaataaacttaataagaatgttccaacaaatgtacgttcttctttcccagtttctctacccttagcttatcctcaccctcattttgccctgctggctgctcaaactatgcaacagattcggcatcctcgcttacccatggcccagtttggaggaaccttctcaccttctcctaacacatggggaccattcccagtgagacctgtgaatcctggcaacacaaatagctctccaaagcataataacacaagccgtctacctaaccagaacgggactgttttaccctcagagtctgctggactagctactgccagttgtcctatcactgtctcttctgtagttgctgccagtcagcaactgtgtgtcactaatacccggactccttcatcagtcagaaagcagttgtttgcctgtgtgcctaagacaagtcctccagcaacagtgatttcttctgtgacaagcacttgtagttccctgccttctgtctcctctgcacctatcactagcgggcaagctcccaccacatttctacctgcaagtacttctcaagcacagctttcttcacaaaagatggagtctttctctgctgtgccacccaccaaagagaaagtgtccacacaggaccagcccatggcaaacctatgtaccccatcttcaactgcaaacagttgcagtagctctgccagcaacaccccgggagctccagaaactcacccatccagtagtcccactcctacttccagtaacacacaagaggaggcacagccatccagtgtgtctgatttaagtcctatgtcaatgccttttgcatctaactcagaacctgctccattgactttgacatcacccagaatggttgctgctgataatcaggacaccagtaatttacctcagttagctgtaccagcacctcgagtttctcatcgaatgcagcccagaggttctttttactccatggtaccaaatgcaactattcaccaggatccccagtctatttttgttacgaatccagttactttaacaccacctcaaggcccaccagctgcagtgcagctttcttcagctgtgaacattatgaatggttctcagatgcacataaacccagcaaataagtctttgccacctacatttggcccagccacacttttcaatcacttcagcagtctttttgatagtagtcaggtgccagctaaccagggctggggagatggtccactgtcctcacgagttgctacagatgcctctttcactgttcagtcagcgttcctgggtaactcagtgcttggacacttggaaaacatgcaccctgataactcaaaggcacctggcttcagaccaccttcccagcgagtttctactagtccagttgggttaccatccattgacccatcaggcagctccccatcttcctcttctgctcctctggcaagtttttccggcataccaggaacaagggttttcctgcaagggccagctcctgttgggactcctagtttcaacagacaacatttttctccccatccttggacaagcgcctcaaactcatgtgactctcctattccatctgtttcttcgggatcatcttcacctctttcagccacttctgccccaccaacgttgggccaaccaaaaggagtcagtgccagtcaagatcgaaagatacctcccccaattggaacagagagactggcccgaattcggcaaggagggtctgttgcacaagccccggcggggaccagttttgtcgctcccgttggacacagtggaatctggtcatttggtgtcaatgctgtgtcagaaggcttatcaggttggtcgcaatctgtgatggggaaccatccaatgcatcaacaattatcagacccaagcacattctcccaacatcagccaatggagagagatgattctggaatggtagccccctctaacatttttcatcagcctatggcaagtggttttgtggatttttctaaaggtctgccaatttccatgtatggaggcaccataataccctctcatcctcagcttgctgatgttccaggaggccctctgtttaatggacttcacaatccagatcctgcttggaaccctatgataaaagttatccaaaattcaactgaatgcactgatgcccagcagatttggcctggcacgtgggcacctcatattggaaacatgcatctcaaatatgtcaactaagttagaaggtctttactctttagccttgtttaagaaacctatgaccttggaagaaccatggggatttttttttaatgtgcctaagaaattttctctgaggctttagcaatggaaatttgattgcccattgtataagaacaaattgatttcctatccacctgattatgttctctggttagtttagccattttgaacttaagatcatatgaccttagtgcttttggctaaacatacagaatactacttgtatgcagaagagaattagttgattacatgtttcaaccttttagggtgataaatacatgtataattgtttacatacttaaaaggaaaaagttgagtaaatttcttgtcatatagtggctctacgtaatgtagcctgtattaatgtgaaatatttaccagaatattcaataaaaagatgaacagtc

SEQ ID NO: 107393 - DNA, 4814 bp, Homo sapiens
  Payload ID: 1076
  Gene Symbol: ANKHD1
  Gene Name: ankyrin repeat and KH domain containing 1
  ENST ID: ENST00000421134
  CDS Start-End: 119-4814
gctgctgggacgggggaaaggagacgcttcttcctcttgctgctcttctcgttcccgagatcagcggcggcggtgaccgcgagtgggtcggcaccgtctccggctccgggtgcgaacaatgctgactgatagcggaggcggcggcacctcctttgaggaggacctggactctgtggctccgcgatccgccccagctggggcctcggagccgcctccgccgggaggggtcggtctggggatccgcaccgtgaggctctttggggaggccgggccagcgtcgggagtcggcagcagcggcggcggcggcagcggcagcggtacgggcggaggggacgcggcgctggatttcaagttggcggctgccgtgctgaggaccgggggtggaggtggtgcctctggcagtgacgaggacgaagtgtccgaggttgaatcatttattttggaccaagaagatctggataacccagtgcttaaaacaacatcagagatattcttatcaagtactgcagaaggagcagacttacgcactgtggatccagagacacaggcacgactagaagcattgctagaagcagcaggaattggcaaattgtcaactgctgatggtaaagcttttgcagatcctgaggtactccggagactgacatcctcagttagttgtgcactggatgaagctgctgctgcactgacacggatgaaagcagaaaacagccacaatgcaggacaagtggacactcgcagtctagcagaagcttgttcagatggggatgttaatgctgttcgtaaattgctagatgaaggcagaagtgtaaatgaacatacagaagaaggagaaagcctgctgtgtttggcttgttcagcagggtattatgaattagcacaagtattgcttgctatgcatgctaatgttgaagatcgagggaataaaggagacataactcccctgatggcagcttccagtggaggttacttagatattgtgaaattattacttcttcatgatgctgatgtcaactcccagtctgcaacaggaaacactgcgctaacttatgcatgtgctggaggatttgttgacattgttaaagtgctccttaatgaaggtgcaaatatagaagatcataatgaaaatggacatactcccttaatggaagcagccagtgcaggtcatgtggaagttgcaagagttcttttagatcatggtgcaggcatcaacactcattctaatgaattcaaagaaagtgctctaacacttgcttgctacaaaggccatttggatatggttcgctttctacttgaagctggtgcagatcaagagcacaaaacagatgagatgcacactgccttaatggaggcctgcatggatggacatgtagaggtggcacgtttgcttttggatagtggtgctcaagtgaacatgcctgcagattcatttgaatctccattgacgctagctgcctgtggaggacatgttgaattggcagctctacttattgaaaggggagcaaatcttgaagaagttaatgatgaaggatacactcccttgatggaagctgcccgggaaggacatgaagaaatggtggcactactcttagcacaaggagcaaatataaatgcccagacagaagaaactcaagaaactgctcttactttggcttgctgtggaggattttctgaagttgcagactttcttattaaggcaggggctgatatagaacttggctgctccacacctctgatggaggcatctcaggagggacacctggaattggttaaatatttgctggcttctggcgctaatgtgcatgctacaacagcaacaggagacacagccttaacctatgcttgtgaaaatggacatacggatgttgcagatgttttacttcaagcaggggctgatttagacaagcaggaggacatgaagactattttggagggcatagatccggccaagcatcaggaacatgaatctgaaggtggaagaacacctttgatgaaagctgcaagagctggtcatttgtgcactgtgcagtttcttattagcaaaggtgccaatgttaacagggctacagccaataatgatcatacagtagtgtcgctggcatgtgcaggaggccacctggcagttgttgagcttctcttggctcatggggctgaccctactcatcgactcaaggatggttcaacaatgctcattgaagctgcaaagggtggccatactaatgtagtttcttatctgttggattatccaaataatgttctgtcagttcccaccacagatgtgtctcagctccctccaccttctcaagatcagtctcaggtgccacgtgtgccaacgcatacacttgccatggttgtacctccccaggaacctgacagaacttcacaggagaactctcctgcccttttaggagtgcaaaaaggtacatccaagcagaagtccagttccctccaggtagcagatcaggacctactgccatcttttcacccataccagcctttggagtgcatagtagaggagactgaaggcaagctgaatgaactgggacaaagaattagtgctattgaaaaagcacagcttaagtcactggagttaattcaaggtgaacctctgaacaaagataagatagaagaacttaaaaagaacagagaagagcaagtccagaagaagaagaaaatattgaaagaactgcagaaagtggaaaggcagttgcagatgaaaacacagcagcaatttaccaaagaatacttggaaaccaaaggtcagaaagacacagtgtctctacaccaacagtgctctcatagaggagtcttcccagaaggggaaggagatggtagtctcccagaggatcacttttcagagttacctcaggttgacacaatcttatttaaagataatgatgttgatgatgagcaacagtctccaccatcggcagaacagattgattttgtcccagtccagcctttatcatctccacagtgtaacttttccagtgacttaggttctaatgggacaaattctcttgaacttcagaaagtatcaggtaatcagcagattgtaggacagcctcagattgctattactggacatgatcaggggctgttagttcaagaaccagatggactaatggttgcaactccagctcagacgcttaccgacactcttgatgacctgatagcagctgtgagtaccagagtgcccactggttccaacagttcttctcagaccacagagtgtcttacacctgaatcctgttcgcagactacaagcaatgtggcttcccaatcgatgcctcctgtgtatccttcagttgacattgatgcacatactgagagcaatcatgacacagcattaacactagcttgtgcaggtggtcatgaagaacttgtatctgtgctcattgcacgggatgccaaaattgaacacagagacaaaaaaggtttcacaccactaatcctggcagcaacagcagggcatgttggagttgttgaaatccttttggataaaggtggagatatagaagcacagtctgaacgaactaaggatactccgctttcattggcatgttctggtggacgtcaggaggtggtagacttgctgctggctcgaggtgcaaataaagaacataggaacgtatctgattatacaccactgagtctagctgcgtctggaggatatgttaatatcattaagattctgcttaatgctggggcagaaattaattcaaggactgggagtaaactaggtatttctcccctgatgttggctgcaatgaatggacatgttcctgcagtaaaattgctgctcgatatgggttcagacattaatgcccaaatagagaccaatcggaacacggctctcaccctggcctgtttccagggccgagcagaagtagtgagtttgcttctggaccgaaaagccaatgttgaacatagggcaaagacgggtcttacccccttgatggaagcagcttctggagggtatgcagaggttggaagagttcttcttgataaaggagcagatgttaatgctccccctgtgccttcctcaagagatactgctttaacaatagcagcagacaaaggtcactacaaattttgtgaactcctgattcataggggagcccacattgatgttcgtaacaaaaagggaaatacgccactttggctggcatccaatggaggtcattttgatgttgtgcagttgctagtgcaagcaggtgctgatgtggatgcagcagataaccggaaaatcacacctcttatgtcagcatttcgcaagggtcatgtaaaagttgttcaatatttggtaaaggaagtaaatcagttcccttctgatatagaatgcatgagatacatagcaacaattacagataaggaactgttgaaaaaatgtcatcaatgtgtcgaaaccattgtgaaggctaaagaccagcaagctgcagaagcaaataagaatgcgagtattcttttaaaggaacttgatctggaaaagtcaagagaagagagcagaaagcaggctcttgctgctaaaagagaaaaaagaaaagaaaagagaaaaaagaaaaaagaggaacagaaaaggaaacaggaagaagatgaagaaaacaaacctaaggagaattcggaactaccagaggatgaagatgaagaggagaatgatgaagatgtggagcaagaagttcccatagaacctcctagtgcaaccaccaccactacgattggaatctctgcaacatctgcaacattcacaaatgtgtttgggaaaaaaagggccaatgtggtgacaactcccagcaccaatcggaaaaataaga

SEQ ID NO: 107394 - DNA, 801 bp, Homo sapiens
  Payload ID: 1076
  Gene Symbol: ANKHD1
  Gene Name: ankyrin repeat and KH domain containing 1
  ENST ID: ENST00000421706
  CDS Start-End: 1-557
ccacttctgccccaccaacgttgggccaaccaaaaggagtcagtgccagtcaagatcgaaagatacctcccccaattggaacagagagactggcccgaattcggcaaggagggtctgttgcacaagccccggcggggaccagttttgtcgctcccgttggacacagtggaatctggtcatttggtgtcaatgctgtgtcagaaggcttatcaggttggtcgcaatctgtgatggggaaccatccaatgcatcaacaattatcagacccaagcacattctcccaacatcagccaatggagagagatgattctggaatggtagccccctctaacatttttcatcagcctatggcaagtggttttgtggatttttctaaaggtctgccaatttccatgtatggaggcaccataataccctctcatcctcagcttgctgatgttccaggaggccctctgtttaatggacttcacaatccagatcctgcttggaaccctatgataaaagttatccaaaattcaactgaatgcactgatgcccagcaggtaaaatgggcttaatgctcttttgttttttagatttgtcacatcattctttttgttttgtgagaagtataagtactgaatatcaaaagtcataattgaccatttcgatctggattgctttttcaatatcaagatgatgctactgaacactttatttaatatatgtgtattcttcctaggcagaaacagtgaattgccattgcatttatatattcattttgtaactgtctaaagattcctaattagaaattccaatttt

SEQ ID NO: 107395 - DNA, 1826 bp, Homo sapiens
  Payload ID: 1076
  Gene Symbol: ANKHD1
  Gene Name: ankyrin repeat and KH domain containing 1
  ENST ID: ENST00000412116
  CDS Start-End: 1-1826
gaacatgaatctgaaggtggaagaacacctttgatgaaagctgcaagagctggtcatttgtgcactgtgcagtttcttattagcaaaggtgccaatgttaacagggctacagccaataatgatcatacagtagtgtcgctggcatgtgcaggaggccacctggcagttgttgagcttctcttggctcatggggctgaccctactcatcgactcaaggatggttcaacaatgctcattgaagctgcaaagggtggccatactaatgtagtttcttatctgttggattatccaaataatgttctgtcagttcccaccacagatgtgtctcagctccctccaccttctcaagatcagtctcaggtgccacgtgtgccaacgcatacacttgccatggttgtacctccccaggaacctgacagaacttcacaggagaactctcctgcccttttaggagtgcaaaaagctgtgagtaccagagtgcccactggttccaacagttcttctcagaccacagagtgtcttacacctgaatcctgttcgcagactacaagcaatgtggcttcccaatcgatgcctcctgtgtatccttcagttgacattgatgcacatactgagagcaatcatgacacagcattaacactagcttgtgcaggtggtcatgaagaacttgtatctgtgctcattgcacgggatgccaaaattgaacacagagacaaaaaaggtttcacaccactaatcctggcagcaacagcagggcatgttggagttgttgaaatccttttggataaaggtggagatatagaagcacagtctgaacgaactaaggatactccgctttcattggcatgttctggtggacgtcaggaggtggtagacttgctgctggctcgaggtgcaaataaagaacataggaacgtatctgattatacaccactgagtctagctgcgtctggaggatatgttaatatcattaagattctgcttaatgctggggcagaaattaattcaaggactgggagtaaactaggtatttctcccctgatgttggctgcaatgaatggacatgttcctgcagtaaaattgctgctcgatatgggttcagacattaatgcccaaatagagaccaatcggaacacggctctcaccctggcctgtttccagggccgagcagaagtagtgagtttgcttctggaccgaaaagccaatgttgaacatagggcaaagacgggtcttacccccttgatggaagcagcttctggagggtatgcagaggttggaagagttcttcttgataaaggagcagatgttaatgctccccctgtgccttcctcaagagatactgctttaacaatagcagcagacaaaggtcactacaaattttgtgaactcctgattcataggggagcccacattgatgttcgtaacaaaaagggaaatacgccactttggctggcatccaatggaggtcattttgatgttgtgcagttgctagtgcaagcaggtgctgatgtggatgcagcagataaccggaaaatcacacctcttatgtcagcatttcgcaagggtcatgtaaaagttgttcaatatttggtaaaggaagtaaatcagttcccttctgatatagaatgcatgagatacatagcaacaattacagataaggaactgttgaaaaaatgtcatcaatgtgtcgaaaccattgtgaaggctaaagaccagcaagctgcagaagcaaataagaatgcgagtattcttttaaaggaacttgatctggaaaagtcaagagaagagagcagaaagcaggctcttgctgctaaaagagaaaaaag

SEQ ID NO: 107396 - DNA, 3511 bp, Homo sapiens
  Payload ID: 1076
  Gene Symbol: ANKHD1
  Gene Name: ankyrin repeat and KH domain containing 1
  ENST ID: ENST00000435794
  CDS Start-End: 1-3073
caccaccactacgattggaatctctgcaacatctgcaacattcacaaatgtgtttgggaaaaaaagggccaatgtggtgacaactcccagcaccaatcggaaaaataagaagaacaaaacaaaagaaacccctcctacagcacatttaattttaccagaacaacatatgtctttagcccaacaaaaggcagataaaaataaaataaatggagaacctagaggtggtggtgcaggtgggaatagtgattcagataacttggacagcacagactgcaacagtgagagtagcagtggtggtaaaagccaagagttaaattttgtgatggatgtgaattcctctaaatacccctcactgctccttcattcccaagaagaaaagacaagtactgctacttccaaaactcagacacgacttgaaggtgaagtgactcctaattccttgtcaaccagctacaagacagtgtcattgccattaagctctccaaacataaagctgaatctcactagccctaaaaggggtcagaaaagagaagaagggtggaaagaagttgtacgaaggtcaaagaaattgtctgttccagcctcagtggtgtcgaggataatgggaagaggaggatgcaacatcactgcaatacaggatgttactggtgcccatattgatgtggataaacaaaaagataagaatggcgagagaatgatcacaataaggggtggcacagaatcaacaagatatgcagttcaactaatcaatgcactcattcaagatcctgctaaggaactggaagacttgattcctaaaaatcatatcagaacacctgccagcaccaaatcaattcatgctaacttctcatctggagtaggtaccacagcagcttccagtaaaaatgcatttcctttgggtgctccaactcttgtaacttcacaggcaacaacgttatctacgttccagcccgctaataaacttaataagaatgttccaacaaatgtacgttcttctttcccagtttctctacccttagcttatcctcaccctcattttgccctgctggctgctcaaactatgcaacagattcggcatcctcgcttacccatggcccagtttggaggaaccttctcaccttctcctaacacatggggaccattcccagtgagacctgtgaatcctggcaacacaaatagctctccaaagcataataacacaagccgtctacctaaccagaacgggactgttttaccctcagagtctgctggactagctactgccagttgtcctatcactgtctcttctgtagttgctgccagtcagcaactgtgtgtcactaatacccggactccttcatcagtcagaaagcagttgtttgcctgtgtgcctaagacaagtcctccagcaacagtgatttcttctgtgacaagcacttgtagttccctgccttctgtctcctctgcacctatcactagcgggcaagctcccaccacatttctacctgcaagtacttctcaagcacagctttcttcacaaaagatggagtctttctctgctgtgccacccaccaaagagaaagtgtccacacaggaccagcccatggcaaacctatgtaccccatcttcaactgcaaacagttgcagtagctctgccagcaacaccccgggagctccagaaactcacccatccagtagtcccactcctacttccagtaacacacaagaggaggcacagccatccagtgtgtctgatttaagtcctatgtcaatgccttttgcatctaactcagaacctgctccattgactttgacatcacccagaatggttgctgctgataatcaggacaccagtaatttacctcagttagctgtaccagcacctcgagtttctcatcgaatgcagcccagaggttctttttactccatggtaccaaatgcaactattcaccaggatccccagtctatttttgttacgaatccagttactttaacaccacctcaaggcccaccagctgcagtgcagctttcttcagctgtgaacattatgaatggttctcagatgcacataaacccagcaaataagtctttgccacctacatttggcccagccacacttttcaatcacttcagcagtctttttgatagtagtcaggtgccagctaaccagggctggggagatggtccactgtcctcacgagttgctacagatgcctctttcactgttcagtcagcgttcctgggtaactcagtgcttggacacttggaaaacatgcaccctgataactcaaaggcacctggcttcagaccaccttcccagcgagtttctactagtccagttgggttaccatccattgacccatcaggcagctccccatcttcctcttctgctcctctggcaagtttttccggcataccaggaacaagggttttcctgcaagggccagctcctgttgggactcctagtttcaacagacaacatttttctccccatccttggacaagcgcctcaaactcatccacttctgccccaccaacgttgggccaaccaaaaggagtcagtgccagtcaagatcgaaagatacctcccccaattggaacagagagactggcccgaattcggcaaggagggtctgttgcacaagccccggcggggaccagttttgtcgctcccgttggacacagtggaatctggtcatttggtgtcaatgctgtgtcagaaggcttatcaggttggtcgcaatctgtgatggggaaccatccaatgcatcaacaattatcagacccaagcacattctcccaacatcagccaatggagagagatgattctggaatggtagccccctctaacatttttcatcagcctatgggtctgccaatttccatgtatggaggcaccataataccctctcatcctcagcttgctgatgttccaggaggccctctgtttaatggacttcacaatccagatcctgcttggaaccctatgataaaagttatccaaaattcaactgaatgcactgatgcccagcagatttggcctggcacgtgggcacctcatattggaaacatgcatctcaaatatgtcaactaagttagaaggtctttactctttagccttgtttaagaaacctatgaccttggaagaaccatggggatttttttttaatgtgcctaagaaattttctctgaggctttagcaatggaaatttgattgcccattgtataagaacaaattgatttcctatccacctgattatgttctctggttagtttagccattttgaacttaagatcatatgaccttagtgcttttggctaaacatacagaatactacttgtatgcagaagagaattagttgattacatgtttcaaccttttagggtgataaatacatgtataattgtttacatacttaaaaggaaaaagttgagtaaatttcttgtcatatagtggctctacgtaatgtagcctgtattaatgtgaaatatttaccagaatattcaataaaaagatgaacagtctttagaa

SEQ ID NO: 107397 - DNA, 3234 bp, Homo sapiens
  Payload ID: 1076
  Gene Symbol: ANKHD1
  Gene Name: ankyrin repeat and KH domain containing 1
  ENST ID: ENST00000432301
  CDS Start-End: 1-2803
aaaagaaacccctcctacagcacatttaattttaccagaacaacatatgtctttagcccaacaaaaggcagataaaaataaaataaatggagaacctagaggtggtggtgcaggtgggaatagtgattcagataacttggacagcacagactgcaacagtgagagtagcagtggtggtaaaagccaagagttaaattttgtgatggatgtgaattcctctaaatacccctcactgctccttcattcccaagaagaaaagacaagtactgctacttccaaaactcagacacgacttgaaggtgaagtgactcctaattccttgtcaaccagctacaagacagtgtcattgccattaagctctccaaacataaagctgaatctcactagccctaaaaggggtcagaaaagagaagaagggtggaaagaagttgtacgaaggtcaaagaaattgtctgttccagcctcagtggtgtcgaggataatgggaagaggaggatgcaacatcactgcaatacaggatgttactggtgcccatattgatgtggataaacaaaaagataagaatggcgagagaatgatcacaataaggggtggcacagaatcaacaagatatgcagttcaactaatcaatgcactcattcaagatcctgctaaggaactggaagacttgattcctaaaaatcatatcagaacacctgccagcaccaaatcaattcatgctaacttctcatctggagtaggtaccacagcagcttccagtaaaaatgcatttcctttgggtgctccaactcttgtaacttcacaggcaacaacgttatctacgttccagcccgctaataaacttaataagaatgttccaacaaatgtacgttcttctttcccagtttctctacccttagcttatcctcaccctcattttgccctgctggctgctcaaactatgcaacagattcggcatcctcgcttacccatggcccagtttggaggaaccttctcaccttctcctaacacatggggaccattcccagtgagacctgtgaatcctggcaacacaaatagctctccaaagcataataacacaagccgtctacctaaccagaacgggactgttttaccctcagagtctgctggactagctactgccagttgtcctatcactgtctcttctgtagttgctgccagtcagcaactgtgtgtcactaatacccggactccttcatcagtcagaaagcagttgtttgcctgtgtgcctaagacaagtcctccagcaacagtgatttcttctgtgacaagcacttgtagttccctgccttctgtctcctctgcacctatcactagcgggcaagctcccaccacatttctacctgcaagtacttctcaagcacagctttcttcacaaaagatggagtctttctctgctgtgccacccaccaaagagaaagtgtccacacaggaccagcccatggcaaacctatgtaccccatcttcaactgcaaacagttgcagtagctctgccagcaacaccccgggagctccagaaactcacccatccagtagtcccactcctacttccagtaacacacaagaggaggcacagccatccagtgtgtctgatttaagtcctatgtcaatgccttttgcatctaactcagaacctgctccattgactttgacatcacccagaatggttgctgctgataatcaggacaccagtaatttacctcagttagctgtaccagcacctcgagtttctcatcgaatgcagcccagaggttctttttactccatggtaccaaatgcaactattcaccaggatccccagtctatttttgttacgaatccagttactttaacaccacctcaaggcccaccagctgcagtgcagctttcttcagctgtgaacattatgaatggttctcagatgcacataaacccagcaaataagtctttgccacctacatttggcccagccacacttttcaatcacttcagcagtctttttgatagtagtcaggtgccagctaaccagggctggggagatggtccactgtcctcacgagttgctacagatgcctctttcactgttcagtcagcgttcctgggtaactcagtgcttggacacttggaaaacatgcaccctgataactcaaaggcacctggcttcagaccaccttcccagcgagtttctactagtccagttgccacttctgccccaccaacgttgggccaaccaaaaggagtcagtgccagtcaagatcgaaagatacctcccccaattggaacagagagactggcccgaattcggcaaggagggtctgttgcacaagccccggcggggaccagttttgtcgctcccgttggacacagtggaatctggtcatttggtgtcaatgctgtgtcagaaggcttatcaggttggtcgcaatctgtgatggggaaccatccaatgcatcaacaattatcagacccaagcacattctcccaacatcagccaatggagagagatgattctggaatggtagccccctctaacatttttcatcagcctatggcaagtggttttgtggatttttctaaaggtctgccaatttccatgtatggaggcaccataataccctctcatcctcagcttgctgatgttccaggaggccctctgtttaatggacttcacaatccagatcctgcttggaaccctatgataaaagttatccaaaattcaactgaatgcactgatgcccagcagatttggcctggcacgtgggcacctcatattggaaacatgcatctcaaatatgtcaactaagttagaaggtctttactctttagccttgtttaagaaacctatgaccttggaagaaccatggggatttttttttaatgtgcctaagaaattttctctgaggctttagcaatggaaatttgattgcccattgtataagaacaaattgatttcctatccacctgattatgttctctggttagtttagccattttgaacttaagatcatatgaccttagtgcttttggctaaacatacagaatactacttgtatgcagaagagaattagttgattacatgtttcaaccttttagggtgataaatacatgtataattgtttacatacttaaaaggaaaaagttgagtaaatttcttgtcatatagtggctctacgtaatgtagcctgtattaatgtgaaatatttaccagaatattcaataaaaagatgaacagtc

SEQ ID NO: 107398 - DNA, 1216 bp, Homo sapiens
  Payload ID: 1076
  Gene Symbol: ANKHD1
  Gene Name: ankyrin repeat and KH domain containing 1
  ENST ID: ENST00000511151
  CDS Start-End: 113-1216
gggacgggggaaaggagacgcttcttcctcttgctgctcttctcgttcccgagatcagcggcggcggtgaccgcgagtgggtcggcaccgtctccggctccgggtgcgaacaatgctgactgatagcggaggcggcggcacctcctttgaggaggacctggactctgtggctccgcgatccgccccagctggggcctcggagccgcctccgccgggaggggtcggtctggggatccgcaccgtgaggctctttggggaggccgggccagcgtcgggagtcggcagcagcggcggcggcggcagcggcagcggtacgggcggaggggacgcggcgctggatttcaagttggcggctgccgtgctgaggaccgggggtggaggtggtgcctctggcagtgacgaggacgaagtgtccgaggttgaatcatttattttggaccaagaagatctggataacccagtgcttaaaacaacatcagagatattcttatcaagtactgcagaaggagcagacttacgcactgtggatccagagacacaggcacgactagaagcattgctagaagcagcagatcctgaggtactccggagactgacatcctcagttagttgtgcactggatgaagctgctgctgcactgacacggatgaaagcagaaaacagccacaatgcaggacaagtggacactcgcagtctagcagaagcttgttcagatggggatgttaatgctgttcgtaaattgctagatgaaggcagaagtgtaaatgaacatacagaagaaggagaaagcctgctgtgtttggcttgttcagcagggtattatgaattagcacaagtattgcttgctatgcatgctaatgttgaagatcgagggaataaaggagacataactcccctgatggcagcttccagtggaggttacttagatattgtgaaattattacttcttcatgatgctgatgtcaactcccagtctgcaacaggaaacactgcgctaacttatgcatgtgctggaggatttgttgacattgttaaagtgctccttaatgaaggtgcaaatatagaagatcataatgaaaatggacatactcccttaatggaagcagccagtgcaggtcatgtggaagttgcaagagttcttttagatcatggtgcaggcatcaacactcattctaatgaattcaaagaaagtgctctaacacttgcttgctacaaa

SEQ ID NO: 107399 - DNA, 2064 bp, Homo sapiens
  Payload ID: 1076
  Gene Symbol: ANKHD1
  Gene Name: ankyrin repeat and KH domain containing 1
  Uniprot ID: Q8IWZ3
  ENST ID: ENST00000616482
  CDS Start-End: 155-1900
gggaggcagcaggttaggcagtgagaagttagtggcgctgctgggacgggggaaaggagacgcttcttcctcttgctgctcttctcgttcccgagatcagcggcggcggtgaccgcgagtgggtcggcaccgtctccggctccgggtgcgaacaatgctgactgatagcggaggcggcggcacctcctttgaggaggacctggactctgtggctccgcgatccgccccagctggggcctcggagccgcctccgccgggaggggtcggtctggggatccgcaccgtgaggctctttggggaggccgggccagcgtcgggagtcggcagcagcggcggcggcggcagcggcagcggtacgggcggaggggacgcggcgctggatttcaagttggcggctgccgtgctgaggaccgggggtggaggtggtgcctctggcagtgacgaggacgaagtgtccgaggttgaatcatttattttggaccaagaagatctggataacccagtgcttaaaacaacatcagagatattcttatcaagtactgcagaaggagcagacttacgcactgtggatccagagacacaggcacgactagaagcattgctagaagcagcaggaattggcaaattgtcaactgctgatggtaaagcttttgcagatcctgaggtactccggagactgacatcctcagttagttgtgcactggatgaagctgctgctgcactgacacggatgaaagcagaaaacagccacaatgcaggacaagtggacactcgcagtctagcagaagcttgttcagatggggatgttaatgctgttcgtaaattgctagatgaaggcagaagtgtaaatgaacatacagaagaaggagaaagcctgctgtgtttggcttgttcagcagggtattatgaattagcacaagtattgcttgctatgcatgctaatgttgaagatcgagggaataaaggagacataactcccctgatggcagcttccagtggaggttacttagatattgtgaaattattacttcttcatgatgctgatgtcaactcccagtctgcaacaggaaacactgcgctaacttatgcatgtgctggaggatttgttgacattgttaaagtgctccttaatgaaggtgcaaatatagaagatcataatgaaaatggacatactcccttaatggaagcagccagtgcaggtcatgtggaagttgcaagagttcttttagatcatggtgcaggcatcaacactcattctaatgaattcaaagaaagtgctctaacacttgcttgctacaaaggccatttggatatggttcgctttctacttgaagctggtgcagatcaagagcacaaaacagatgagatgcacactgccttaatggaggcctgcatggatggacatgtagaggtggcacgtttgcttttggatagtggtgctcaagtgaacatgcctgcagattcatttgaatctccattgacgctagctgcctgtggaggacatgttgaattggcagctctacttattgaaaggggagcaaatcttgaagaagttaatgatgaaggatacactcccttgatggaagctgcccgggaaggacatgaagaaatggtggcactactcttagcacaaggagcaaatataaatgcccagacagaagaaactcaagaaactgctcttactttggcttgctgtggaggattttctgaagttgcagactttcttattaaggcaggggctgatatagaacttggctgctccacacctctgatggaggcatctcaggagggacacctggaattggttaaatatttgctggcttctggacaagcaggaggacatgaagactattttggagggcatagatccggccaagcatcaggtgagggtggcctttgatgcttgtaagctactacgtaaagaatagatgttgtaggtaaccagaactctggatatctgaattccagccaagaagttccaggaccctgctgggtgacaaaggaaatcctcttcaattgaaaaagattatgaagtcccaataaaaagagatttgtattgctggt

SEQ ID NO: 107400 - DNA, 2543 bp, Homo sapiens
  Payload ID: 1077
  Gene Symbol: ANKK1
  Gene Name: ankyrin repeat and kinase domain containing 1
  Uniprot ID: Q8NFD2
  ENST ID: ENST00000303941
  CDS Start-End: 95-2392
cggacccgaggagcaggaagcggcggctccttcggccacccaggcagcagccacagcggggagtgcgcggcgcggggacaggaagagaggggcaatggctgccgaccccaccgagctgcggctgggcagcctccccgtcttcacccgcgacgacttcgagggcgactggcgcctagtggccagcggcggcttcagccaggtgttccaggcgcggcacaggcgctggcggacggagtacgccatcaagtgcgccccctgccttccacccgacgccgccagctctgatgtgaattacctcattgaagaagctgccaaaatgaagaagatcaagtttcagcacatcgtgtctatctacggggtgtgcaagcagcccctgggtattgtgatggagtttatggccaacggctccctggagaaggtgctgtccacccacagcctctgctggaagctcaggttccgcatcatccatgagaccagcttggccatgaacttcctgcacagcattaagccgcctctgctccacctggacctcaagccgggcaacatactcctggacagcaacatgcatgtcaaaatttcagacttcggcctgtccaagtggatggaacagtccacccggatgcagtacatcgagaggtcggctctgcggggcatgctcagctacatcccccctgagatgttcctggagagtaacaaggccccaggacctaaatatgatgtgtacagctttgcaattgtcatctgggagctactcactcagaagaaaccatactcagggttcaacatgatgatgattattatccgagtggcggcaggcatgcggccctccctacagcctgtctctgaccaatggccaagcgaggcccagcagatggtggacctgatgaaacgctgctgggaccaggaccccaagaagaggccatgctttctagacattaccatcgagacagacatactgctgtcactgctgcagagtcgtgtggcagtcccagagagcaaggccctggccaggaaggtgtcctgcaagctgtcgctgcgccagcccggggaggttaatgaggacatcagccaggaactgatggacagtgactcaggaaactacctgaagcgggcccttcagctctccgaccgtaagaatttggtcccgagagatgaggaactgtgtatctatgagaacaaggtcacccccctccacttcctggtggcccagggcagtgtggagcaggtgaggttgctgctggcccacgaggtagacgtggactgccagacggcctctggatacacgcccctcctgatcgccgcccaggaccagcaacccgacctctgtgccctgcttttggcacatggtgctgatgccaaccgagtggatgaggatggctgggccccactgcactttgcagcccagaatggggatgacggcactgcgcgcctgctcctggaccacggggcctgtgtggatgcccaggaacgtgaagggtggacccctcttcacctggctgcacagaataactttgagaatgtggcacggcttctggtctcccgtcaggctgaccccaacctgcatgaggctgagggcaagacccccctccatgtggccgcctactttggccatgttagcctggtcaagctgctgaccagccagggggctgagttggatgctcagcagagaaacctgagaacaccactgcacctggcagtagagcggggcaaagtgagggccatccaacacctgctgaagagtggagcggtccctgatgcccttgaccagagcggctacggcccactgcacactgcagctgccaggggcaaatacctgatctgcaagatgctgctcaggtacggagccagccttgagctgcccacccaccagggctggacacccctgcatctagcagcctacaagggccacctggagatcatccatctgctggcagagagccacgcaaacatgggtgctcttggagctgtgaactggactcccctgcacctagctgcacgccacggggaggaggcggtggtgtcagcactgctgcagtgtggggctgaccccaatgctgcagagcagtcaggctggacacccctccacctggcggtccagaggagcaccttcctgagtgtcatcaacctcctagaacatcacgcaaatgtccacgcccgcaacaaggtgggctggacacccgcccacctggccgccctcaagggcaacacagccatcctcaaagtgctggtcgaggcaggcgcccagctggacgtccaggatggagtgagctgcacacccctgcaactggccctccgcagccgaaagcagggcatcatgtccttcctagagggcaaggagccgtcagtggccactctgggtggttctaagccaggagccgagatggaaatttagacaacttggccagccgtggtggctcacgtctgtaatcccagcactttgggaggctgaggcaggcagatcacctgatatcaagagtttgaggccagcctggccaacatggcaaaaccctgtctctgctaaaaatacaaaatttagctgggta

SEQ ID NO: 107401 - DNA, 508 bp, Homo sapiens
  Payload ID: 1077
  Gene Symbol: ANKK1
  Gene Name: ankyrin repeat and kinase domain containing 1
  ENST ID: ENST00000542948
  CDS Start-End: 1-164
acagcctctgctggaagctcaggttccgcatcatccatgagaccagcttggccatgaacttcctgcacagcattaagccgcctctgctccacctggacctcaagccgggcaacatactcctggacagcaacatgcatgtcaaagtgaagaaactgaggctctgagaagataagtaatttggccaagaccatccagataatttcagacttcggcctgtccaagtggatggaacagtccacccggatgcagtacatcgagaggtcggctctgcggggcatgctcagctacatcccccctgagatgttcctggagagtaacaaggccccaggacctaaatatgatgtgtacagctttgcaattgtcatctgggagctactcactcagaagaaaccatactcagggttcaacatgatgatgattattatccgagtggcggcaggcatgcggccctccctacagcctgtctctgaccaatggccaagcgaggcccagcagatggtggacctga

SEQ ID NO: 107402 - DNA, 3218 bp, Homo sapiens
  Payload ID: 1078
  Gene Symbol: ANKLE1
  Gene Name: ankyrin repeat and LEM domain containing 1
  Uniprot ID: Q8NAG6
  ENST ID: ENST00000394458
  CDS Start-End: 115-2124
agtggcacacccggtggcatcctcccacccgggctcttatcggcggtcccagaccctgcttgagcgcctccgggtgtcaagggcccctgaggacactaaagctctcgaaccccgatgtggacccccgtgcggcgcggggcagcctggctgggaaccctgctcggccctggagaggggccccccgagccgaggggaggagcggcgcatgcccacaagccccccgcgggaagtaggaaatcgaccgaccaggcggtgcgcttcggacccagccagggcatgtgctcggaggcccgcctggctcgcaggttgcgggatgcgctgcgggaggaggagccgtgggcagtagaggagctgctgcgctgcggcgcggaccctaatttggtgctagaggacggcgcagcggctgtgcacttggcggccggagcccggcacccgcgcggcctgcgttgcctcggggccctactgcgccaaggcggggaccccaacgctcgatctgtcgaggcactgacgccgctgcatgtggccgccgcgtggggctgccgccgcggcctggagctgctgctgagccaaggagcggacccggcgctgcgcgaccaggacggactccggccgctggacctggccctgcagcagggacacctggagtgcgcgcgagtcctgcaggatctcgacacgcggaccaggacccggacccggatcggggcagagactcaggagcccgagcctgcacctggcaccccaggcctctctggacctaccgatgagacgctggactccatagcactccaaaagcagccatgcagaggtgacaacagggacattggcttggaggctgacccaggaccccccagcctccctgttccccttgaaactgtggacaaacatgggagctcggcgtcccctccagggcactgggattacagctcagacgcctctttcgtcacagcggttgaggtctctggagctgaggacccagcctcggacactcccccctgggctgggtcattgccaccgaccaggcagggacttctgcatgttgtccatgccaaccagagggtacctaggtctcagggcacggaggcagaactgaatgcccgtctgcaggccctgactctgaccccaccaaatgctgctggcttccagtcctccccttcctccatgcctctcctggacaggagtccagctcatagccccccacggacaccaacccctggagcttctgactgccactgcctgtgggagcaccagacatccattgatagtgacatggccacgctctggctgacagaggatgaggcaagctctacaggtggcagggaacctgtcggcccttgccggcacctgccagtctccactgtgtctgacttggagttgctgaagggactccgagcacttggtgagaatcctcaccccatcacacccttcaccaggcagttgtaccaccagcagctggaagaagcccagattgctcctggcccagagttttcagggcacagcctagaactggctgcagccctgcggacgggctgtattccagatgtccaggcagatgaagacgcgctggcccagcagtttgagcagccagatcctgccaggaggtggcgggagggggtcgtgaagtctagcttcacctatctgctgctggaccccagggagactcaggacctgccagcccgagccttctcactgaccccagctgagcgccttcagactttcatccgtgccatcttctacgtgggcaaagggacgagggcccggccatatgtccacctctgggaggcccttggtcaccatgggcggtcaagaaaacagccccaccaggcctgccccaaggtgcgtcagatcttggacatctgggccagtggttgcggtgttgtgtccctacattgcttccagcacgtggtcgctgtggaggcttatacacgggaggcgtgtattgtggaagccctagggatccagacgctcaccaaccagaagcaagggcactgctatggagtggtggcaggctggccacctgctcgtcgccggcgcttgggggtgcacctgctgcaccgtgccctccttgtcttcctggctgaaggcgagcgacagcttcatccccaggacatccaggcccggggctgagtgctggggagttggccatccagcctggggagaaatgtttgaatgttccagctgccccatgctgacagcagcccccatctctggtttcagaaggggtgtgtgtgtgtgtgtgtgtgtgtgtgtgtgtgtgtgtgtgtgtttgtgtgtgtgtgtgtgtgtgtagggagcacccaggcagatctcccccaggctgagagaggactttgttacagatggtactgctggagaggtagtaagtagtgagctccccatcgtgggaggaggacaagaagggaagcagaaggtgctttggaacagtccggtgcttctgtaagaggcgtttgaacctgggcaactccacctggaataggagctgggtaaaatgaggctgaaacctactgggctgcattcccagatggttaaagcattctaagtcacgggatcaggtaggaggtcagcacaagataacgggtcataaagaacctgctgataaaacaggttgcagtaaagaagccggccaaaacccaccaataccaagatggcgacaagagtgacctctggtcgtcctcattgctacactcccaccagcgccatgacagtttacaaatgccatggctggccaggcgcggtggctcacgcctgtaatcctagcattttgggaggccaaggagggcagatcacctaaggtcaggagttcaagaccagcgtggccaacgtggcgaaaccctatctctactaaaaataccaaaattagctgggcatggtggcgcgtgcctgtaatcccagctactaggggggctgaggcaggaggatcgcttgaacccaggaggtggaggttgcagtgagctgagattgtaccattgcactccagcctgggcaacagagcgagagtctgtctcaaacaaacaaacaaaaaaacaaatgccacatcaacatcaggacgttaacctttagaccctatatggtctaaaaaggggaggcatgaataatccaccccttgtttagcatatcatcaagaaataaccataaaaatgggcaaccagcagccctgccctgtctatggagtagccattcttttattcctttagtttcttaataaatttgctttcactgta

SEQ ID NO: 107403 - DNA, 3081 bp, Homo sapiens
  Payload ID: 1078
  Gene Symbol: ANKLE1
  Gene Name: ankyrin repeat and LEM domain containing 1
  ENST ID: ENST00000404085
  CDS Start-End: 61-318
cctgcttgagcgcctccgggtgtcaagggcccctgaggacactaaagctctcgaaccccgatgtggacccccgtgcggcgcggggcagcctggctgggaaccctgctcggccctggagaggggccccccgagccgaggggaggagcggcgcatgcccacaagccccccgcgggaagtaggaaatcgaccgaccaggcggtgcgcttcggacccagccagggcatgtgctcggaggcccgcctggctcgcaggttgcgggatgcgctgcgggaggaggagccgtgtagaggagctgctgcgctgcggcgcggaccctaatttggtgctagaggacggcgcagcggctgtgcacttggcggccggagcccggcacccgcgcggcctgcgttgcctcggggccctactgcgccaaggcggggaccccaacgctcgatctgtcgaggcactgacgccgctgcatgtggccgccgcgtggggctgccgccgcggcctggagctgctgctgagccaaggagcggacccggcgctgcgcgaccaggacggactccggccgctggacctggccctgcagcagggacacctggagtgcgcgcgagtcctgcaggatctcgacacgcggaccaggacccggacccggatcggggcagagactcaggagcccgagcctgcacctggcaccccaggcctctctggacctaccgatgagacgctggactccatagcactccaaaagcagccatgcagaggtgacaacagggacattggcttggaggctgacccaggaccccccagcctccctgttccccttgaaactgtggacaaacatgggagctcggcgtcccctccagggcactgggattacagctcagacgcctctttcgtcacagcggttgaggtctctggagctgaggacccagcctcggacactcccccctgggctgggtcattgccaccgaccaggcagggacttctgcatgttgtccatgccaaccagagggtacctaggtctcagggcacggaggcagaactgaatgcccgtctgcaggccctgactctgaccccaccaaatgctgctggcttccagtcctccccttcctccatgcctctcctggacaggagtccagctcatagccccccacggacaccaacccctggagcttctgactgccactgcctgtgggagcaccagacatccattgatagtgacatggccacgctctggctgacagaggatgaggcaagctctacaggtggcagggaacctgtcggcccttgccggcacctgccagtctccactgtgtctgacttggagttgctgaagggactccgagcacttggcccagagttttcagggcacagcctagaactggctgcagccctgcggacgggctgtattccagatgtccaggcagatgaagacgcgctggcccagcagtttgagcagccagatcctgccaggaggtggcgggagggggtcgtgaagtctagcttcacctatctgctgctggaccccagggagactcaggacctgccagcccgagccttctcactgaccccagctgagcgccttcagactttcatccgtgccatcttctacgtgggcaaagggacgagggcccggccatatgtccacctctgggaggcccttggtcaccatgggcggtcaagaaaacagccccaccaggcctgccccaaggtgcgtcagatcttggacatctgggccagtggttgcggtgttgtgtccctacattgcttccagcacgtggtcgctgtggaggcttatacacgggaggcgtgtattgtggaagccctagggatccagacgctcaccaaccagaagcaagggcactgctatggagtggtggcaggctggccacctgctcgtcgccggcgcttgggggtgcacctgctgcaccgtgccctccttgtcttcctggctgaaggcgagcgacagcttcatccccaggacatccaggcccggggctgagtgctggggagttggccatccagcctggggagaaatgtttgaatgttccagctgccccatgctgacagcagcccccatctctggtttcagaaggggtgtgtgtgtgtgtgtgtgtgtgtgtgtgtgtgtgtgtgtgtgtttgtgtgtgtgtgtgtgtgtgtagggagcacccaggcagatctcccccaggctgagagaggactttgttacagatggtactgctggagaggtagtaagtagtgagctccccatcgtgggaggaggacaagaagggaagcagaaggtgctttggaacagtccggtgcttctgtaagaggcgtttgaacctgggcaactccacctggaataggagctgggtaaaatgaggctgaaacctactgggctgcattcccagatggttaaagcattctaagtcacgggatcaggtaggaggtcagcacaagataacgggtcataaagaacctgctgataaaacaggttgcagtaaagaagccggccaaaacccaccaataccaagatggcgacaagagtgacctctggtcgtcctcattgctacactcccaccagcgccatgacagtttacaaatgccatggctggccaggcgcggtggctcacgcctgtaatcctagcattttgggaggccaaggagggcagatcacctaaggtcaggagttcaagaccagcgtggccaacgtggcgaaaccctatctctactaaaaataccaaaattagctgggcatggtggcgcgtgcctgtaatcccagctactaggggggctgaggcaggaggatcgcttgaacccaggaggtggaggttgcagtgagctgagattgtaccattgcactccagcctgggcaacagagcgagagtctgtctcaaacaaacaaacaaaaaaacaaatgccacatcaacatcaggacgttaacctttagaccctatatggtctaaaaaggggaggcatgaataatccaccccttgtttagcatatcatcaagaaataaccataaaaatgggcaaccagcagccctgccctgtctatggagtagccattcttttattcctttagtttcttaataaatttgctttcactgta

SEQ ID NO: 107404 - DNA, 1821 bp, Homo sapiens
  Payload ID: 1078
  Gene Symbol: ANKLE1
  Gene Name: ankyrin repeat and LEM domain containing 1
  ENST ID: ENST00000404261
  CDS Start-End: 115-1434
agtggcacacccggtggcatcctcccacccgggctcttatcggcggtcccagaccctgcttgagcgcctccgggtgtcaagggcccctgaggacactaaagctctcgaaccccgatgtggacccccgtgcggcgcggggcagcctggctgggaaccctgctcggccctggagaggggccccccgagccgaggggaggagcggcgcatgcccacaagccccccgcgggaagtaggaaatcgaccgaccaggcggtgcgcttcggacccagccagggcatgtgctcggaggcccgcctggctcgcaggttgcgggatgcgctgcgggaggaggagccgtgggcagtagaggagctgctgcgctgcggcgcggaccctaatttggtgctagaggacggcgcagcggctgtgcacttggcggccggagcccggcacccgcgcggcctgcgttgcctcggggccctactgcgccaaggcggggaccccaacgctcgatctgtcgaggcactgacgccgctgcatgtggccgccgcgtggggctgccgccgcggcctggagctgctgctgagccaaggagcggacccggcgctgcgcgaccaggacggactccggccgctggacctggccctgcagcagggacacctggagtgcgcgcgagtcctgcaggatctcgacacgcggaccaggacccggacccggatcggggcagagactcaggagcccgagcctgcacctggcaccccaggcctctctggacctaccgatgagacgctggactccatagcactccaaaagcagccatgcagaggtgacaacagggacattggcttggaggctgacccaggaccccccagcctccctgttccccttgaaactgtggacaaacatgggagctcggcgtcccctccagggcactgggattacagctcagacgcctctttcgtcacagcggttgaggtctctggagctgaggacccagcctcggacactcccccctgggctgggtcattgccaccgaccaggcagggacttctgcatgttgtccatgccaaccagagggtacctaggtctcagggcacggaggcagaactgaatgcccgtctgcaggccctgactctgaccccaccaaatgctgctggcttccagtcctccccttcctccatgcctctcctggacaggagtccagctcatagccccccacggacaccaacccctggagcttctgactgccactgcctgtgggagcaccagacatccattgatagtgacatggccacgctctggctgacagaggatgaggcaagctctacaggtggcagggaacctgtcggcccttgccggcacctgccagtctccactgtgtctgacttggagttgctgaagggactccgagcacttgggagactcaggacctgccagcccgagccttctcactgaccccagctgagcgccttcagactttcatccgtgccatcttctacgtgggcaaagggacgagggcccggccatatgtccacctctgggaggcccttggtcaccatgggcggtcaagaaaacagccccaccaggcctgccccaaggtgcgtcagatcttggacatctgggccagtggttgcggtgttgtgtccctacattgcttccagcacgtggtcgctgtggaggcttatacacgggaggcgtgtattgtggaagccctagggatccagacgctcaccaaccagaagcaagggcactgctatggagtggtggcaggctggccacctgctcgtcgccggcgcttgggggtgcacctgctgcaccgtgccctccttgtcttcctggctg

SEQ ID NO: 107405 - DNA, 2294 bp, Homo sapiens
  Payload ID: 1078
  Gene Symbol: ANKLE1
  Gene Name: ankyrin repeat and LEM domain containing 1
  ENST ID: ENST00000594072
  CDS Start-End: 61-1992
cctgcttgagcgcctccgggtgtcaagggcccctgaggacactaaagctctcgaaccccgatgtggacccccgtgcggcgcggggcagcctggctgggaaccctgctcggccctggagaggggccccccgagccgaggggaggagcggcgcatgcccacaagccccccgcgggaagtaggaaatcgaccgaccaggcggtgcgcttcggacccagccagggcatgtgctcggaggcccgcctggctcgcaggttgcgggatgcgctgcgggaggaggagccgtgggcagtagaggagctgctgcgctgcggcgcggaccctaatttggtgctagaggacggcgcagcggctgtgcacttggcggccggagcccggcacccgcgcggcctgcgttgcctcggggccctactgcgccaaggcggggaccccaacgctcgatctgtcgaggcactgacgccgctgcatgtggccgccgcgtggggctgccgccgcggcctggagctgctgctgagccaaggagcggacccggcgctgcgcgaccaggacggactccggccgctggacctggccctgcagcagggacacctggagtgcgcgcgagtcctgcaggatctcgacacgcggaccaggacccggacccggatcggggcagagactcaggagcccgagcctgcacctggcaccccaggcctctctggacctaccgatgagacgctggactccatagcactccaaaagcagccatgcagaggtgacaacagggacattggcttggaggctgacccaggaccccccagcctccctgttccccttgaaactgtggacaaacatgggagctcggcgtcccctccagggcactgggattacagctcagacgcctctttcgtcacagcggttgaggtctctggagctgaggacccagcctcggacactcccccctgggctgggtcattgccaccgaccaggcagggacttctgcatgttgtccatgccaaccagagggtacctaggtctcagggcacggaggcagaactgaatgcccgtctgcaggccctgactctgaccccaccaaatgctgctggcttccagtcctccccttcctccatgcctctcctggacaggagtccagctcatagccccccacggacaccaacccctggagcttctgactgccactgcctgtgggagcaccagacatccattgatagtgacatggccacgctctggctgacagaggatgaggcaagctctacaggtggcagggaacctgtcggcccttgccggcacctgccagtctccactgtgtctgacttggagttgctgaagggactccgagcacttggcccagagttttcagggcacagcctagaactggctgcagccctgcggacgggctgtattccagatgtccaggcagatgaagacgcgctggcccagcagtttgagcagccagatcctgccaggaggtggcgggagggggtcgtgaagtctagcttcacctatctgctgctggaccccagggagactcaggacctgccagcccgagccttctcactgaccccagctgagcgccttcagactttcatccgtgccatcttctacgtgggcaaagggacgagggcccggccatatgtccacctctgggaggcccttggtcaccatgggcggtcaagaaaacagccccaccaggcctgccccaaggtgcgtcagatcttggacatctgggccagtggttgcggtgttgtgtccctacattgcttccagcacgtggtcgctgtggaggcttatacacgggaggcgtgtattgtggaagccctagggatccagacgctcaccaaccagaagcaagggcactgctatggagtggtggcaggctggccacctgctcgtcgccggcgcttgggggtgcacctgctgcaccgtgccctccttgtcttcctggctgaaggcgagcgacagcttcatccccaggacatccaggcccggggctgagtgctggggagttggccatccagcctggggagaaatgtttgaatgttccagctgccccatgctgacagcagcccccatctctggtttcagaaggggtgtgtgtgtgtgtgtgtgtgtgtgtgtgtgtgtgtgtgtgtgtttgtgtgtgtgtgtgtgtgtgtagggagcacccaggcagatctcccccaggctgagagaggactttgttacagatggtactgctggagaggtagtaagtagtgagctccccatcgtgggaggaggacaagaagggaagcagaaggtgctttggaacagtccgg

SEQ ID NO: 107406 - DNA, 2003 bp, Homo sapiens
  Payload ID: 1078
  Gene Symbol: ANKLE1
  Gene Name: ankyrin repeat and LEM domain containing 1
  ENST ID: ENST00000598347
  CDS Start-End: 1-1796
gcatgtgctcggaggcccgcctggctcgcaggttgcgggatgcgctgcgggaggaggagccgtgggcagtagaggagctgctgcgctgcggcgcggaccctaatttggtgctagaggacggcgcagcggctgtgcacttggcggccggagcccggcacccgcgcggcctgcgttgcctcggggccctactgcgccaaggcggggaccccaacgctcgatctgtcgaggcactgacgccgctgcatgtggccgccgcgtggggctgccgccgcggcctggagctgctgctgagccaaggagcggacccggcgctgcgcgaccaggacggactccggccgctggacctggccctgcagcagggacacctggagtgcgcgcgagtcctgcaggatctcgacacgcggaccaggacccggacccggatcggggcagagactcaggagcccgagcctgcacctggcaccccaggcctctctggacctaccgatgagacgctggactccatagcactccaaaagcagccatgcagaggtgacaacagggacattggcttggaggctgacccaggaccccccagcctccctgttccccttgaaactgtggacaaacatgggagctcggcgtcccctccagggcactgggattacagctcagacgcctctttcgtcacagcggttgaggtctctggagctgaggacccagcctcggacactcccccctgggctgggtcattgccaccgaccaggcagggacttctgcatgttgtccatgccaaccagagggtacctaggtctcagggcacggaggcagaactgaatgcccgtctgcaggccctgactctgaccccaccaaatgctgctggcttccagtcctccccttcctccatgcctctcctggacaggagtccagctcatagccccccacggacaccaacccctggagcttctgactgccactgcctgtgggagcaccagacatccattgatagtgacatggccacgctctggctgacagaggatgaggcaagctctacaggtggcagggaacctgtcggcccttgccggcacctgccagtctccactgtgtctgacttggagttgctgaagggactccgagcacttggcccagagttttcagggcacagcctagaactggctgcagccctgcggacgggctgtattccagatgtccaggcagatgaagacgcgctggcccagcagtttgagcagccagatcctgccaggaggtggcgggagggggtcgtgaagtctagcttcacctatctgctgctggaccccagggagactcaggacctgccagcccgagccttctcactgaccccagctgagcgccttcagactttcatccgtgccatcttctacgtgggcaaagggacgagggcccggccatatgtccacctctgggaggcccttggtcaccatgggcggtcaagaaaacagggatccagacgctcaccaaccagaagcaagggcactgctatggagtggtggcaggctggccacctgctcgtcgccggcgcttgggggtgcacctgctgcaccgtgccctccttgtcttcctggctgaaggcgagcgacagcttcatccccaggacatccaggcccggggctgagtgctggggagttggccatccagcctggggagaaatgtttgaatgttccagctgccccatgctgacagcagcccccatctctggtttcagaaggggtgtgtgtgtgtgtgtgtgtgtgtgtgtgtgtgtgtgtgtgtgtttgtgtgtgtgtgtgtgtgtgtagggagcacccaggcagatctcccccaggctgagagaggactttgttacagatggtactgctggagaggtagtaagtagtgagctccccatcgtgggaggaggacaagaagggaagcagaaggtgctttggaacagtccggtgcttctgtaagaggcgtttgaacctgggcaactccacctggaataggagctgggtaaaatgaggctg

SEQ ID NO: 107407 - DNA, 4646 bp, Homo sapiens
  Payload ID: 1079
  Gene Symbol: ANKLE2
  Gene Name: ankyrin repeat and LEM domain containing 2
  Uniprot ID: Q86XL3
  ENST ID: ENST00000357997
  CDS Start-End: 91-2907
aggcagggcgcgggcagcccggcgcggggtcctgggacgggcgcggcgcggggcgcgggcttctcggcggctgcggcccgggcggcggcgatgctgtggccgcggctggcggcggccgagtgggcggcgctggcctgggagctgctgggcgcctcggtgctgctgatcgctgtgcggtggctggtgcggcggctgggcccgcggccgggaggtctgggccgcagcgggaccccagttcctccgccaagcgcggccgccgcccccgcctcaggtgaaatgacaatggatgctctgttggctcgattgaaacttctgaatccagatgaccttagagaagaaatcgtcaaagccggattgaaatgtggacccattacatcaactacaaggttcatttttgagaaaaaattggctcaggctttactggagcaaggaggaaggctgtcttctttctaccaccatgaggcaggtgtcacagctctcagccaggacccacaaaggattttgaagccagctgaagggaacccaactgatcaggctggtttttctgaagacagagattttggttacagtgtgggcctgaatcctccagaggaggaagctgtgacatccaagacctgctcggtgccccctagtgacaccgacacctacagagctggagcgactgcgtctaaggagccgcccctgtactatggggtgtgtccagtgtatgaggacgtcccagcgagaaatgaaaggatctatgtttatgaaaataaaaaggaagcattgcaagctgtcaagatgatcaaagggtcccgatttaaagctttttctaccagagaagacgctgagaaatttgctagaggaatttgtgattatttcccttctccaagcaaaacgtccttaccactgtctcctgtgaaaacagctccactctttagcaatgacaggttgaaagatggtttgtgcttgtcggaatcagaaacagtcaacaaagagcgagcgaacagttacaaaaatccccgcacgcaggacctcaccgccaagcttcggaaagctgtggagaagggagaggaggacaccttttctgaccttatctggagcaacccccggtatctgataggctcaggagacaaccccactatcgtgcaggaagggtgcaggtacaacgtgatgcatgttgctgccaaagagaaccaggcttccatctgccagctgactctggacgtcctggagaaccctgacttcatgaggctgatgtaccctgatgacgacgaggccatgctgcagaagcgtatccgttacgtggtggacctgtacctcaacacccccgacaagatgggctatgacacaccgttgcattttgcttgtaagtttggaaatgcagatgtagtcaacgtgctttcgtcacaccatttgattgtaaaaaactcaaggaataaatatgataaaacacctgaagatgtaatttgtgaaagaagcaaaaataaatctgtggaactgaaggagcggatcagagagtatttaaagggccactactacgtgcccctcctgagagcggaagagacttcttctccagtcatcggggagctgtggtccccagaccagacggctgaggcctctcacgtcagccgctatggaggcagccccagagacccggtactgaccctgagagccttcgcagggcccctgagtccagccaaggcagaagattttcgcaagctctggaaaactccacctcgagagaaagcaggcttccttcaccacgtcaagaagtcggacccggaaagaggctttgagagagtgggaagggagctagctcatgagctggggtatccctgggttgaatactgggaatttctgggctgttttgttgatctgtcttcccaggaaggcctgcaaagactagaagaatatctcacacagcaggaaataggcaaaaaggctcaacaagaaacaggagaacgggaagcctcctgccgagataaagccaccacgtctggcagcaattccatttccgtgagggcgtttctagatgaagatgacatgagcttggaagaaataaaaaatcggcaaaatgcagctcgaaataacagcccgcccacagtcggtgcttttggacatacgaggtgcagcgccttccccttggagcaggaggcagacctcatagaagccgccgagccgggaggtccacacagcagcagaaatgggctctgccatcctctgaatcacagcaggaccctggcgggcaagagaccaaaggccccccgtggggaggaagcccatctgccacctgtctcggatttgactgttgagtttgataaactgaatttgcaaaatataggacgtagcgtttccaagacaccagatgaaagtacaaaaactaaagatcagatcctgacttcaagaatcaatgcagtagaaagagacttgttagagccttctcccgcagaccaactcgggaatggccacaggaggacagaaagtgaaatgtcagccaggatcgctaaaatgtccttgagtcccagcagccccaggcacgaggatcagctcgaggtcaccagggaaccggccaggcggctcttcctttttggagaggagccatcaaaactcgatcaggatgttttggccgctcttgaatgtgcagacgtcgacccccatcagttcccggccgtgcacagatggaagagtgctgtcctgtgctactcaccctcggacagacagagttggcccagtcccgcggtgaaaggaaggttcaagtctcagctgccagatctcagtggccctcacagctacagtccggggagaaacagcgtggctggaagcaaccccgcaaagccaggcctgggcagtcctgggcgctacagccccgtgcacgggagccagctccgcaggatggcgcgcctggctgagcttgccgccctgtaggcttggcgctgggctctcggtttgttcttcatttttaaagaaggaagggtcatatgtttattgctaaactgtcaaaaaggaatatattctgattaaattattactcctcactttgagggtgtgagaattttagaagatttaaatgttctatataacacttagatttctgatattttggaagaagttagaagttaatgaaagcaaactcagttaccaattttctggaaaatatccatgtggtaatggtagactttttaggtggcaatttctaggtctgaaatatagcagaggaaagggcgctgaggcagttgcaggcaggcagccctgtacttaccctgtactcacctcatccgacagacgctgtggatgaggaggggcttggcggaggcgtgagcaccgatgtccctttgataacctgcactcaccaagatgaactatttgccgccctgtcttttcctgggttggggggtggcatctgatggtggcagagtgcctgttggttcgcccgtgggtctcatggttcagacagagggaggtggacggcagggatcagggagccaggagcgcgcctcagacttgcagcaaccattgtgatttgggttgttcggaatatttaaattactgatcagaagatgaaagtagcttttctcttgggaagtcttgcagcccgtgggagtgataccaggagcaacacagagctcagcagcggcgccaaggtgttccctgtttcctcagcacgtgagccttcaccgcctgcttcattcaggagccagtgcagcagtaatacagtctatacattgttctgttttcaaatttatcctgaggctttgttgagcataaatgattatacgataaaggtatccgttattttggaactcatttcagttgggatctcctgtatgcagagtgttgcatttagaggtttgagtcccatcttggtttcttgccgtgctgactgtagccttcaccttgacttgaatgaaggtctgtggttggaatgtgtgaggagccgctgaggtgttcaggaggtgctgcctggaggtcggtttcttcctgggtgttacgggcaactgctcacacagttgtttctctgtgaacatttccagtgtttaatccaaaatgaaaacccaccaatgcttttgctaacttcagtgccttttataaatcatttttaaatttcctgaacttgctttttgaggatatacagggatattaagtagacgcaggattgtttttgtttgtaaaaattctgaattgaaactttgttttaaaaaaaggcttctttctttcatatgacaagagataggtcaggaatattggaatcaagatttaaatgttaaaattcgattttgttacacagggtgtgttcatttgttttgtagcagacaagatctagatcccagacagaaacaacacatgctattctaaaaagccgcattttaaaaggcaccttggttctcaaaagaaatcagaatatggatattcgtagtgatgatctgttttctctaaaatcttaccatattgtctgtatatggttgtaaattcaaatggaaagtaaaacgttttggccctgattttgtatgtggaccactgctcctgatttcccaggtcttaggccacctttgactgtttctccgtttgtttgtgggcagcgattccagtcccaacggaggcattctcgtgtgtcccggggggttatgtccttcacaaaacacttaatgaaatgaattacttcaaaa

SEQ ID NO: 107408 - DNA, 741 bp, Homo sapiens
  Payload ID: 1079
  Gene Symbol: ANKLE2
  Gene Name: ankyrin repeat and LEM domain containing 2
  ENST ID: ENST00000535036
  CDS Start-End: 1-357
gaagggtgcaggtacaacgtgatgcatgttgctgccaaagagaaccaggcttccatctgccagctgactctggacgtcctggagaaccctgacttcatgaggctgatgtaccctgatgacgacgaggccatgctgcagaagcgtatccgttacgtggtggacctgtacctcaacacccccgacaagatgggctatgacacaccgttgcattttgcttgtaagtttggaaatgcagatgtagtcaacgtgctttcgtcacaccatttgattgtaaaaaactcaaggaataaatatgataaaacacctgaagatgagctccaccttgacccagcctcacaacaaaaagtttgtgtatgaccaggcttcctgtaagtggaactcaaccaaccaagaaggtaatttgtgaaagaagcaaaaataaatctgtggaactgaaggagcggatcagagagtatttaaagggccactactacgtgcccctcctgagagcggaagagacttcttctccagtcatcggggagctgtggtccccagaccagacggctgaggcctctcacgtcagccgctatggaggcagccccagagacccggtactgaccctgagagccttcgcagggcccctgagtccagccaaggcagaagattttcgcaagctctggaaaactccacctcgagagaaagcaggcttccttcaccacgtcaagaagtcggacccggaaagaggctttgagagagtgggaa

SEQ ID NO: 107409 - DNA, 3302 bp, Homo sapiens
  Payload ID: 1079
  Gene Symbol: ANKLE2
  Gene Name: ankyrin repeat and LEM domain containing 2
  Uniprot ID: Q86XL3
  ENST ID: ENST00000542282
  CDS Start-End: 1985-2866
cagacaccaggacgcagagcgcttcacacggtgcgtatcagacaccaggatgcagagcgcttcacacggtgtatatcagacaccaggacgcagagcgcttcacatggtgtatatcagacaccaggacgcaaacgcaaagcgcttcacacggtgcacatcagacaccagcatgcagagagcttcacacggtgcatatcagacaccaggacgcagagcgcttcacacggtgcatatgagacaccaggacgcagagcgcttcacacggtgtatatcagacaccaggacgcacacgcaaagcacttcacacggtgcatatcagacaccacgatgcaaagtgcttccaaagcacagatgcactgaatggaaagagcatgatggaagaggttaatctacaaaatctaaaagtgattcataaaaacatcaacgatggccgggcacgggagctcaggcctgcaatcccagcggccgggcgtggcggctcacactataatcccagcacttagggaggccaacgtgggtggattgctgaaacccaggagttcgaaggcagcttgagcaacatagtgagactctgtctctatttatttttttaaaaaaacagaaatttgctaataactagagattcgaatctgctaaaatacaaattaaagcagatatacagtttaaactgtgtgtgtgtgtgtgtgagtgtgtgtctgtgtgagtttgtgtgtgtaaggtcataatagaaccattagcccgcaagacacttcatttataaaacaaactccctggaatgatagaaaatgaaaatgattgacatacattaaactaagaagcagtgaatcttcaacagtcacgacctgtgactctgaaccacagaactagagcgacgtcagtgccgtcgttatacaggaatcattgaagtctgaccttgctgtgttgtagctgatggtggcacagaactcacttctgtaaagcggcctcatttacagtgttgtcttgtgactatgtacattttaattagtaaatattaaataaagttgaggcatttcctaagtagcaggagccacagctcaagtgttctggatcctcctgtggccgcggccaccatcgtgaacaccaaacgggacatttctgttgcctgtcgcacagtgctgcgcccgggagctcttctgtgttatcttcacacctaaagcgcagcagggttacttcatggagttgttctggacgatcttcgggatcctctggggcactgtgacactcggagcccctggggtcgcagcagatcggagctggagggtggctgggggtgcagggcagtcatctcgcccatcacctgggctgcccttggcgttttcatgtccctgcctttgaaagaaaagtcagcctggcagctttatttccctcctcgtctgaaatagggtctcactctgtggcacaggatggaaagcaatggtgcagtcacagcccactgcagcctccccctcctgggctcaagcgatcctcccacttgagcctcccaaatagctgagactacaggtgcgtgccaccatgtcagctaatttttctatagagaacggggtttcgctatgttgcccaggcagtcttgaactcctggggtccagcgacccccctgccatggcctcccagagtgctgggattgcaggcgtgagcttctgtgcctggccccagcagcctgattgtgtctggagggtcctgtttgcccttttccagggagtcgtgtgggtggttttccatcctgaaatctgatgaggaggttttggatgcaagagttgctgttgctggggtcacggcagttggtcgcggatggagtggggaggttttgggtataagagttgctgttgctggggtcacggcagttggtcatggatggggcggagcagctccgtggcttcctgtcgttcccatcactgaagtgctccttgttgtcctcacaggcagcaattccatttccgtgagggcgtttctagatgaagatgacatgagcttggaagaaataaaaaatcggcaaaatgcagctcgaaataacagcccgcccacagtcggtgcttttggacatacgaggtgcagcgccttccccttggagcaggaggcagacctcatagaagccgccgagccgggaggtccacacagcagcagaaatgggctctgccatcctctgaatcacagcaggaccctggcgggcaagagaccaaaggccccccgtggggaggaagcccatctgccacctgtctcggatttgactgttgagtttgataaactgaatttgcaaaatataggacgtagcgtttccaagacaccagatgaaagtacaaaaactaaagatcagatcctgacttcaagaatcaatgcagtagaaagagacttgttagagccttctcccgcagaccaactcgggaatggccacaggaggacagaaagtgaaatgtcagccaggatcgctaaaatgtccttgagtcccagcagccccaggcacgaggatcagctcgaggtcaccagggaaccggccaggcggctcttcctttttggagaggagccatcaaaactcgatcaggatgttttggccgctcttgaatgtgcagacgtcgacccccatcagttcccggccgtgcacagatggaagagtgctgtcctgtgctactcaccctcggacagacagagttggcccagtcccgcggtgaaaggaaggttcaagtctcagctgccagatctcagtggccctcacagctacagtccggggagaaacagcgtggctggaagcaaccccgcaaagccaggcctgggcagtcctgggcgctacagccccgtgcacgggagccagctccgcaggatggcgcgcctggctgagcttgccgccctgtaggcttggcgctgggctctcggtttgttcttcatttttaaagaaggaagggtcatatgtttattgctaaactgtcaaaaaggaatatattctgattaaattattactcctcactttgagggtgtgagaattttagaagatttaaatgttctatataacacttagatttctgatattttggaagaagttagaagttaatgaaagcaaactcagttaccaattttctggaaaatatccatgtggtaatggtagactttttaggtggcaatttctaggtctgaaatatagcagaggaaagggcgctgaggcagttgcaggcaggcagccctgtacttaccctgtactcacctcatccgacagacgctgtggatgaggaggggcttggcggaggcgtgagcaccgatgtccctttgataacctgcactcaccaagatgaact

SEQ ID NO: 107410 - DNA, 2446 bp, Homo sapiens
  Payload ID: 1079
  Gene Symbol: ANKLE2
  Gene Name: ankyrin repeat and LEM domain containing 2
  Uniprot ID: Q86XL3
  ENST ID: ENST00000542657
  CDS Start-End: 1456-2337
atatcagacaccaggacgcaaacgcaaagcgcttcacacggtgcacatcagacaccagcatgcagagagcttcacacggtgcatatcagacaccaggacgcagagcgcttcacacggtgcatatgagacaccaggacgcagagcgcttcacacggtgtatatcagacaccaggacgcacacgcaaagcacttcacacggtgcatatcagacaccacgatgcaaagtgcttccaaagcacagatgcactgaatggaaagagcatgatggaagaggttaatctacaaaatctaaaagtgattcataaaaacatcaacgatggccgggcacgggagctcaggcctgcaatcccagcggccgggcgtggcggctcacactataatcccagcacttagggaggccaacgtgggtggattgctgaaacccaggagttcgaaggcagcttgagcaacatagtgagactctgtctctatttatttttttaaaaaaacagaaatttgctaataactagagattcgaatctgctaaaatacaaattaaagcagatatacagtttaaactgtgtgtgtgtgtgtgtgagtgtgtgtctgtgtgagtttgtgtgtgtaaggtcataatagaaccattagcccgcaagacacttcatttataaaacaaactccctggaatgatagaaaatgaaaatgattgacatacattaaactaagaagcagtgaatcttcaacagtcacgacctgtgactctgaaccacagaactagagcgacgtcagtgccgtcgttatacaggaatcattgaagtctgaccttgctgtgttgtagctgatggtggcacagaactcacttctgtaaagcggcctcatttacagtgttgtcttgtgactatgtacattttaattagtaaatattaaataaagttgaggcatttcctaagtagcaggagccacagctcaagtgttctggatcctcctgtggccgcggccaccatcgtgaacaccaaacgggacatttctgttgcctgtcgcacagtgctgcgcccgggagctcttctgtgttatcttcacacctaaagcgcagcagggttacttcatggagttgttctggacgatcttcgggatcctctggggcactgtgacactcggagcccctggggtcgcagcagatcggagctggagggtggctgggggtgcagggcagtcatctcgcccatcacctgggctgcccttggcgttttcatgtccctgcctttgaaagaaaagtcagcctggcagctttatttccctcctcgtctgaaatagggtctcactctgtggcacaggatggaaagcaatggtgcagtcacagcccactgcagcctccccctcctgggctcaagcgatcctcccacttgagcctcccaaatagctgagactacaggcagcaattccatttccgtgagggcgtttctagatgaagatgacatgagcttggaagaaataaaaaatcggcaaaatgcagctcgaaataacagcccgcccacagtcggtgcttttggacatacgaggtgcagcgccttccccttggagcaggaggcagacctcatagaagccgccgagccgggaggtccacacagcagcagaaatgggctctgccatcctctgaatcacagcaggaccctggcgggcaagagaccaaaggccccccgtggggaggaagcccatctgccacctgtctcggatttgactgttgagtttgataaactgaatttgcaaaatataggacgtagcgtttccaagacaccagatgaaagtacaaaaactaaagatcagatcctgacttcaagaatcaatgcagtagaaagagacttgttagagccttctcccgcagaccaactcgggaatggccacaggaggacagaaagtgaaatgtcagccaggatcgctaaaatgtccttgagtcccagcagccccaggcacgaggatcagctcgaggtcaccagggaaccggccaggcggctcttcctttttggagaggagccatcaaaactcgatcaggatgttttggccgctcttgaatgtgcagacgtcgacccccatcagttcccggccgtgcacagatggaagagtgctgtcctgtgctactcaccctcggacagacagagttggcccagtcccgcggtgaaaggaaggttcaagtctcagctgccagatctcagtggccctcacagctacagtccggggagaaacagcgtggctggaagcaaccccgcaaagccaggcctgggcagtcctgggcgctacagccccgtgcacgggagccagctccgcaggatggcgcgcctggctgagcttgccgccctgtaggcttggcgctgggctctcggtttgttcttcatttttaaagaaggaagggtcatatgtttattgctaaactgtcaaaaaggaatatattctgattaaattattactcctc

SEQ ID NO: 107411 - DNA, 1557 bp, Homo sapiens
  Payload ID: 1079
  Gene Symbol: ANKLE2
  Gene Name: ankyrin repeat and LEM domain containing 2
  ENST ID: ENST00000538766
  CDS Start-End: 784-1557
atagaaggtaccatataatgctatggattccttgggaaaaaataggccatagccacaaagctaaattatgctgtaatcaaataaagcttcgtggaattgtttagaatattttctcaaaatatgtgcccagtgtcaggtgtacaactggaacccagaaaggacctccaggctttcgtgtgcctggccatgactagaaccacgggcaagttcacagggctgttccgtgatcatgaacacgtccgtctgtgggagttgaactgtgtgacctgggttgctggcgtgagggtctgtcgggctgaggcctccttcctgcctgcagccggttcacggctcctgagagctgtgccgggtcctgcttacctgtgaggaggcgtgctgtttcagaaaatgcaccgtatgatttcagctgccagttaaggataaaggaaaattataaccatgattgcagacattgctttggtacttgaagctttagtggcttttttctgtgtagttctgagtattttttctggtttcacagctggttaattgtgttttgtttcttacagggagctagctcatgagctggggtatccctgggttgaatactgggaatttctgggctgttttgttgatctgtcttcccaggaaggcctgcaaagactagaagaatatctcacacagcaggaaataggcaaaaaggctcaacaagaaacaggagaacgggaagcctcctgccgagataaagccaccacgtctggcagcaattccatttccgtgagggcgtttctagatgaagatgacatgagcttggaagaaataaaaaatcggcaaaatgcagctcgaaataacagcccgcccacagtcggtgcttttggacatacgaggtgcagcgccttccccttggagcaggaggcagacctcatagaagccgccgagccgggaggtccacacagcagcagaaatgggctctgccatcctctgaatcacagcaggaccctggcgggcaagagaccaaaggccccccgtggggaggaagcccatctgccacctgtctcggatttgactgttgagtttgataaactgaatttgcaaaatataggacgtagcgtttccaagacaccagatgaaagtacaaaaactaaagatcagatcctgacttcaagaatcaatgcagtagaaagagacttgttagagccttctcccgcagaccaactcgggaatggccacaggaggacagaaagtgaaatgtcagccaggatcgctaaaatgtccttgagtcccagcagccccaggcacgaggatcagctcgaggtcaccagggaaccggccaggcggctcttcctttttggagaggagccatcaaaactcgatcaggatgttttggccgctcttgaatgtgcagacgtcgacccccatcagttcccggccgtgcacagatggaagagtgctgtcctgtgctactcaccctcggacagacagagttggcccagtcccgcggtgaaaggaaggttcaagtctcagctgccagatctcagtggccctcacagctacagtccggggagaaacagcgtggct

SEQ ID NO: 107412 - DNA, 3228 bp, Homo sapiens
  Payload ID: 1080
  Gene Symbol: ANKMY1
  Gene Name: ankyrin repeat and MYND domain containing 1
  Uniprot ID: Q9P2S6
  ENST ID: ENST00000272972
  CDS Start-End: 216-3041
ggcaagcagtcgggacgggagcgcgggcgtccgcggtggctgcagtcccgtcggtctccctgctgtccggcgcgagctcttcgagtcttgcttgggatgtttcagcagcccctgagaaggaagaggaggaagctgagggcccgctgagggcgcaggacctgagggagtcctacatccagctcgtccagggtgtgcaggagtggcaggatggttgcatgtaccagggggagtttgggttgaacatgaagcttggatatggcaaattctcttggcccacaggcgagtcataccatgggcagttttaccgggaccactgccatggcctgggtacctacatgtggccagatggctccagtttcacgggcacattttacctcagccaccgagaaggctacggcaccatgtacatgaagacacggcttttccaggggctatacaaagcggaccagcggtttgggccaggtgtcgagacctaccccgatggcagccaggacgtggggctgtggttccgagagcagctcatcaagctgtgcacccagatccccagtggcttctccctcctcagataccctgagttctccagcttcatcacccacagccctgccaggatcagcctctcagaagaggagaaaacggagtggggactgcaggagggacaggatccctttttctatgactataagcggtttcttctgaatgacaacctaacgctgcctccagaaatgtatgtctactcgaccaacagtgaccacctgcccatgacaagctctttccgcaaagagctggacgcccgcatcttcctcaatgaaattcctccgttcgttgaggatggagaaccatggttcataatcaatgagacccctttgttggtcaaaatccagaagcaaacttacaagttcaggaacaagccagctcacaccagctggaacatgggcgccatcctggaggggaagcgcagtggctttgcaccctgtgggcccaaagagcaactttccatggagatgatcctaaaggctgaggaagggaaccacgaatggatttgtaggatcctgaaggacaactttgctagtgctgacgtggcggacgcaaagggctacactgtgcttgctgcggctgctactcactgccacaacgacattgtcaaccttctcctggactgtggggccgacgtgaacaagtgctcagatgagggtctcacggcactcagcatgtgtttcctcctccactaccccgcccagtccttcaagcccaatgttgctgaacggaccatacctgagccccaggaacctccaaaattcccagttgttccaatcctttcatcatcatttatggacacaaacctggagtctctgtactatgaggtgaacgtgccttcccagggtagctatgagctgaggccaccgccagcaccactgctcctgccacgcgtctcaggcagccacgagggcggccacttccaggacaccgggcagtgtggggggtccatagaccacaggagcagctctctgaagggggactccccgttggtgaagggcagccttggccatgtggaaagcgggcttgaggacgtgttgggaaacacagaccggggcagtctgtgcagtgctgagacgaaatttgagtccaacgtgtgtgtgtgcgacttctccatcgagctctcgcaggccatgctggagagaagcgcccagtcccacagcttgctgaagatggcctcgccctcaccgtgcaccagcagcttcgacaaagggaccatgcggaggatggcgctgtccatgatcgagcggaggaagcgctggcggaccatcaagctgctgctgcgccggggcgcggaccccaacctgtgctgcgtgcccatgcaggtcctgttccttgctgtgaaggccggggacgtggatggggtgaggctgctgctggagcacggggcgaggaccgacatctgctttccgccgcagctgagcaccctgacaccactccacatcgctgccgcccttcctggggaggagggggtacagattgtggagctgctgttgcatgccatcaccgatgtggacgccaaggcatccgacgaggacgacacttacaagcccggcaagctggacctgctgccctcaagtctgaagctcagcaatgagccaggccctccccaagcctactacagcacggacacagccctcccggaggaggggggcaggacggctctgcacatggcctgcgagcgggaggatgacaacaagtgtgccagggacatagtccggctccttctatcccacggagcaaatcctaacctgctgtggagtggccactccccgctctccctgtccattgccagtgggaatgagctggttgtgaaggagctcctgacccagggagctgaccccaacctgcccctgaccaaaggcttgggcagtgccctgtgtgttgcctgtgacctgacctacgagcaccagaggaacatggacagcaagctggccctgattgaccgactcatcagtcacggggccgacatcctgaagcctgtaatgctcaggcagggagaaaaggaggcagtgggcacagccgtggactatggctacttcagattcttccaggaccggaggattgcccgctgccccttccacacgctgatgccagcagagcgcgagacgttcctggcgcggaagcggctcctggagtacatgggcttgcagctacggcaggctgtctttgccaaggagagccagtgggaccccacgtggctgtacctgtgcaagagagcggagctgatccccagccacaggatgaagaagaagggccccagcctgcccaggggcctggatgtgaaggagcaggggcaaattcccttcttcaagttctgctaccagtgtggccgctccatcggggtccgcctcttgccctgccctcgctgctacgggatcctgacctgcagcaagtactgcaagaccaaggcctggaccgagttccacaagaaggactgcggggacctggtggccatcgtgacacaactggagcaagtttccaggaggagagaagaattccagtgaagcagcagctgcacgtccgaggcttggggaggacccaggactgtgtgggtttcttacctgcctgagccacctcagggaatcttccagcctaatgcaggcatttctgcacctttggggtcatgctttgtagcagtgtctcccttgcgacctcgcaataaattggccccacggggtgattttgacagtc

SEQ ID NO: 107413 - DNA, 2499 bp, Homo sapiens
  Payload ID: 1080
  Gene Symbol: ANKMY1
  Gene Name: ankyrin repeat and MYND domain containing 1
  Uniprot ID: Q9P2S6
  ENST ID: ENST00000361678
  CDS Start-End: 159-2312
cggggctgtctccagggaaacgcgacgctctccgtaggcgcagggctggcaagcagtcgggacgggagcgcgggcgtccgcggtggctgcagtcccgtcggtctccctgctgtccggcgcgagctcttcgagtcttgcttggttggaagaccacagacatggaaggggcccatgcctcccttagcttagaggacgaagtctctggggctggcagccgccaacgcccgctagaggggaagggcggcgagacccctgctgccgaggagccggggtccctgaagaactacgctgtcttcgccacaagggatgtttcagcagcccctgagaaggaagaggaggaagctgagggcccgctgagggcgcaggacctgagggagtcctacatccagctcgtccagggtgtgcaggagtggcaggatggttgcatgtaccagggggagtttgggttgaacatgaagcttggatatggcaaattctcttggcccacaggcgagtcataccatgggcagttttaccgggaccactgccatggcctgggtacctacatgtggccagatggctccagtttcacgggcacattttacctcagccaccgagaaggctacggcaccatgtacatgaagacacggcttttccagactcactgccacaacgacattgtcaaccttctcctggactgtggggccgacgtgaacaagtgctcagatgagggtctcacggcactcagcatgtgtttcctcctccactaccccgcccagtccttcaagcccaatgttgctgaacggaccatacctgagccccaggaacctccaaaattcccagttgttccaatcctttcatcatcatttatggacacaaacctggagtctctgtactatgaggtgaacgtgccttcccagggtagctatgagctgaggccaccgccagcaccactgctcctgccacgcgtctcaggcagccacgagggcggccacttccaggacaccgggcagtgtggggggtccatagaccacaggagcagctctctgaagggggactccccgttggtgaagggcagccttggccatgtggaaagcgggcttgaggacgtgttgggaaacacagaccggggcagtctgtgcagtgctgagacgaaatttgagtccaacgtgtgtgtgtgcgacttctccatcgagctctcgcaggccatgctggagagaagcgcccagtcccacagcttgctgaagatggcctcgccctcaccgtgcaccagcagcttcgacaaagggaccatgcggaggatggcgctgtccatgatcgagcggaggaagcgctggcggaccatcaagctgctgctgcgccggggcgcggaccccaacctgtgctgcgtgcccatgcaggtcctgttccttgctgtgaaggccggggacgtggatggggtgaggctgctgctggagcacggggcgaggaccgacatctgctttccgccgcagctgagcaccctgacaccactccacatcgctgccgcccttcctggggaggagggggtacagattgtggagctgctgttgcatgccatcaccgatgtggacgccaaggcatccgacgaggacgacacttacaagcccggcaaggttgtgaaggagctcctgacccagggagctgaccccaacctgcccctgaccaaaggcttgggcagtgccctgtgtgttgcctgtgacctgacctacgagcaccagaggaacatggacagcaagctggccctgattgaccgactcatcagtcacggggccgacatcctgaagcctgtaatgctcaggcagggagaaaaggaggcagtgggcacagccgtggactatggctacttcagattcttccaggaccggaggattgcccgctgccccttccacacgctgatgccagcagagcgcgagacgttcctggcgcggaagcggctcctggagtacatgggcttgcagctacggcaggctgtctttgccaaggagagccagtgggaccccacgtggctgtacctgtgcaagagagcggagctgatccccagccacaggatgaagaagaagggccccagcctgcccaggggcctggatgtgaaggagcaggggcaaattcccttcttcaagttctgctaccagtgtggccgctccatcggggtccgcctcttgccctgccctcgctgctacgggatcctgacctgcagcaagtactgcaagaccaaggcctggaccgagttccacaagaaggactgcggggacctggtggccatcgtgacacaactggagcaagtttccaggaggagagaagaattccagtgaagcagcagctgcacgtccgaggcttggggaggacccaggactgtgtgggtttcttacctgcctgagccacctcagggaatcttccagcctaatgcaggcatttctgcacctttggggtcatgctttgtagcagtgtctcccttgcgacctcgcaataaattggccccacggggtgattttgacagtc

SEQ ID NO: 107414 - DNA, 2449 bp, Homo sapiens
  Payload ID: 1080
  Gene Symbol: ANKMY1
  Gene Name: ankyrin repeat and MYND domain containing 1
  ENST ID: ENST00000373318
  CDS Start-End: 100-2262
ggacgggagcgcgggcgtccgcggtggctgcagtcccgtcggtctccctgctgtccggcgcgagctcttcgagtcttgcttggttggaagaccacagacatggaaggggcccatgcctcccttagcttagaggacgaagtctctggggctggcagccgccaacgcccgctagaggggaagggcggcgagacccctgctgccgaggagccggggtccctgaagaactacgctgtcttcgccacaagggatgtttcagcagcccctgagaaggaagaggaggaagctgagggcccgctgagggcgcaggacctgagggagtcctacatccagctcgtccagggtgtgcaggagtggcaggatggttgcatgtaccagggggagtttgggttgaacatgaagcttggatatggcaaattctcttggcccacaggcgagtcataccatgggcagttttaccgggaccactgccatggcctgggtacctacatgtggccagatggctccagtttcacgggcacattttacctcagccaccgagaaggctacggcaccatgtacatgaagacacggcttttccagactcactgccacaacgacattgtcaaccttctcctggactgtggggccgacgtgaacaagtgctcagatgagggtctcacggcactcagcatgtgtttcctcctccactaccccgcccagtccttcaagcccaatgttgctgaacggaccatacctgagccccaggaacctccaaaattcccagttgttccaatcctttcatcatcatttatggacacaaacctggagtctctgtactatgaggtgaacgtgccttcccagggtagctatgagctgaggccaccgccagcaccactgctcctgccacgcgtctcaggcagccacgagggcggccacttccaggacaccgggcagtgtggggggtccatagaccacaggagcagctctctgaagggggactccccgttggtgaagggcagccttggccatgtggaaagcgggcttgaggacgtgttgggaaacacagaccggggcagtctgtgcagtgctgagacgaaatttgagtccaacgtgtgtgtgtgcgacttctccatcgagctctcgcaggccatgctggagagaagcgcccagtcccacagcttgctgaagatggcctcgccctcaccgtgcaccagcagcttcgacaaagggaccatgcggaggatggcgctgtccatgatcgagcggaggaagcgctggcggaccatcaagctgctgctgcgccggggcgcggaccccaacctgtgctgcgtgcccatgcaggtcctgttccttgctgtgaaggccggggacgtggatggggtgaggctgctgctggagcacggggcgaggaccgacatctgctttccgccgcagctgagcaccctgacaccactccacatcgctgccgcccttcctggggaggagggggtacagattgtggagctgctgttgcatgccatcaccgatgtggacgccaaggcatccgacgaggacgacacttacaagcccggcaagctggacctgctgccctcaagtctgaagctcagcaatgagccaggccctccccaagcctactacagcacggacacagccctcccggaggaggggggcaggacggctctgcacatggcctgcgagcgggaggatgacaacaagattgaccgactcatcagtcacggggccgacatcctgaagcctgtaatgctcaggcagggagaaaaggaggcagtgggcacagccgtggactatggctacttcagattcttccaggaccggaggattgcccgctgccccttccacacgctgatgccagcagagcgcgagacgttcctggcgcggaagcggctcctggagtacatgggcttgcagctacggcaggctgtctttgccaaggagagccagtgggaccccacgtggctgtacctgtgcaagagagcggagctgatccccagccacaggatgaagaagaagggccccagcctgcccaggggcctggatgtgaaggagcaggggcaaattcccttcttcaagttctgctaccagtgtggccgctccatcggggtccgcctcttgccctgccctcgctgctacgggatcctgacctgcagcaagtactgcaagaccaaggcctggaccgagttccacaagaaggactgcggggacctggtggccatcgtgacacaactggagcaagtttccaggaggagagaagaattccagtgaagcagcagctgcacgtccgaggcttggggaggacccaggactgtgtgggtttcttacctgcctgagccacctcagggaatcttccagcctaatgcaggcatttctgcacctttggggtcatgctttgtagcagtgtctcccttgcgacctcgcaataaattggccccacggggtgattttgacagtc

SEQ ID NO: 107415 - DNA, 3221 bp, Homo sapiens
  Payload ID: 1080
  Gene Symbol: ANKMY1
  Gene Name: ankyrin repeat and MYND domain containing 1
  ENST ID: ENST00000391987
  CDS Start-End: 426-1166
cggggctgtctccagggaaacgcgacgctctccgtaggcgcagggctggcaagcagtcgggacgggagcgcgggcgtccgcggtggctgcagtcccgtcggtctccctgctgtccggcgcgagctcttcgagtcttgcttggttggaagaccacagacatggaaggggcccatgcctcccttagcttagaggacgaagtctctggggctggcagccgccaacgcccgctagaggggaagggcggcgagacccctgctgccgaggagccggggtccctgaagaactacgctgtcttcgccacaagggatgtttcagcagcccctgagaaggaagaggaggaagctgagggcccgctgagggcgcaggacctgagggagtcctacatccagctcgtccagggtgtgcaggagtggcaggatggttgcatgtaccagggggagtttgggttgaacatgaagcttggatatggcaaattctcttggcccacaggcgagtcataccatgggcagttttaccgggaccactgccatggcctgggtacctacatgtggccagatggctccagtttcacgggcacattttacctcagccaccgagaaggctacggcaccatgtacatgaagacacggcttttccaggggctatacaaagcggaccagcggtttgggccaggtgtcgagacctaccccgatggcagccaggacgtggggctgtggttccgagagcagctcatcaagctgtgcacccagatccccagtggcttctccctcctcagataccctgagttctccagcttcatcacccacagccctgccaggatcagcctctcagaagaggagaaaacggagtggggactgcaggagggacaggatccctttttctatgactataagcggtttcttctgaatgacaacctaacgctgcctccagaaatgtatgtctactcgaccaacagtgaccacctgcccatgacaagctctttccgcaaagagctggacgcccgcatcttcctcaatgaaattcctccgttcgttgaggatggagaaccatggttcataatcaatgagacccctttgttggtcaaaatccagaagcaaacttacaagttcagactcactgccacaacgacattgtcaaccttctcctggactgtggggccgacgtgaacaagtgctcagatgagggtctcacggcactcagcatgtgtttcctcctccactaccccgcccagtccttcaagcccaatgttgctgaacggaccatacctgagccccaggaacctccaaaattcccagttgttccaatcctttcatcatcatttatggacacaaacctggagtctctgtactatgaggtgaacgtgccttcccagggtagctatgagctgaggccaccgccagcaccactgctcctgccacgcgtctcaggcagccacgagggcggccacttccaggacaccgggcagtgtggggggtccatagaccacaggagcagctctctgaagggggactccccgttggtgaagggcagccttggccatgtggaaagcgggcttgaggacgtgttgggaaacacagaccggggcagtctgtgcagtgctgagacgaaatttgagtccaacgtgtgtgtgtgcgacttctccatcgagctctcgcaggccatgctggagagaagcgcccagtcccacagcttgctgaagatggcctcgccctcaccgtgcaccagcagcttcgacaaagggaccatgcggaggatggcgctgtccatgatcgagcggaggaagcgctggcggaccatcaagctgctgctgcgccggggcgcggaccccaacctgtgctgcgtgcccatgcaggtcctgttccttgctgtgaaggccggggacgtggatggggtgaggctgctgctggagcacggggcgaggaccgacatctgctttccgccgcagctgagcaccctgacaccactccacatcgctgccgcccttcctggggaggagggggtacagattgtggagctgctgttgcatgccatcaccgatgtggacgccaaggcatccgacgaggacgacacttacaagcccggcaagctggacctgctgccctcaagtctgaagctcagcaatgagccaggccctccccaagcctactacagcacggacacagccctcccggaggaggggggcaggacggctctgcacatggcctgcgagcgggaggatgacaacaagtgtgccagggacatagtccggctccttctatcccacggagcaaatcctaacctgctgtggagtggccactccccgctctccctgtccattgccagtgggaatgagctggttgtgaaggagctcctgacccagggagctgaccccaacctgcccctgaccaaaggcttgggcagtgccctgtgtgttgcctgtgacctgacctacgagcaccagaggaacatggacagcaagctggccctgattgaccgactcatcagtcacggggccgacatcctgaagcctgtaatgctcaggcagggagaaaaggaggcagtgggcacagccgtggactatggctacttcagattcttccaggaccggaggattgcccgctgccccttccacacgctgatgccagcagagcgcgagacgttcctggcgcggaagcggctcctggagtacatgggcttgcagctacggcaggctgtctttgccaaggagagccagtgggaccccacgtggctgtacctgtgcaagagagcggagctgatccccagccacaggatgaagaagaagggccccagcctgcccaggggcctggatgtgaaggagcaggggcaaattcccttcttcaagttctgctaccagtgtggccgctccatcggggtccgcctcttgccctgccctcgctgctacgggatcctgacctgcagcaagtactgcaagaccaaggcctggaccgagttccacaagaaggactgcggggacctggtggccatcgtgacacaactggagcaagtttccaggaggagagaagaattccagtgaagcagcagctgcacgtccgaggcttggggaggacccaggactgtgtgggtttcttacctgcctgagccacctcagggaatcttccagcctaatgcaggcatttctgcacctttggggtcatgctttgtagcagtgtctcccttgcgacctcgcaataaattggccccacggggtgattttgacagtc

SEQ ID NO: 107416 - DNA, 569 bp, Homo sapiens
  Payload ID: 1080
  Gene Symbol: ANKMY1
  Gene Name: ankyrin repeat and MYND domain containing 1
  ENST ID: ENST00000391988
  CDS Start-End: 1-569
gaagcgctggcggaccatcaagctgctgctgcgccggggcgcggaccccaacctgtgctgcgtgcccatgcaggtcctgttccttgctgtgaaggccggggacgtggatggggtgaggctgctgctggagcacggggcgaggaccgacatctgctttccgccgcagctgagcaccctgacaccactccacatcgctgccgcccttcctggggaggagggggtacagattgtggagctgctgttgcatgccatcaccgatgtggacgccaaggcatccgacgaggacgacacttacaagcccggcaagtgtgccagggacatagtccggctccttctatcccacggagcaaatcctaacctgctgtggagtggccactccccgctctccctgtccattgccagtgggaatgagctggttgtgaaggagctcctgacccagggagctgaccccaacctgcccctgaccaaaggcttgggcagtgccctgtgtgttgcctgtgacctgacctacgagcaccagaggaacatggacagcaagctggccctgattgaccgactcatcagtcacg

SEQ ID NO: 107417 - DNA, 2874 bp, Homo sapiens
  Payload ID: 1080
  Gene Symbol: ANKMY1
  Gene Name: ankyrin repeat and MYND domain containing 1
  ENST ID: ENST00000403283
  CDS Start-End: 161-2692
ctcgaaacaccgcccccctaaaggcccgcccacctggaaggccttcgccaggctgaggccgcggtgccgcatgaggtacgcggtgcagacggcggccgagcggctgcggccgttcttgcagtagactaggcaggcgccgccggcgcgcaccgcggcctccatggcggcgcacgtgggctccaggtgcgccagcaggtcctcagccgggtcgtcgaacacgggcacgcgcagctctgccacgccgggcgcgcgcgggccgggctgctggcgggagacgttgacgcacagcgtgactcccgcgcgcgccagctgctcctccgcgcccgcggctcgcgcgctcccgaggaagagtgagggcgcgacgcgcaccaacggtggaggttggaagaccacagacatggaaggggcccatgcctcccttagcttagaggacgaagtctctggggctggcagccgccaacgcccgctagaggggaagggcggcgagacccctgctgccgaggagccggggtccctgaagaactacgctgtcttcgccacaagggatgtttcagcagcccctgagaaggaagaggaggaagctgagggcccgctgagggcgcaggacctgagggagtcctacatccagctcgtccagggtgtgcaggagtggcaggatggttgcatgtaccagggggagtttgggttgaacatgaagcttggatatggcaaattctcttggcccacaggcgagtcataccatgggcagttttaccgggaccactgccatggcctgggtacctacatgtggccagatggctccagtttcacgggcacattttacctcagccaccgagaaggctacggcaccatgtacatgaagacacggcttttccagactcactgccacaacgacattgtcaaccttctcctggactgtggggccgacgtgaacaagtgctcagatgagggtctcacggcactcagcatgtgtttcctcctccactaccccgcccagtccttcaagcccaatgttgctgaacggaccatacctgagccccaggaacctccaaaattcccagttgttccaatcctttcatcatcatttatggacacaaacctggagtctctgtactatgaggtgaacgtgccttcccagggtagctatgagctgaggccaccgccagcaccactgctcctgccacgcgtctcaggcagccacgagggcggccacttccaggacaccgggcagtgtggggggtccatagaccacaggagcagctctctgaagggggactccccgttggtgaagggcagccttggccatgtggaaagcgggcttgaggacgtgttgggaaacacagaccggggcagtctgtgcagtgctgagacgaaatttgagtccaacgtgtgtgtgtgcgacttctccatcgagctctcgcaggccatgctggagagaagcgcccagtcccacagcttgctgaagatggcctcgccctcaccgtgcaccagcagcttcgacaaagggaccatgcggaggatggcgctgtccatgatcgagcggaggaagcgctggcggaccatcaagctgctgctgcgccggggcgcggaccccaacctgtgctgcgtgcccatgcaggtcctgttccttgctgtgaaggccggggacgtggatggggtgaggctgctgctggagcacggggcgaggaccgacatctgctttccgccgcagctgagcaccctgacaccactccacatcgctgccgcccttcctggggaggagggggtacagattgtggagctgctgttgcatgccatcaccgatgtggacgccaaggcatccgacgaggacgacacttacaagcccggcaagctggacctgctgccctcaagtctgaagctcagcaatgagccaggccctccccaagcctactacagcacggacacagccctcccggaggaggggggcaggacggctctgcacatggcctgcgagcgggaggatgacaacaaggttgtgaaggagctcctgacccagggagctgaccccaacctgcccctgaccaaaggcttgggcagtgccctgtgtgttgcctgtgacctgacctacgagcaccagaggaacatggacagcaagctggccctgattgaccgactcatcagtcacggggccgacatcctgaagcctgtaatgctcaggcagggagaaaaggaggcagtgggcacagccgtggactatggctacttcagattcttccaggaccggaggattgcccgctgccccttccacacgctgatgccagcagagcgcgagacgttcctggcgcggaagcggctcctggagtacatgggcttgcagctacggcaggctgtctttgccaaggagagccagtgggaccccacgtggctgtacctgtgcaagagagcggagctgatccccagccacaggatgaagaagaagggccccagcctgcccaggggcctggatgtgaaggagcaggggcaaattcccttcttcaagttctgctaccagtgtggccgctccatcggggtccgcctcttgccctgccctcgctgctacgggatcctgacctgcagcaagtactgcaagaccaaggcctggaccgagttccacaagaaggactgcggggacctggtggccatcgtgacacaactggagcaagtttccaggaggagagaagaattccagtgaagcagcagctgcacgtccgaggcttggggaggacccaggactgtgtgggtttcttacctgcctgagccacctcagggaatcttccagcctaatgcaggcatttctgcacctttggggtcatgctttgtagcagtgtctcccttgcgacctcgcaataaattggccccacggggtgattttga

SEQ ID NO: 107418 - DNA, 2396 bp, Homo sapiens
  Payload ID: 1080
  Gene Symbol: ANKMY1
  Gene Name: ankyrin repeat and MYND domain containing 1
  ENST ID: ENST00000406958
  CDS Start-End: 101-2209
gggacgggagcgcgggcgtccgcggtggctgcagtcccgtcggtctccctgctgtccggcgcgagctcttcgagtcttgcttggttggaagaccacagacatggaaggggcccatgcctcccttagcttagaggacgaagtctctggggctggcagccgccaacgcccgctagaggggaagggcggcgagacccctgctgccgaggagccggggtccctgaagaactacgctgtcttcgccacaagggatgtttcagcagcccctgagaaggaagaggaggaagctgagggcccgctgagggcgcaggacctgagggagtcctacatccagctcgtccagggtgtgcaggagtggcaggatggttgcatgtaccagggggagtttgggttgaacatgaagcttggatatggcaaattctcttggcccacaggcgagtcataccatgggcagttttaccgggaccactgccatggcctgggtacctacatgtggccagatggctccagtttcacgggcacattttacctcagccaccgagaaggctacggcaccatgtacatgaagacacggcttttccagactcactgccacaacgacattgtcaaccttctcctggactgtggggccgacgtgaacaagtgctcagatgagggtctcacggcactcagcatgtgtttcctcctccactaccccgcccagtccttcaagcccaatgttgctgaacggaccatacctgagccccaggaacctccaaaattcccagttgttccaatcctttcatcatcatttatggacacaaacctggagtctctgtactatgagctctcgcaggccatgctggagagaagcgcccagtcccacagcttgctgaagatggcctcgccctcaccgtgcaccagcagcttcgacaaagggaccatgcggaggatggcgctgtccatgatcgagcggaggaagcgctggcggaccatcaagctgctgctgcgccggggcgcggaccccaacctgtgctgcgtgcccatgcaggtcctgttccttgctgtgaaggccggggacgtggatggggtgaggctgctgctggagcacggggcgaggaccgacatctgctttccgccgcagctgagcaccctgacaccactccacatcgctgccgcccttcctggggaggagggggtacagattgtggagctgctgttgcatgccatcaccgatgtggacgccaaggcatccgacgaggacgacacttacaagcccggcaagctggacctgctgccctcaagtctgaagctcagcaatgagccaggccctccccaagcctactacagcacggacacagccctcccggaggaggggggcaggacggctctgcacatggcctgcgagcgggaggatgacaacaagtgtgccagggacatagtccggctccttctatcccacggagcaaatcctaacctgctgtggagtggccactccccgctctccctgtccattgccagtgggaatgagctggttgtgaaggagctcctgacccagggagctgaccccaacctgcccctgaccaaaggcttgggcagtgccctgtgtgttgcctgtgacctgacctacgagcaccagaggaacatggacagcaagctggccctgattgaccgactcatcagtcacggggccgacatcctgaagcctgtaatgctcaggcagggagaaaaggaggcagtgggcacagccgtggactatggctacttcagattcttccaggaccggaggattgcccgctgccccttccacacgctgatgccagcagagcgcgagacgttcctggcgcggaagcggctcctggagtacatgggcttgcagctacggcaggctgtctttgccaaggagagccagtgggaccccacgtggctgtacctgtgcaagagagcggagctgatccccagccacaggatgaagaagaagggccccagcctgcccaggggcctggatgtgaaggagcaggggcaaattcccttcttcaagttctgctaccagtgtggccgctccatcggggtccgcctcttgccctgccctcgctgctacgggatcctgacctgcagcaagtactgcaagaccaaggcctggaccgagttccacaagaaggactgcggggacctggtggccatcgtgacacaactggagcaagtttccaggaggagagaagaattccagtgaagcagcagctgcacgtccgaggcttggggaggacccaggactgtgtgggtttcttacctgcctgagccacctcagggaatcttccagcctaatgcaggcatttctgcacctttggggtcatgctttgtagcagtgtctcccttgcgacctcgcaataaattggccccacggggtgattttgacagtc

SEQ ID NO: 107419 - DNA, 3304 bp, Homo sapiens
  Payload ID: 1080
  Gene Symbol: ANKMY1
  Gene Name: ankyrin repeat and MYND domain containing 1
  ENST ID: ENST00000405002
  CDS Start-End: 483-1361
aaaggcccgcccacctggaaggccttcgccaggctgaggccgcggtgccgcatgaggtacgcggtgcagacggcggccgagcggctgcggccgttcttgcagtagactaggcaggcgccgccggcgcgcaccgcggcctccatggcggcgcacgtgggctccaggtgcgccagcaggtcctcagccgggtcgtcgaacacgggcacgcgcagctctgccacgccgggcgcgcgcgggccgggctgctggcgggagacgttgacgcacagcgtgactcccgcgcgcgccagctgctcctccgcgcccgcggctcgcgcgctcccgaggaagagtgagggcgcgacgcgcaccaacggtggagggatgtttcagcagcccctgagaaggaagaggaggaagctgagggcccgctgagggcgcaggacctgagggagtcctacatccagctcgtccagggtgtgcaggagtggcaggatggttgcatgtaccagggggagtttgggttgaacatgaagcttggatatggcaaattctcttggcccacaggcgagtcataccatgggcagttttaccgggaccactgccatggcctgggtacctacatgtggccagatggctccagtttcacgggcacattttacctcagccaccgagaaggctacggcaccatgtacatgaagacacggcttttccagactcactgccacaacgacattgtcaaccttctcctggactgtggggccgacgtgaacaagtgctcagatgagggtctcacggcactcagcatgtgtttcctcctccactaccccgcccagtccttcaagcccaatgttgctgaacggaccatacctgagccccaggaacctccaaaattcccagttgttccaatcctttcatcatcatttatggacacaaacctggagtctctgtactatgaggtgaacgtgccttcccagggtagctatgagctgaggccaccgccagcaccactgctcctgccacgcgtctcaggcagccacgagggcggccacttccaggacaccgggcagtgtggggggtccatagaccacaggagcagctctctgaagggggactccccgttggtgaagggcagccttggccatgtggaaagcgggcttgaggacgtgttgggaaacacagaccggggcagtctgtgcagtgctgagacgaaatttgagtccaacgtgtgtgtgtgcgacttctccatcgagctctcgcaggccatgctggagagaagcgcccagtcccacagcttgctgaagatggcctcgccctcaccgtgcaccagcagcttcgacaaagggaccatgcggaggatggcgctgtccatgatcgagtaggtcctggcaccagctggtgggggtggagggccaccatcagggctgaatcctatgctcagcagacccacgtctcttccctgtgccagtgggaggcgttgtgtctggagatgtgtgtctgaatgtgtgagcatccctgtgtcggtggctccacgccatggccagccctgtgggggtgccacggtgacgggctgttttcagtgccaccccagccctgtgggggtgccacggtgacgggctgttttcagtaccacgccagccctgctttggcctttggcactggcctgaagtgtctctgtgggagcctcagcaggggccactgtcaggggtcctatcctagccatagtgcacgtgagtgacacctgcctgggcagctctcacacccctgctgtccaccctgtctataccagtgtgtctcaaaatgtggtctatgcacccccgggggtccaagaccctttcagggagtctgtggggtcaaaatgattctcttgataaccctgagactctgttagccttctccttgtgttgatgttggtggatggtatgaagacagggccgtgcagaccaccagcccccagcgtgcagggcagcagtgcccggcctgcttgggggcatggtattccttcaccacggtgtgcacttgcggggatgcctgtctcactgaagaatgcctttgacaaagcagaaaagcaatgacaaattgcattaaatcttgctccttgcgtacacacccctcgaatattctgggtcggaaaacatgggaaggacactgatgtgtgtctgccacagaccaaggcacaccgcttccccgcaagaagcgcttcccccagggccagagtagcaacagaatgcggcatcttcccaacctcctgccccatttttgattggaagaatgaccactggtatgtggctgttcattctcctgaacacagcctgccactttaaggaaaacatatgacactatttgttgctggcgaaatttacattttcaagtgaatagcagaattctggacacttgccaccaccaccaagaccttcatagcttcccttaactttgagacatgggtgttcagaggtttttcacgtgagatggcgttagcagcgcagttttgtgatactgcctgaagacatgccgacagtgcccagatctcttctattggtgagccagcttttcccacacggccaagttctgatgttgaaccattgccaggtgggtgaagatccattgacagtgagaggtgggcccgtgggcttcagtgcagccaggcgcagaaggctggttcatgagtgtccagctccgccaggtagctagctcaccacccccagcctgggttcatgtagttcaaataggaagaccacgatgatcagaaaggctgctcaaatactccttcgtccagccgcgtacctgggggaggctgaatctccactcacttccaccaaggctgtgcagagcagataggggaatccagcaaaggtggaaaacagtgccatccttctccccaactggttttgttttgtaaaataactttttgtgacagtgttacttattagtaacatgcagtgggtttgttatggttaacaagttggtgagcattattgagaggtgaagccagctgagcttctgggttgggtggggacttggagaacttttgtgtctagctaaaggattgtaaatgcaccaatcaatgctcagtgtctagctaaaggattgtaaatgcaccaatcagcactctgtaaaattgaccaatcagcgttctgtaaaatggaccaatcagtggtctgtaaaatggaccagtcagcaggatgtgggcggggccaaaaaagggaataaaagctggccaccgccaggctccccaccagcctgcagcgacaacctgcttagtttcctttctgtgctgtggaagctttgttctttcagtcttcacaataaatcttgctgctgctca

SEQ ID NO: 107420 - DNA, 252 bp, Homo sapiens
  Payload ID: 1080
  Gene Symbol: ANKMY1
  Gene Name: ankyrin repeat and MYND domain containing 1
  ENST ID: ENST00000407275
  CDS Start-End: 1-252
gccccttccacacgctgatgccagcagagcgcgagacgttcctggcgcggaagcggctcctggagtacatgggcttgcagctacggcaggctgtctttgccaaggagagccagtgggaccccacgtggctgtacctgtgcaagagagaattcccttcttcaagttctgctaccagtgtggccgctccatcggggtccgcctcttgccctgccctcgctgctacgggatcctgacctgcagcaagtactgcaa

SEQ ID NO: 107421 - DNA, 1827 bp, Homo sapiens
  Payload ID: 1080
  Gene Symbol: ANKMY1
  Gene Name: ankyrin repeat and MYND domain containing 1
  Uniprot ID: Q9P2S6
  ENST ID: ENST00000405523
  CDS Start-End: 159-1478
cggggctgtctccagggaaacgcgacgctctccgtaggcgcagggctggcaagcagtcgggacgggagcgcgggcgtccgcggtggctgcagtcccgtcggtctccctgctgtccggcgcgagctcttcgagtcttgcttggttggaagaccacagacatggaaggggcccatgcctcccttagcttagaggacgaagtctctggggctggcagccgccaacgcccgctagaggggaagggcggcgagacccctgctgccgaggagccggggtccctgaagaactacgctgtcttcgccacaagggatgtttcagcagcccctgagaaggaagaggaggaagctgagggcccgctgagggcgcaggacctgagggagtcctacatccagctcgtccagggtgtgcaggagtggcaggatggttgcatgtaccagggggagtttgggttgaacatgaagcttggatatggcaaattctcttggcccacaggcgagtcataccatgggcagttttaccgggaccactgccatggcctgggtacctacatgtggccagatggctccagtttcacgggcacattttacctcagccaccgagaaggctacggcaccatgtacatgaagacacggcttttccagactcactgccacaacgacattgtcaaccttctcctggactgtggggccgacgtgaacaagtgctcagatgagggtctcacggcactcagcatgtgtttcctcctccactaccccgcccagtccttcaagcccaatgttgctgaacggaccatacctgagccccaggaacctccaaaattcccagttgttccaatcctttcatcatcatttatggacacaaacctggagtctctgtactatgaggtgaacgtgccttcccagggtagctatgagctgaggccaccgccagcaccactgctcctgccacgcgtctcaggcagccacgagggcggccacttccaggacaccgggcagtgtggggggtccatagaccacaggagcagctctctgaagggggactccccgttggtgaagggcagccttggccatgtggaaagcgggcttgaggacgtgttgggaaacacagaccggggcagtctgtgcagtgctgagacgaaatttgagtccaacgtgtgtgtgtgcgacttctccatcgagctctcgcaggccatgctggagagaagcgcccagtcccacagcttgctgaagatggcctcgccctcaccgtgcaccagcagcttcgacaaagggaccatgcggaggatggcgctgtccatgatcgagcggaggaagcgctggcggaccatcaagctgctgctgcgccggggcgcggaccccaacctgtgctgcgtgcccatgcaggtcctgttccttgctgtgaaggccggggacgtggatggggtgaggctgctgctggagcacggggcgaggaccgacatctgctttccgccgcagtgttgaagcaaactaaggggaagcgcatcctgaaggccccttggaaaggggagacttatattcaggaggaggcgggcctcctttcaacccacgctcagcatcacaaggacgcaggcaggagaggcaaagggttttggtgctgaggttttatctttagctcaacagatccagccgcaaaatatttagctgagaaaaaatcttcgaaggggaatctgattttatattttttttcttaagaagtgcctttcccagcggacggcttcttccctctctgaggccacacccacccgtgagcaagcggcttcacagggcattttgctctggaataaattagcctgctagttcttcgaagaaa

SEQ ID NO: 107422 - DNA, 3232 bp, Homo sapiens
  Payload ID: 1080
  Gene Symbol: ANKMY1
  Gene Name: ankyrin repeat and MYND domain containing 1
  ENST ID: ENST00000401804
  CDS Start-End: 140-3232
acgcgacgctctccgtaggcgcagggctggcaagcagtcgggacgggagcgcgggcgtccgcggtggctgcagtcccgtcggtctccctgctgtccggcgcgagctcttcgagtcttgcttggttggaagaccacagacatggaaggggcccatgcctcccttagcttagaggacgaagtctctggggctggcagccgccaacgcccgctagaggggaagggcggcgagacccctgctgccgaggagccggggtccctgaagaactacgctgtcttcgccacaagggatgtttcagcagcccctgagaaggaagaggaggaagctgagggcccgctgagggcgcaggacctgagggagtcctacatccagctcgtccagggtgtgcaggagtggcaggatggttgcatgtaccagggggagtttgggttgaacatgaagcttggatatggcaaattctcttggcccacaggcgagtcataccatgggcagttttaccgggaccactgccatggcctgggtacctacatgtggccagatggctccagtttcacgggcacattttacctcagccaccgagaaggctacggcaccatgtacatgaagacacggcttttccaggggctatacaaagcggaccagcggtttgggccaggtgtcgagacctaccccgatggcagccaggacgtggggctgtggttccgagagcagctcatcaagctgtgcacccagatccccagtggcttctccctcctcagataccctgagttctccagcttcatcacccacagccctgccaggatcagcctctcagaagaggagaaaacggagtggggactgcaggagggacaggatccctttttctatgactataagcggtttcttctgaatgacaacctaacgctgcctccagaaatgtatgtctactcgaccaacagtgaccacctgcccatgacaagctctttccgcaaagagctggacgcccgcatcttcctcaatgaaattcctccgttcgttgaggatggagaaccatggttcataatcaatgagacccctttgttggtcaaaatccagaagcaaacttacaagttcaggaacaagccagctcacaccagctggaacatgggcgccatcctggaggggaagcgcagtggctttgcaccctgtgggcccaaagagcaactttccatggagatgatcctaaaggctgaggaagggaaccacgaatggatttgtaggatcctgaaggacaactttgctagtgctgacgtggcggacgcaaagggctacactgtgcttgctgcggctgctactcactgccacaacgacattgtcaaccttctcctggactgtggggccgacgtgaacaagtgctcagatgagggtctcacggcactcagcatgtgtttcctcctccactaccccgcccagtccttcaagcccaatgttgctgaacggaccatacctgagccccaggaacctccaaaattcccagttgttccaatcctttcatcatcatttatggacacaaacctggagtctctgtactatgaggtgaacgtgccttcccagggtagctatgagctgaggccaccgccagcaccactgctcctgccacgcgtctcaggcagccacgagggcggccacttccaggacaccgggcagtgtggggggtccatagaccacaggagcagctctctgaagggggactccccgttggtgaagggcagccttggccatgtggaaagcgggcttgaggacgtgttgggaaacacagaccggggcagtctgtgcagtgctgagacgaaatttgagtccaacgtgtgtgtgtgcgacttctccatcgagctctcgcaggccatgctggagagaagcgcccagtcccacagcttgctgaagatggcctcgccctcaccgtgcaccagcagcttcgacaaagggaccatgcggaggatggcgctgtccatgatcgagcggaggaagcgctggcggaccatcaagctgctgctgcgccggggcgcggaccccaacctgtgctgcgtgcccatgcaggtcctgttccttgctgtgaaggccggggacgtggatggggtgaggctgctgctggagcacggggcgaggaccgacatctgctttccgccgcagctgagcaccctgacaccactccacatcgctgccgcccttcctggggaggagggggtacagattgtggagctgctgttgcatgccatcaccgatgtggacgccaaggcatccgacgaggacgacacttacaagcccggcaagctggacctgctgccctcaagtctgaagctcagcaatgagccaggccctccccaagcctactacagcacggacacagccctcccggaggaggggggcaggacggctctgcacatggcctgcgagcgggaggatgacaacaagtgtgccagggacatagtccggctccttctatcccacggagcaaatcctaacctgctgtggagtggccactccccgctctccctgtccattgccagtgggaatgagctggttgtgaaggagctcctgacccagggagctgaccccaacctgcccctgaccaaaggcttgggcagtgccctgtgtgttgcctgtgacctgacctacgagcaccagaggaacatggacagcaagctggccctgattgaccgactcatcagtcacggggccgacatcctgaagcctgtaatgctcaggcagggagaaaaggaggcagtgggcacagccgtggactatggctacttcagattcttccaggaccggaggattgcccgctgccccttccacacgctgatgccagcagagcgcgagacgttcctggcgcggaagcggctcctggagtacatgggcttgcagctacggcaggctgtctttgccaaggagagccagtgggaccccacgtggctgtacctgtgcaagagagcggagctgatccccagccacaggatgaagaagaagggccccagcctgcccaggggcctggatgtgaaggagcaggggcaaattcccttcttcaagttctgctaccagtgtggccgctccatcggggtccgcctcttgccctgccctcgctgctacgggatcctgacctgcagcaagtactgcaagaccaaggcctggaccgagttccacaagaaggactgcggggacctggtggccatcgtgacacaactggagcaagtttccaggaggagagaagaattccagtga

SEQ ID NO: 107423 - DNA, 565 bp, Homo sapiens
  Payload ID: 1080
  Gene Symbol: ANKMY1
  Gene Name: ankyrin repeat and MYND domain containing 1
  ENST ID: ENST00000443318
  CDS Start-End: 1-565
gcgctcccgaggaagagtgagggcgcgacgcgcaccaacggtggaggggctatacaaagcggaccagcggtttgggccaggtgtcgagacctaccccgatggcagccaggacgtggggctgtggttccgagagcagctcatcaagctgtgcacccagatccccagtggcttctccctcctcagataccctgagttctccagcttcatcacccacagccctgccaggatcagcctctcagaagaggagaaaacggagtggggactgcaggagggacaggatccctttttctatgactataagcggtttcttctgaatgacaacctaacgctgcctccagaaatgtatgtctactcgaccaacagtgaccacctgcccatgacaagctctttccgcaaagagctggacgcccgcatcttcctcaatgaaattcctccgttcgttgaggatggagaaccatggttcataatcaatgagacccctttgttggtcaaaatccagaagcaaacttacaagttcagactcactgccacaacgacattgtcaaccttctcctggactgtgggg

SEQ ID NO: 107424 - DNA, 652 bp, Homo sapiens
  Payload ID: 1080
  Gene Symbol: ANKMY1
  Gene Name: ankyrin repeat and MYND domain containing 1
  ENST ID: ENST00000411765
  CDS Start-End: 430-652
acagcgtgactcccgcgcgcgccagctgctcctccgcgcccgcggctcgcgcgctcccgaggaagagtgagggcgcgacgcgcaccaacggtggaggaaggcccagctgtttcccaccatggtgcctctgtacatcccagtccagttcctgaaatgcgctctgtagcctggagagctcctgcgcatcctgtgaagccccatcaagaatccgctctcctgcagtccttccccgaggccctcggagggtccaagacagccaatccctcttctctgcggtgactcttgcggcctccctcatctcgttccctccgcaggcctcgagttacccttgcgccttccacatttactgaatgaacaaaggccggggctggaatcaggcagggcttgagcaagtcgtggctccacgtgctaggttggaagaccacagacatggaaggggcccatgcctcccttagcttagaggacgaagtctctggggctggcagccgccaacgcccgctagaggggaagggcggcgagacccctgctgccgaggagccggggtccctgaagaactacgctgtcttcgccacaagggatgtttcagcagcccctgagaaggaagaggaggaagctgagggcccgctgagggcgcaggacctgagggagtcct

SEQ ID NO: 107425 - DNA, 555 bp, Homo sapiens
  Payload ID: 1080
  Gene Symbol: ANKMY1
  Gene Name: ankyrin repeat and MYND domain containing 1
  ENST ID: ENST00000441168
  CDS Start-End: 52-555
aaaggcccgcccacctggaaggccttcgccaggctgaggccgcggtgccgcatgagggatgtttcagcagcccctgagaaggaagaggaggaagctgagggcccgctgagggcgcaggacctgagggagtcctacatccagctcgtccagggtgtgcaggagtggcaggatggttgcatgtaccagggggagtttgggttgaacatgaagcttggatatggcaaattctcttggcccacaggcgagtcataccatgggcagttttaccgggaccactgccatggcctgggtacctacatgtggccagatggctccagtttcacgggcacattttacctcagccaccgagaaggctacggcaccatgtacatgaagacacggcttttccagactcactgccacaacgacattgtcaaccttctcctggactgtggggccgacgtgaacaagtgctcagatgagggtctcacggcactcagcatgtgtttcctcctccactaccccgcccagtccttcaagcccaatgttgctgaacggaccatacctgagccccag

SEQ ID NO: 107426 - DNA, 945 bp, Homo sapiens
  Payload ID: 1080
  Gene Symbol: ANKMY1
  Gene Name: ankyrin repeat and MYND domain containing 1
  ENST ID: ENST00000418708
  CDS Start-End: 264-945
cgagaggccgctagcagcgccctgcggaccggcccgcagccccggcgcccgccccggactcacggcgggggcgtcggtcgaggtgtaccgcaggatgacctggaagggctggtgcgcctgcagctcgggcggcagcgtgacgggatgtttcagcagcccctgagaaggaagaggaggaagctgagggcccgctgagggcgcaggacctgagggagtcctacatccagctcgtccagggtgtgcaggagtggcaggatggttgcatgtaccagggggagtttgggttgaacatgaagcttggatatggcaaattctcttggcccacaggcgagtcataccatgggcagttttaccgggaccactgccatggcctgggtacctacatgtggccagatggctccagtttcacgggcacattttacctcagccaccgagaaggctacggcaccatgtacatgaagacacggcttttccaggggctatacaaagcggaccagcggtttgggccaggtgtcgagacctaccccgatggcagccaggacgtggggctgtggttccgagagcagctcatcaagctgtgcacccagatccccagtggcttctccctcctcagataccctgagttctccagcttcatcacccacagccctgccaggatcagcctctcagaagaggagaaaacggagtggggactgcaggagggacaggatccctttttctatgactataagcggtttcttctgaatgacaacctaacgctgcctccagaaatgtatgtctactcgaccaacagtgaccacctgcccatgacaagctctttccgcaaagagctggacgcccgcatcttcctcaatgaaattcctccgttcgttgaggatggagaaccatggttcataatcaatgagacccctttgttggtcaaaatccagaagcaaacttacaagt

SEQ ID NO: 107427 - DNA, 2555 bp, Homo sapiens
  Payload ID: 1081
  Gene Symbol: ANKMY2
  Gene Name: ankyrin repeat and MYND domain containing 2
  Uniprot ID: Q8IV38
  ENST ID: ENST00000306999
  CDS Start-End: 245-1570
caatgacaggcggcaggcggtgaccgccgcagggcctgcggagaccgtccgcctggctcgcccgagctcgcccgctgtccgccagcccgcgggagggaggagagaagcgaagcgtttccgcggttggctactcagtgtcttggtctcaagttgcctcattgcggctggcgttcccaatacagacgcatcgtttcttttttaatactccctaagaaagggaataaccttcaagctggcgggagcaatggttcacataaagaaaggcgagctgacccaggaggagaaggagctactggaagtcatcgggaaaggtactgtccaagaagctggaacattattatccagcaagaatgttcgtgtcaactgtttggacgagaatggaatgactcctctaatgcatgcagcatataaaggaaaactcgatatgtgcaaattactactgcgacatggagccgatgtaaattgtcatcagcatgaacatggatacacagccctcatgtttgctgcactttctggtaataaagacatcacatgggtaatgttagaagctggtgctgagacagatgttgtcaactctgtgggaagaacagcagctcagatggcagcctttgtgggtcaacatgattgtgtgaccataatcaacaatttctttcctcgagagagactggattattacactaagccccagggactggataaagagccaaaactgcccccaaagttggcaggcccgctgcacaaaattatcaccacaacgaatcttcatcctgtcaagatcgtgatgcttgtaaatgagaatcctctgctgacagaagaagcagccctgaataaatgctacagagtgatggatttgatttgtgagaaatgtatgaagcaaagagacatgaatgaagtattggctatgaagatgcattacataagctgtatctttcagaaatgcattaacttcttaaaagatggagagaataaactggacaccttgatcaaaagcttgttaaaaggccgagcttctgatggctttccagtgtatcaagaaaagatcattagagaaagtatcagaaaatttccttactgtgaagctacactcctccagcagctggttcgaagcattgctcctgttgaaattggttctgatcccactgcattctccgtccttacccaagccatcactggccaggtgggttttgtggatgtggaattttgcactacctgtggagaaaagggagcaagtaaaagatgttcagtttgcaaaatggtaatatattgtgatcaaacctgccagaaaacacactggtttactcataagaaaatctgtaagaatctgaaggacatttacgaaaagcaacagttggaggctgccaaagaaaagagacaagaggaaaaccacggcaaacttgatgtcaattctaactgtgttaatgaagagcaaccagaggctgaagtaggtatctctcaaaaggattccaatcctgaagattccggggaaggaaagaaagaatctcttgaaagcgaagctgagttggaaggcttacaggatgctcctgcagggccacaggtgtctgaggagtaaaagccagagcaagtgccagtgtggatgatcctcaccctgcaagaagctggaaaactcctaggaatgcattgtcctcaccttgttatacctgcgtggcaccatggcaggattccacatttcatagaatacaggttttcaagcaaacccctgttgaccatgccctaatttcctattgatttctgttctataattgaatggatattcctatggaaaattttttgtttcaaaatacaggaaaaacattcctattacctttctgaggctggctttccagcaattgtttcaaaggaaaatagatccccttaaagaaaaaatacaggctttagggaacaaagggacaagcagaacaggtgtggaagagagattttcaggaagggaaaaatttatagctacagagggtagttagaaaaatcataacttatatgtgaataaaatacatataagcagcatttacggtagtggcattctacttattaagatgcaatgaaatgaagaaaggctttatgttcaaggacctttgccatagttcagctaattgtagttttatatagaaatgatcctgaacactctgaacttgacgtagtcctgcggtgatattctatctgcagtatttgtacctccagaatggcagatccctcagcaggaacaaaggcatattgacggttctctcagcgtatgcattaaaaaaggtacttcctgaaacttttgattcaataatgactaaacatactatgtacacaattactgtaaggctaattcacgtgccatactccacctgaaagcctgagttatcttgctataagcttttcatggagcacttcctttccagaaactgatttgtaactcatttagagaatgtcctggcgtcggtttttagcatatgtggtatttaaacagagctagaatgtgatgtctgaagataatgctgcatttctgggtttcttgtgtggattttaaaataaattgtgcctacaaatataaacaa

SEQ ID NO: 107428 - DNA, 2599 bp, Homo sapiens
  Payload ID: 1081
  Gene Symbol: ANKMY2
  Gene Name: ankyrin repeat and MYND domain containing 2
  ENST ID: ENST00000447802
  CDS Start-End: 183-1208
cgagctcgcccgctgtccgccagcccgcgggagggaggagagaagcgaagcgtttccgcggttggctactcagtgtcttggtctcaagttgcctcattgcggctggcgttcccaatacagacgcatcgtttcttttttaatactccctaagaaagggaataaccttcaagctggcgggagcaatggttcacataaagaaaggcgagctgacccaggaggagaaggagctactggaagtcatcgggaaaggtactgtccaagaagctggaacattattatccagcaagaatgttcgtgtcaactgtttggacgagaatggaatgactcctctaatgcatgcagcatataaaggaaaactcgatatgtgcaaattactactgcgacatggagccgatgtaaattgtcatcagcatgaacatggatacacagccctcatgtttgctgcactttctggtaataaagacatcacatgggtaatgttagaagctggtgctgagacagatgttgtcaactctgtgggaagaacagcagctcagatggcagcctttgtgggtcaacatgattgtgtgaccataatcaacaatttctttcctcgagagagactggattattacactaagccccagggactggataaagagccaaaactgcccccaaagttggcaggcccgctgcacaaaattatcaccacaacgaatcttcatcctgtcaagatcgtgatgcttgtaaatgagaatcctctgctgacagaagaagcagccctgaataaatgctacagagtgatggatttgatttgtgagaaatgtatgaagcaaagagacatgaatgaagtattggctatgaagatgcattacataagctgtatctttcagaaatgcattaacttcttaaaagatggagagaataaactggacaccttgatcaaaagcttgttaaaaggccgagcttctgatggctttccagtgtatcaagaaaagatcattagagaaagtatcagaaaatttccttactgtgaagctacactcctccagcagctggttcgaagcattgctcctgttgaaattggttctgatcccactgcattctccgtccttacccaagccatcactggccaggtgggttttgtggatgtggaattttgcactacctgtggagaaaagggagcaagtaaaagatgttcagtttgcaaaatgtgcagagaactttgaaatcatgtgagaaagtgtatgaatgcaaggatgaatgaagaattggggccaataatacaatatatgtataagggcctaccacagtgcttggcatacagtaatatattgtgatcaaacctgccagaaaacacactggtttactcataagaaaatctgtaagaatctgaaggacatttacgaaaagcaacagttggaggctgccaaagaaaagagacaagaggaaaaccacggcaaacttgatgtcaattctaactgtgttaatgaagagcaaccagaggctgaagtaggtatctctcaaaaggattccaatcctgaagattccggggaaggaaagaaagaatctcttgaaagcgaagctgagttggaaggcttacaggatgctcctgcagggccacaggtgtctgaggagtaaaagccagagcaagtgccagtgtggatgatcctcaccctgcaagaagctggaaaactcctaggaatgcattgtcctcaccttgttatacctgcgtggcaccatggcaggattccacatttcatagaatacaggttttcaagcaaacccctgttgaccatgccctaatttcctattgatttctgttctataattgaatggatattcctatggaaaattttttgtttcaaaatacaggaaaaacattcctattacctttctgaggctggctttccagcaattgtttcaaaggaaaatagatccccttaaagaaaaaatacaggctttagggaacaaagggacaagcagaacaggtgtggaagagagattttcaggaagggaaaaatttatagctacagagggtagttagaaaaatcataacttatatgtgaataaaatacatataagcagcatttacggtagtggcattctacttattaagatgcaatgaaatgaagaaaggctttatgttcaaggacctttgccatagttcagctaattgtagttttatatagaaatgatcctgaacactctgaacttgacgtagtcctgcggtgatattctatctgcagtatttgtacctccagaatggcagatccctcagcaggaacaaaggcatattgacggttctctcagcgtatgcattaaaaaaggtacttcctgaaacttttgattcaataatgactaaacatactatgtacacaattactgtaaggctaattcacgtgccatactccacctgaaagcctgagttatcttgctataagcttttcatggagcacttcctttccagaaactgatttgtaactcatttagagaatgtcctggcgtcggtttttagcatatgtggtatttaaacagagctagaatgtgatgtctgaagataatgctgcatttctgggtttcttgtgtggattttaaaataaattgtgcctacaaatat

SEQ ID NO: 107429 - DNA, 587 bp, Homo sapiens
  Payload ID: 1081
  Gene Symbol: ANKMY2
  Gene Name: ankyrin repeat and MYND domain containing 2
  ENST ID: ENST00000453623
  CDS Start-End: 90-299
tcattgcggctggcgttcccaatacagacgcatcgtttcttttttaatactccctaagaaagggaataaccttcaagctggcgggagcaatggttcacataaagaaaggcgagctgacccaggaggagaaggagctactggaagtcatcgggaaaggcgtgccccacttccgcagtgctgagtcccagcggggagccccgaggacgagccagaagccatatttccccggagtccccgagtggacgtcccagaggagttccctgccgagtcccgttacctggcaggtgacatcagcgtgactgcatgcttcttctgcaccctcacggtgcagggatggtgatgcgtactgtccaagaagctggaacattattatccagcaagaatgttcgtgtcaactgtttggacgagaatggaatgactcctctaatgcatgcagcatataaaggaaaactcgatatgtgcaaattactactgcgacatggagccgatgtaaattgtcatcagcatgaacatggatacacagccctcatgtttgctgcactttctggtaataaagacatcacatgggtaatgttagaagctggtgc

SEQ ID NO: 107430 - DNA, 1270 bp, Homo sapiens
  Payload ID: 1081
  Gene Symbol: ANKMY2
  Gene Name: ankyrin repeat and MYND domain containing 2
  ENST ID: ENST00000628652
  CDS Start-End: 245-1270
caatgacaggcggcaggcggtgaccgccgcagggcctgcggagaccgtccgcctggctcgcccgagctcgcccgctgtccgccagcccgcgggagggaggagagaagcgaagcgtttccgcggttggctactcagtgtcttggtctcaagttgcctcattgcggctggcgttcccaatacagacgcatcgtttcttttttaatactccctaagaaagggaataaccttcaagctggcgggagcaatggttcacataaagaaaggcgagctgacccaggaggagaaggagctactggaagtcatcgggaaaggtactgtccaagaagctggaacattattatccagcaagaatgttcgtgtcaactgtttggacgagaatggaatgactcctctaatgcatgcagcatataaaggaaaactcgatatgtgcaaattactactgcgacatggagccgatgtaaattgtcatcagcatgaacatggatacacagccctcatgtttgctgcactttctggtaataaagacatcacatgggtaatgttagaagctggtgctgagacagatgttgtcaactctgtgggaagaacagcagctcagatggcagcctttgtgggtcaacatgattgtgtgaccataatcaacaatttctttcctcgagagagactggattattacactaagccccagggactggataaagagccaaaactgcccccaaagttggcaggcccgctgcacaaaattatcaccacaacgaatcttcatcctgtcaagatcgtgatgcttgtaaatgagaatcctctgctgacagaagaagcagccctgaataaatgctacagagtgatggatttgatttgtgagaaatgtatgaagcaaagagacatgaatgaagtattggctatgaagatgcattacataagctgtatctttcagaaatgcattaacttcttaaaagatggagagaataaactggacaccttgatcaaaagcttgttaaaaggccgagcttctgatggctttccagtgtatcaagaaaagatcattagagaaagtatcagaaaatttccttactgtgaagctacactcctccagcagctggttcgaagcattgctcctgttgaaattggttctgatcccactgcattctccgtccttacccaagccatcactggccaggtgggttttgtggatgtggaattttgcactacctgtggagaaaagggagcaagtaaaagatgttcagtttgcaaaatgtgcagagaactttga

SEQ ID NO: 107431 - DNA, 210 bp, Homo sapiens
  Payload ID: 1081
  Gene Symbol: ANKMY2
  Gene Name: ankyrin repeat and MYND domain containing 2
  ENST ID: ENST00000627859
  CDS Start-End: 1-210
atggttcacataaagaaaggcgagctgacccaggaggagaaggagctactggaagtcatcgggaaaggcgtgccccacttccgcagtgctgagtcccagcggggagccccgaggacgagccagaagccatatttccccggagtccccgagtggacgtcccagaggagttccctgccgagtcccgttacctggcaggtgacatcagcgtga

SEQ ID NO: 107432 - DNA, 6994 bp, Homo sapiens
  Payload ID: 1082
  Gene Symbol: ASB1
  Gene Name: ankyrin repeat and SOCS box containing 1
  Uniprot ID: Q9Y576
  ENST ID: ENST00000264607
  CDS Start-End: 248-1255
tcggttagccgcgaagttcccgccggacgaagggaccagccagcgccctgctagacagcgaggccggaagcggaggcgtggcccctgcgcggccccggaaaccagtgaggccggcgcgcgcccgccggaagccgcgaccccgacgcgccccccattgccctcggcgccggaagtggtcgcgggtcgttctgcttcctgcccgaggggcgtgcgcgggtcaggggcggccgcggaggcggaagcatccatggcggagggcggcagcccagacgggcgggcagggccgggctccgcaggtcgtaatctgaaggagtggctgagggagcaattttgtgatcatccgctggagcactgtgaggacacgaggctccatgatgcagcttacgtcggggacctccagaccctcaggagcctattgcaagaggagagctaccggagccgcatcaacgagaagtctgtctggtgctgtggctggctcccctgcacaccgttgcgaatcgcggccactgcaggccatgggagctgtgtggacttcctcatccggaagggggccgaggtggatctggtggacgtaaaaggacagacggccctgtatgtggctgtggtgaacgggcacctagagagtacccagatccttctcgaagctggcgcggaccccaacggaagccggcaccatcgcagcacccctgtctaccacgcctctcgcgtgggccgggcagacatcctgaaggccctcatcaggtacggggctgatgttgacgtcaaccaccacctgactcctgatgtccagcctcgattctcccggcggctcacctccttggtggtctgccccttgtacatcagcgcagcctaccacaacctccagtgcttccggctgctcctcctggctggcgcgaaccctgacttcaactgcaatggtcctgtcaacacacagggattctacaggggctcccctgggtgcgtcatggatgctgttctgcgccacggctgtgaggcagccttcgtgagcctgctggtagaatttggagccaacctgaatctagtgaagtgggaatcgctgggcccagagtcgagaggaagaagaaaagtggaccctgaggccttgcaggtctttaaagaggccagaagtgttcccagaaccttgctgtgtctgtgccgtgtggctgtgagaagagctcttggcaaacaccggcttcatctgattccttcgctgcctctgccagaccccataaagaagtttctactccatgagtagactccaagtgctgcggttgattccagtgagggagaaagtgatctgcagggaggtggacaccgagccctgagtgctgtgctgctgctggtctcctgatggctgttgctgcagaagatgtcctcgtagactgtcattgctcctcaggtgcctgggccgctgaacagtccttgggtcattgtcagctgagaggcttatactaaagttattattgtttttcccaagttctctgttctggattttcagttgcatattaatgtaacgggccatggggtatgtacatgtaggggctgaggttggaggcctactaatttccctgtagggaagactcccagcacttctggaactgtgcttctctttatttttctacttctcaatttgatggttcgattaaagccttctagtatctcaatgaaaagggagtttcgtaagcaaaatagaggacagaaatgcagttcatgaacttgctggttggtttttcctgctcctggggtaacacatgcgcttgtcatacacgccccttccttgccccttcagtattctctctttgcgatggaggtctcatagtgagtgtcttcactcaagggtggtttcctggctgcacggcacctgttccaacacctactgtgcctctcatcaggtgtcacgatttttctgccacttcaccttagggagcttccagtgattgattttaggaggcccacaccaaactccccaggaaatgactgccttccttgggaccaaggaccgttccaacagcattcactgccagttctaataggcgaggaaaatgcccgaggcgctgtcttctgtcccccacacgtaccagaaagtgaaaaatgcagcgagtcctctgggtggttatgagcctccaggcgcatgctgtccagtggacagaacatctggcggttggttgattgctctcttttgtcttggtcgctgcttctagaatctatgcaggggatagcagtgaggtcagaagtctttcccgggagagagatggcctgggttatcattgctgatagctttggctgcatgagttgggcttccccttacccagggctgcacagccaggtgtgagggtcaccggcaggtgggctggtggctgcagcctcagagccctcccaggttgctgctgtttccagtgaatcacatttcgtcatttgaagcccatgaggaccattgtgtggatccatggtgattctagacttcagatatatttaggaaggcgcagatttcaaatctgtgtttgattttctgtaataagagaaatccaatttgtaaaacttgaacaatgataccgttttatttacttagtagcatcactgtgtgtcttagcaggcaggcagtgtctggccattattgcgttctacagccagaggatagaattctatacccccaaccccttgtgtcacaaatgggctctgtgtgggtcaccccagctgacccgtgtatgtgcagatgcagttccgaagggaagaacagtcctcgggtgattcagaggggaaaatgcaatccgggaggtgtttcctcagctgaggtgacactgttagaagctgtgatggttgtgtaaatgtgggctgtgtgctgttcccgaggggagcttgggattgggtcctgctgaagccaggagggtcttcccaagataggagaggaaccgcaggtggtgagcggctggggagggccaggacagccggggctgggtgctgcaggggcttcagcccgggagagggggtgggcgtgttctttgtggtaccaaagtgggactaggacaaaaattgggctgtggctggggcaggagctatagggagttaaggaatgatgatacggaagttggagccaccaccgtggactgggccttgtcactggaggtcgtaggcagtggctcatcaccctggtagggctgataggggctttcagggaggctggttagctccctgcactctggctctttactggcttactgtttagctcctcccacctcgaggctcttcttcctgccaccctttgggctcagaggagggtggcttttttcgaggtgagccatgttgtagacacatgatacgctctgcgtctgctctactgagtactttctgcaggggcctgttaaggacgaggcctccccagccctgcccggtgcaggaggtggctcagttattgaaccttttgggaagcagcacctgggaatgctgcctcgtgggagtcccatgcgtgagtgtggtggtgtgaccttcaggctgcacagaggcaaggacccagatgtggcagcatgggcgtcatgctcctttgcacagcccagggcctgttttggagggaccaggtcactgcccctggtctctctaggaggagtggactgaatggatcgttgcagagaagactcacccagacctggccagggaatgatgtatctggggagagaatgagctggaggagggggcctctcatggcccttccctggcctgtggcccagcctggctggcctgcaggtgtctagggtctcagcttttcatttgcagaggacatgttcaacttcctctctgttcaagccagcctttgccaattttttcagaatccaaacaatttggaggtttggtatcttgtttcatagctgccaaatatgaatctgaaaacagggtgggtagctaaggtcattcctcctgggttttagtggcattgccttccttcactaaagctcccttttttttctgttggcaaggacaggttacagaataggaagagtagcactttccgcctaagcactttaggaaatcacctttctaagccctggggcgcccaagtcccatgggacagggaaacgtggtcctcagtgaggctgctgcctggctggcccggagtcctccctaggagaggggctcgatgggctgggggaaggagcctgaaggttgcccctggttgcatcccagaagcatctgactgtcaccactgccagtggctgtggaacagtcctgggccctgggccttggctgctgtcaacagatgggctgggctgggctgtggtggggtgggggacaacgttggtaactctgagaattcagctttggagtcccgggtgaggggttttagataaacccatcaatatcacccacattctgtgactctttgcatcactcgtgttatttatttatttatttatattctgccttgttccagaaaagtgtttaaggcaacaatgcttgttttttggtgttttcttttgacatttgaaaatttagtacattgttaaaatgtacttgttaaacaggtaattttaaagagaaggaacaattgtttttagtaagttttctttttcctttttcaatgaattgattcttcaaattaaaagttcttgagagaaggagaggaagatacagcagacataggactgagccaaggaagagtctgcctgagagagacgcttggcctgtgctttgctgccatccgtgcggccttggccacatccctattaacagaggcagctccacttcagacagggacaaggcttcctgctgtgcctttctggcagggttttgtggggtcacatgggaagcaatgtgttacgcaagcagtctccatgtgtgtgtaaactgctgtcctggtgacttgtccctcttcttagtggaaatgcatttgagatggtgacagggctggatgaacgtgtgaccctgggagatccgggctggactgtggaccccgatgggccagagtccttgtggcccacagcatagcactggggacagagcgctctatgcaggtgaggcgtatgagaacagcatggtaaataattgatgaagtcacatttgttcaacttaaaggattgttctttattctgaagttattttcttccttatttggatgataaaatttccttttatgtaatgaaggtaaaagtagagggcaatatttttgctttttgaaatgctcttggttgcaaaacaaaatgttggttgctgtttgtcagccccagaatttcttcttaagttcgcctgtctctgaaatcccaaagtcacggaaccgcagtctagctgtggtgcatgtttacgtattggtgagaaattcctcttgggttcttgaacagcctgtacgctggcaggcagcactgcagcatttctgctgctcatggccaagaacgagtctggagatcgctgcgtgcggttttaggaagtgccaacacccgtggtgatgggcctctggccacccctggatccatgggacacactcacaggaagctgatgtggccttctcggtgaggactgcaccttaacctgggcactgggagcctgtggcccccctgtatgttggtgatgacactagtgtgggtcttctggctctggggctacagcttctgcctcctcacctggccgtcggtactcggcaagcaggcctggcctcccggggcctggatccctaccggctgggattggcctcctggaagtacctgtttgggccatgtgacctcctttctcacttatgcctcactcccctcctcccgctccaaacccgaacctctcagtgtggaatgaacgctccaaacccgaacctctcagtgtggaatgaacgctccaaacccgaacctctcagtgtggaatgaaacagtttagatgtgtacatgatgcacgtgggtgggattcacatcccaggagaattccacggagaggaatgtgcagattttgaagtgtacagtgatgtgtggaataaatactagaaattctcagcagacagtgggatggagaagtgagtgggggcaggagggggatttctgttgccttgacatgtcgttgctcagtgcctggattgcaggcgagtctctcttttttatgttgctttgatttcaagatctcttagatatactaggtagtgtatgaatgtgcataaatccagtttgagaatggtgtttatgaagaagctgtttcgtgtgtacagttgctgctgtaatttagccagcagtgccctgccctgccctgcagtgtctgctcagctcccactgcttctctttgctgttgggcatgtgaggcatgacttggaggggggcctggtgcctggggacctgctgaagagaatgctcaccaccagctctctgtttccctttctgctttggtaatcaacacgtgtttgcctgcagtggccgggaccgtgactgtttctgcccttgtgcctagttaagagccttcaaaagcataatgaacacttttgatatgatattgtaactttagtaaatgctttacttccctctaattgcccccaaatgccttaattttgtggactgtttatttcaacaggtggaagtgttggtcgtgcgaaatcttggtattcgcatttcaagaagggagttcttttttctttcttctttctatggaacgtttcaagtgattggatagaaagaagggctctgaagcaggagttttcacctgctctgagggaacttggggctccagggacgtaccccaaatgttgcccaggttgaaactccctgacagcctgttctacgtagtggctcgtggtttccagtttgaagagagttgtgcccctaaaagtgtttgaaacctgtggctttcaagcaaggtaccgttgtccccacagtgttccgtggggtagggggtgatggagactgtgggcaagcctgttgtttttggccccctgttgttacatgggacctgttttgacggtgggagggtgagatgtgaagatgtgggatgaacctggaatgaacgaattaaataaagacatgcatccatctgtcagcga

SEQ ID NO: 107433 - DNA, 878 bp, Homo sapiens
  Payload ID: 1082
  Gene Symbol: ASB1
  Gene Name: ankyrin repeat and SOCS box containing 1
  ENST ID: ENST00000409297
  CDS Start-End: 68-772
gggtcgttctgcttcctgcccgaggggcgtgcgcgggtcaggggcggccgcggaggcggaagcatccatggcggagggcggcagcccagacgggcgggcagggccgggctccgcaggtcgtaatctgaaggagtggctgagggagcaattttgtgatcatccgctggagcactgtgaggacacgaggctccatgatgcagcttacgtcggggacctccagaccctcaggagcctattgcaagaggagagctaccggaggtacggggctgatgttgacgtcaaccaccacctgactcctgatgtccagcctcgattctcccggcggctcacctccttggtggtctgccccttgtacatcagcgcagcctaccacaacctccagtgcttccggctgctcctcctggctggcgcgaaccctgacttcaactgcaatggtcctgtcaacacacagggattctacaggggctcccctgggtgcgtcatggatgctgttctgcgccacggctgtgaggcagccttcgtgagcctgctggtagaatttggagccaacctgaatctagtgaagtgggaatcgctgggcccagagtcgagaggaagaagaaaagtggaccctgaggccttgcaggtctttaaagaggccagaagtgttcccagaaccttgctgtgtctgtgccgtgtggctgtgagaagagctcttggcaaacaccggcttcatctgattccttcgctgcctctgccagaccccataaagaagtttctactccatgagtagactccaagtgctgcggttgattccagtgagggagaaagtgatctgcagggaggtggacaccgagccctgagtgctgtgctgctgctggtctcctgatggctgttgc

SEQ ID NO: 107434 - DNA, 1048 bp, Homo sapiens
  Payload ID: 1082
  Gene Symbol: ASB1
  Gene Name: ankyrin repeat and SOCS box containing 1
  ENST ID: ENST00000438264
  CDS Start-End: 43-228
ggcgtgcgcgggtcaggggcggccgcggaggcggaagcatccatggcggagggcggcagcccagacgggcgggcagggccgggctccgcagccgcatcaacgagaagtctgtctggtgctgtggctggctcccctgcacaccgttgcgaatcgcggccactgcaggccatgggagctgtgtggacttcctcatccggaagggggccgaggtggatctggtggacgtaaaaggacagacggccctgtatgtggctgtggtgaacgggcacctagagagtacccagatccttctcgaagctggcgcggaccccaacggaagccggcaccatcgcagcacccctgtctaccacgcctctcgcgtgggccgggcagacatcctgaaggccctcatcaggtacggggctgatgttgacgtcaaccaccacctgactcctgatgtccagcctcgattctcccggcggctcacctccttggtggtctgccccttgtacatcagcgcagcctaccacaacctccagtgcttccggctgctcctcctggctggcgcgaaccctgacttcaactgcaatggtcctgtcaacacacagggattctacaggggctcccctgggtgcgtcatggatgctgttctgcgccacggctgtgaggcagccttcgtgagcctgctggtagaatttggagccaacctgaatctagtgaagtgggaatcgctgggcccagagtcgagaggaagaagaaaagtggaccctgaggccttgcaggtctttaaagaggccagaagtgttcccagaaccttgctgtgtctgtgccgtgtggctgtgagaagagctcttggcaaacaccggcttcatctgattccttcgctgcctctgccagaccccataaagaagtttctactccatgagtagactccaagtgctgcggttgattccagtgagggagaaagtgatctgcagggaggtggacaccgagccctgagtgctgtgctgctgctggtctcctgatggctgttgctgcagaagatgtcctcgtagactgtcattgctcc

SEQ ID NO: 107435 - DNA, 1820 bp, Homo sapiens
  Payload ID: 1083
  Gene Symbol: ASB10
  Gene Name: ankyrin repeat and SOCS box containing 10
  Uniprot ID: Q8WXI3
  ENST ID: ENST00000275838
  CDS Start-End: 262-1551
aggtcctaagggcttgagtgaaaggagaagcccccggctgtttctccccgacctcaaagcttgcccaatagcctacaccttggcccaagaacacagtcatgtggagcccagaatagctcctgctggatgcgtggccaggtcagcctcggagcgtgggacacaggggccttctgtctgtctgtatttccctcctgctctctctctctctctctgcctttggcatatacctctcctcctccccactcccctttccctgcccacatgctcatgagttggtctccagaagagtgcaaggggcagggagagcccctcgatgacagacaccccctctgtgccaggctggtggagaagcccagcagagggtctgaggagcacctcaagtctggcccgggacccatcgtcacccgcacagcctcaggacctgcccttgccttctggcaggcagtgctggctggggacgtgggctgtgtctcccgcatcctcgcggactccagtactggcctggctcctgattccgtctttgataccagcgacccagagcgatggagggatttccgcttcaacatccgtgctctgagactctggtctctgacatacgaagaggagctgaccaccccactgcatgtggcagccagccgtggccacacggaagtcctgcggctgctgctgaggcggcgagcaaggccagacagtgcccctgggggccgcaccgccctgcacgaggcctgtgctgcaggccacactgcctgtgttcatgtgctgctggtggcaggagccgaccccaacatcgctgaccaggatgggaaacgccccctgcatctctgccgggggcctggcacccttgagtgtgcggagctgctcctcaggtttggagcgagagtggatggtcggtccgaggaagaagaggagacccctttgcatgtggccgcccggcttggccatgtggagctggcagatctgcttctaagacggggggcatgtcctgatgcccgcaatgccgaaggctggaccccactgctggctgcctgtgacgtccgctgccagtccatcaccgatgccgaggccaccaccgcccgctgcctgcagctgtgcagcttgctgctttcagctggagcagacgctgatgctgcggaccaggacaagcagcgacccctgcacctggcctgccgccgtggccatgcagctgtcgtggagctgctcctgtcctgtggtgtcagcgccaacaccatggactatgggggacacacgcccctgcactgtgctctgcagggcccagctgcagccctggcccagagccccgagcacgtggttcgggctctgctcaaccatggcgccgtccgtgtctggccaggggccctccccaagaaacatcagcgtttctactcctccctcttcgccttggtgaggcagcccaggtcgctgcagcatttgagccgctgtgcgctccgctcccacctggagggcagcctgccccaagcgctgccccgcctccccctgccaccgcgcctgctccgctacctgcagctggattttgagggcgtgctctactagatgtccatggccttttgagagggcctgaaagcagatgccccagcctgcagagggcgcgcctctgcactaactcaggccaggtagccctggcagcaggaggcccagctccgcaggcaggtgtggatgctgcaattcccaatgcagagaagcggaccgacagcggcagccgggtgatgtctgatgaagacacactcctactggggctctcctgaggcccccttctagcctgtgcaaaccctgtatgtgcattaaaaatctccaggtctgtg

SEQ ID NO: 107436 - DNA, 1738 bp, Homo sapiens
  Payload ID: 1083
  Gene Symbol: ASB10
  Gene Name: ankyrin repeat and SOCS box containing 10
  Uniprot ID: Q8WXI3
  ENST ID: ENST00000377867
  CDS Start-End: 111-1469
cctgcgcctcccatgctgggccccacccagctcgggcccagcacccacctgcccagtccaccagcaacatcgctgggagtcgtgctgctttggctctcccagaacaagccatgccctggggaaagaactcctctccccactggggacaccatctggggtgccttccctccgccccggcctgccggatctggaggccccactcccgcccagcctgggagccccctcggccatcaccactgctctgccaagacatggccctgcagaatgccctctacaccggggacctggcaaggttgcaggagctgttccccccgcacagcacagccgacctgctgctggagagccgggccgcagagcctcgctggagcagccaccagaggggactctggtctctgacatacgaagaggagctgaccaccccactgcatgtggcagccagccgtggccacacggaagtcctgcggctgctgctgaggcggcgagcaaggccagacagtgcccctgggggccgcaccgccctgcacgaggcctgtgctgcaggccacactgcctgtgttcatgtgctgctggtggcaggagccgaccccaacatcgctgaccaggatgggaaacgccccctgcatctctgccgggggcctggcacccttgagtgtgcggagctgctcctcaggtttggagcgagagtggatggtcggtccgaggaagaagaggagacccctttgcatgtggccgcccggcttggccatgtggagctggcagatctgcttctaagacggggggcatgtcctgatgcccgcaatgccgaaggctggaccccactgctggctgcctgtgacgtccgctgccagtccatcaccgatgccgaggccaccaccgcccgctgcctgcagctgtgcagcttgctgctttcagctggagcagacgctgatgctgcggaccaggacaagcagcgacccctgcacctggcctgccgccgtggccatgcagctgtcgtggagctgctcctgtcctgtggtgtcagcgccaacaccatggactatgggggacacacgcccctgcactgtgctctgcagggcccagctgcagccctggcccagagccccgagcacgtggttcgggctctgctcaaccatggcgccgtccgtgtctggccaggggccctccccaaggtgctggagcgctggagcacgtgccctcggaccatcgaggtcctgatgaacacctacagtgttgtgcagcttcccgaggaggccgtcggcctggtgactcctgaaactctgcagaaacatcagcgtttctactcctccctcttcgccttggtgaggcagcccaggtcgctgcagcatttgagccgctgtgcgctccgctcccacctggagggcagcctgccccaagcgctgccccgcctccccctgccaccgcgcctgctccgctacctgcagctggattttgagggcgtgctctactagatgtccatggccttttgagagggcctgaaagcagatgccccagcctgcagagggcgcgcctctgcactaactcaggccaggtagccctggcagcaggaggcccagctccgcaggcaggtgtggatgctgcaattcccaatgcagagaagcggaccgacagcggcagccgggtgatgtctgatgaagacacactcctactggggctctcctgaggcccccttctagcctgtgcaaaccctgtatgtgcattaaaaatctccaggtctgtg

SEQ ID NO: 107437 - DNA, 1694 bp, Homo sapiens
  Payload ID: 1083
  Gene Symbol: ASB10
  Gene Name: ankyrin repeat and SOCS box containing 10
  Uniprot ID: Q8WXI3
  ENST ID: ENST00000420175
  CDS Start-End: 26-1429
tccccactcccctttccctgcccacatgctcatgagttggtctccagaagagtgcaaggggcagggagagcccctcgatgacagacaccccctctgtgccaggctggtggagaagcccagcagagggtctgaggagcacctcaagtctggcccgggacccatcgtcacccgcacagcctcaggacctgcccttgccttctggcaggcagtgctggctggggacgtgggctgtgtctcccgcatcctcgcggactccagtactggcctggctcctgattccgtctttgataccagcgacccagagcgatggagggatttccgcttcaacatccgtgctctgagactctggtctctgacatacgaagaggagctgaccaccccactgcatgtggcagccagccgtggccacacggaagtcctgcggctgctgctgaggcggcgagcaaggccagacagtgcccctgggggccgcaccgccctgcacgaggcctgtgctgcaggccacactgcctgtgttcatgtgctgctggtggcaggagccgaccccaacatcgctgaccaggatgggaaacgccccctgcatctctgccgggggcctggcacccttgagtgtgcggagctgctcctcaggtttggagcgagagtggatggtcggtccgaggaagaagaggagacccctttgcatgtggccgcccggcttggccatgtggagctggcagatctgcttctaagacggggggcatgtcctgatgcccgcaatgccgaaggctggaccccactgctggctgcctgtgacgtccgctgccagtccatcaccgatgccgaggccaccaccgcccgctgcctgcagctgtgcagcttgctgctttcagctggagcagacgctgatgctgcggaccaggacaagcagcgacccctgcacctggcctgccgccgtggccatgcagctgtcgtggagctgctcctgtcctgtggtgtcagcgccaacaccatggactatgggggacacacgcccctgcactgtgctctgcagggcccagctgcagccctggcccagagccccgagcacgtggttcgggctctgctcaaccatggcgccgtccgtgtctggccaggggccctccccaaggtgctggagcgctggagcacgtgccctcggaccatcgaggtcctgatgaacacctacagtgttgtgcagcttcccgaggaggccgtcggcctggtgactcctgaaactctgcagaaacatcagcgtttctactcctccctcttcgccttggtgaggcagcccaggtcgctgcagcatttgagccgctgtgcgctccgctcccacctggagggcagcctgccccaagcgctgccccgcctccccctgccaccgcgcctgctccgctacctgcagctggattttgagggcgtgctctactagatgtccatggccttttgagagggcctgaaagcagatgccccagcctgcagagggcgcgcctctgcactaactcaggccaggtagccctggcagcaggaggcccagctccgcaggcaggtgtggatgctgcaattcccaatgcagagaagcggaccgacagcggcagccgggtgatgtctgatgaagacacactcctactggggctctcctgaggcccccttctagcctgtgcaaaccctgtatgtgcattaaaaatctccaggtc

SEQ ID NO: 107438 - DNA, 779 bp, Homo sapiens
  Payload ID: 1083
  Gene Symbol: ASB10
  Gene Name: ankyrin repeat and SOCS box containing 10
  ENST ID: ENST00000415615
  CDS Start-End: 57-404
agtccaccagcaacatcgctgggagtcgtgctgctttggctctcccagaacaagccatgccctggggaaagaactcctctccccactggggacaccatctggggtgccttccctccgccccggcctgccggatctggaggccccactcccgcccagcctgggagccccctcggccatcaccactgctctgccaagacatggccctgcagaatgccctctacaccggggacctggcaaggttgcaggagctgttccccccgcacagcacagccgacctgctgctggagagccgggccgcagagcctcgctggagcagccaccagaggggtgaggggcatctgggggttgctgagaaccagggggctgggctgactgcctcggccacagaggtcctaagggcttgagtgaaaggagaagcccccggctgtttctccccgacctcaaagcttgcccaatagcctacaccttggcccaagaacacagtcatgtggagcccagaatagctcctgctggatgcgtggccaggctggtggagaagcccagcagagggtctgaggagcacctcaagtctggcccgggacccatcgtcacccgcacagcctcaggacctgcccttgccttctggcaggcagtgctggctggggacgtgggctgtgtctcccgcatcctcgcggactccagtactggcctggctcctgattccgtctttgataccagcgacccagagcgatggagggatttccgcttcaacatccgtgctctgagactctggtctctga

SEQ ID NO: 107439 - DNA, 2168 bp, Homo sapiens
  Payload ID: 1084
  Gene Symbol: ASB11
  Gene Name: ankyrin repeat and SOCS box containing 11, E3 ubiquitin protein ligase
  Uniprot ID: Q8WXH4
  ENST ID: ENST00000344384
  CDS Start-End: 74-982
agacaactcagaagacactagacaacagcagtcttatctaaagaaataagacctccaaggacgaagcatcagaatgcttcaattaactggggaaaatgagaagaattgtgaagtttcagaacgtatcagaaggtccggaccatggaaagagatttcttttggggattatatttgtcacacatttcagggagattgctgggctgatcgatccccacttcatgaagctgcagctcaggggcgcttactggcccttaaaactttaattgcacaaggtgtcaatgtgaaccttgtgacaattaaccgggtgtcttctctccacgaggcatgccttggaggtcacgtggcctgtgccaaagccttattggaaaatggtgcacacgtcaatggagtgacagttcacggagccacacccctcttcaatgcttgctgcagcggcagtgctgcatgtgtcaatgtgctgctggagttcggagccaaggcccagttggaggtgcacctggcctcgcccatccatgaggcagtgaagagaggtcacagagagtgcatggagatcctgctggcaaataatgttaacattgaccatgaggtgcctcagctcggaactcccctatatgtggcctgcacctaccagagggtagactgtgtgaagaaacttctagaattaggagccagtgtcgaccatggccagtggctggacaccccactccatgctgcagcgaggcagtccaatgtggaggtcatccacctgctaaccgactatggagctaacctgaagcgtagaaatgctcagggcaaaagtgcgcttgatctggcggctccaaaaagcagcgtggagcaggcactcttgctccgtgaaggcccacctgctctttcccagctctgccgcctgtgtgtccggaagtgtctcggtcgagcatgtcatcaagccatccacaagctacatctgccagagccactcgaacgattcctcctataccaatagtcctaagtgttcctgggaagatacttggaatgacacagattgttgtctgctgtacctagagtacctaatgtagaagctcaacagcttagactcctagtatctttaaatgagctcagtcgaagtaaatcccccatgagctagaacacttgaggagtggaaactcctggttagtttaatgttctcattaaccaaggggcaagtagaaaccatttagcttttagctcttgttgttaagaaacttaaaagaactgtgaagtagagtgaaaacaataggctgttttttgatgattcgggatcttcttgtacctaaaagtcaacattctgaatattgtatagacacatataaattcaggtggataagattataacaaatgttaggtattccaagatatgttcttgatttagttccttccttcagcccttccccactttttttctttctttccttgaataaatctggtataattttgattttttgtatatatatacgtatatatatatacatacatatacgtatatatatatacgtatatatatacacacacacacatgcactcatatatttaatgttttcaaagtccttaatatatatagttcatatatgttttcaaagtccttaatatatgtataaagcttatatatatatgttttcaaagttctttatatataaagttatatatatttatatagactttatatatatatacatatataaagttaaggacttcagaaacattgtagttaactgaggcttccagttactgcggtcctggttgataagagagactttggaagagatcagtgcacccagaggttggcatctattgcttattgcttctgatattaaatgctgttatttgaagtaagcagttctaggattgagaacactgggtgtccccaacaacctgaacccacaggcattgtctgaggcatgttgcaacccaagcactggcttattttcaaagtcaagatgctcagggtttttgaaataattacatactgatgccagccaccaaagtgggctcaatgctgggtcaatatttttttctgtggataggggcccaaaataagcacaaaggtatataaaaagaggcttctccttttctgtcttctccttcttctcatttctctctccttctgtcacccctcctcttcctctattctttctcttttttgtgaatttaga

SEQ ID NO: 107440 - DNA, 2748 bp, Homo sapiens
  Payload ID: 1084
  Gene Symbol: ASB11
  Gene Name: ankyrin repeat and SOCS box containing 11, E3 ubiquitin protein ligase
  Uniprot ID: Q8WXH4
  ENST ID: ENST00000380470
  CDS Start-End: 20-940
atacagagcataagccaaaatggaagatggtcctgttttctatggctttaaaaacatttttattacaatgtttgctacgttttttttctttaagcttttaattaaagtttttttggctctcctaacccatttctatatcgtcaaaggaaatagaaaagaagcggctaggatagcagaagagatctatggtggaatttcagattgctgggctgatcgatccccacttcatgaagctgcagctcaggggcgcttactggcccttaaaactttaattgcacaagcatgccttggaggtcacgtggcctgtgccaaagccttattggaaaatggtgcacacgtcaatggagtgacagttcacggagccacacccctcttcaatgcttgctgcagcggcagtgctgcatgtgtcaatgtgctgctggagttcggagccaaggcccagttggaggtgcacctggcctcgcccatccatgaggcagtgaagagaggtcacagagagtgcatggagatcctgctggcaaataatgttaacattgaccatgaggtgcctcagctcggaactcccctatatgtggcctgcacctaccagagggtagactgtgtgaagaaacttctagaattaggagccagtgtcgaccatggccagtggctggacaccccactccatgctgcagcgaggcagtccaatgtggaggtcatccacctgctaaccgactatggagctaacctgaagcgtagaaatgctcagggcaaaagtgcgcttgatctggcggctccaaaaagcagcgtggagcaggcactcttgctccgtgaaggcccacctgctctttcccagctctgccgcctgtgtgtccggaagtgtctcggtcgagcatgtcatcaagccatccacaagctacatctgccagagccactcgaacgattcctcctataccaatagtcctaagtgttcctgggaagatacttggaatgacacagattgttgtctgctgtacctagagtacctaatgtagaagctcaacagcttagactcctagtatctttaaatgagctcagtcgaagtaaatcccccatgagctagaacacttgaggagtggaaactcctggttagtttaatgttctcattaaccaaggggcaagtagaaaccatttagcttttagctcttgttgttaagaaacttaaaagaactgtgaagtagagtgaaaacaataggctgttttttgatgattcgggatcttcttgtacctaaaagtcaacattctgaatattgtatagacacatataaattcaggtggataagattataacaaatgttaggtattccaagatatgttcttgatttagttccttccttcagcccttccccactttttttctttctttccttgaataaatctggtataattttgattttttgtatatatatacgtatatatatatacatacatatacgtatatatatatacgtatatatatacacacacacacatgcactcatatatttaatgttttcaaagtccttaatatatatagttcatatatgttttcaaagtccttaatatatgtataaagcttatatatatatgttttcaaagttctttatatataaagttatatatatttatatagactttatatatatatacatatataaagttaaggacttcagaaacattgtagttaactgaggcttccagttactgcggtcctggttgataagagagactttggaagagatcagtgcacccagaggttggcatctattgcttattgcttctgatattaaatgctgttatttgaagtaagcagttctaggattgagaacactgggtgtccccaacaacctgaacccacaggcattgtctgaggcatgttgcaacccaagcactggcttattttcaaagtcaagatgctcagggtttttgaaataattacatactgatgccagccaccaaagtgggctcaatgctgggtcaatatttttttctgtggataggggcccaaaataagcacaaaggtatataaaaagaggcttctccttttctgtcttctccttcttctcatttctctctccttctgtcacccctcctcttcctctattctttctcttttttgtgaatttagaacatgggaactggatagacttttaattattgtaagtattactgtcatggttcagtattcagttctaaaatgaaaattccctctcagatcatcctaagactcatttcacacatgtttttttttcccccaatttttctagacctttggctctcaactggagacaattttgccccactcccactgagacatttgtcaatgtctgcagacatgtttagttgcaacaactgggggagaattgctactatcatctagacggtggagatcagggatgcagctaatcaccctacagtgcacaggagccagcaacaaagaattatcagatctggccgggcatggtggctcacgcctgtaatcccagcattttgggaggccgaggcaggcagatcgcactgtcaggagttcgagaaccgcctggccactatggtgaaaccctgtctctactaaaaatacaaaagttagccaggcgtggtggcaggtgcctatagtcccagctacttgggaggctgaggcaggagaatcacttgaacccgggaggcggagattgcagtaagccaagatcacgccactgcactccagcctgggtgacagagcgagactccgtctcaaaacaaaaaaaaaaaaaa

SEQ ID NO: 107441 - DNA, 1484 bp, Homo sapiens
  Payload ID: 1084
  Gene Symbol: ASB11
  Gene Name: ankyrin repeat and SOCS box containing 11, E3 ubiquitin protein ligase
  Uniprot ID: Q8WXH4
  ENST ID: ENST00000480796
  CDS Start-End: 52-1023
aactcagtgaaattttacagtcctaggaccctatacagagcataagccaaaatggaagatggtcctgttttctatggctttaaaaacatttttattacaatgtttgctacgttttttttctttaagcttttaattaaagtttttttggctctcctaacccatttctatatcgtcaaaggaaatagaaaagaagcggctaggatagcagaagagatctatggtggaatttcagattgctgggctgatcgatccccacttcatgaagctgcagctcaggggcgcttactggcccttaaaactttaattgcacaaggtgtcaatgtgaaccttgtgacaattaaccgggtgtcttctctccacgaggcatgccttggaggtcacgtggcctgtgccaaagccttattggaaaatggtgcacacgtcaatggagtgacagttcacggagccacacccctcttcaatgcttgctgcagcggcagtgctgcatgtgtcaatgtgctgctggagttcggagccaaggcccagttggaggtgcacctggcctcgcccatccatgaggcagtgaagagaggtcacagagagtgcatggagatcctgctggcaaataatgttaacattgaccatgaggtgcctcagctcggaactcccctatatgtggcctgcacctaccagagggtagactgtgtgaagaaacttctagaattaggagccagtgtcgaccatggccagtggctggacaccccactccatgctgcagcgaggcagtccaatgtggaggtcatccacctgctaaccgactatggagctaacctgaagcgtagaaatgctcagggcaaaagtgcgcttgatctggcggctccaaaaagcagcgtggagcaggcactcttgctccgtgaaggcccacctgctctttcccagctctgccgcctgtgtgtccggaagtgtctcggtcgagcatgtcatcaagccatccacaagctacatctgccagagccactcgaacgattcctcctataccaatagtcctaagtgttcctgggaagatacttggaatgacacagattgttgtctgctgtacctagagtacctaatgtagaagctcaacagcttagactcctagtatctttaaatgagctcagtcgaagtaaatcccccatgagctagaacacttgaggagtggaaactcctggttagtttaatgttctcattaaccaaggggcaagtagaaaccatttagcttttagctcttgttgttaagaaacttaaaagaactgtgaagtagagtgaaaacaataggctgttttttgatgattcgggatcttcttgtacctaaaagtcaacattctgaatattgtatagacacatataaattcaggtggataagattataacaaatgttaggtattccaagatatgttcttgatttagttccttccttcagcccttccccactttttttctttctttccttgaataaatctggt

SEQ ID NO: 107442 - DNA, 1089 bp, Homo sapiens
  Payload ID: 1084
  Gene Symbol: ASB11
  Gene Name: ankyrin repeat and SOCS box containing 11, E3 ubiquitin protein ligase
  ENST ID: ENST00000485437
  CDS Start-End: 1-675
atggaagatggtcctgttttctatggctttaaaaacatttttattacaatgtttgctacgttttttttctttaagcttttaattaaagtttttttggctctcctaacccatttctatatcgtcaaaggaaatagaaaagaagcggctaggatagcagaagagatctatggtggaatttcagattgctgggctgatcgatccccacttcatgaagctgcagctcaggggcgcttactggcccttaaaactttaattgcacaaggtgtcaatgtgaaccttgtgacaattaaccgggtgtcttctctccacgaggcatgccttggaggtcacgtggcctgtgccaaagccttattggaaaatggtgcacacgtcaatggagtgacagttcacggagccacacccctcttcaatgcttgctgcagcggcagtgctgcatgtgtcaatgtgctgctggagttcggagccaaggcccagttggaggtgcacctggcctcgcccatccatgaggcagtgaagagagagtctcgtgctgttgcccaggctgcagtgcagtggcatgatttctgctcattgcaacctctggctcctgggttcaagcgattctcctgcctcagcctcccaagtagctgggattacaggtcacagagagtgcatggagatcctgctggcaaataatgttaacattgaccatgaggtgcctcagctcggaactcccctatatgtggcctgcacctaccagagggtagactgtgtgaagaaacttctagaattaggagccagtgtcgaccatggccagtggctggacaccccactccatgctgcagcgaggcagtccaatgtggaggtcatccacctgctaaccgactatggagctaacctgaagcgtagaaatgctcagggcaaaagtgcgcttgatctggcggctccaaaaagcagcgtggagcaggcactcttgctccgtgaaggcccacctgctctttcccagctctgccgcctgtgtgtccggaagtgtctcggtcgagcatgtcatcaagccatccacaagctacatctgccagagccactcgaacgattcctcctataccaata

SEQ ID NO: 107443 - DNA, 1289 bp, Homo sapiens
  Payload ID: 1085
  Gene Symbol: ASB12
  Gene Name: ankyrin repeat and SOCS box containing 12
  Uniprot ID: Q8WXK4
  ENST ID: ENST00000362002
  CDS Start-End: 194-1150
actgactcctagtctttcaacggcattgttaacagtgggaaacgagagccccagctgctccaggttggggccgtgggggctccctaaggaggggacaccagggccccaatgtttcacagaggggcggggggcagcgaccctgggcagcatggcctcaggctgaagcccgatctggcatttccttgtgctcataatgagaatagttctccaattagccaagatgaacctcatggacatcaccaagatcttctccctcctgcagcccgacaaggaggaggaggacactgacacagaggagaagcaggctctcaatcaagcagtgtatgacaacgactcctatactttggaccagcttttgcgccaggagcgttacaaacgtttcatcaacagcaggagtggctggggtgttcctgggacacccttgcgcttggctgcttcttatggccacttgagctgtttgcaagtcctcttagcccatggtgctgatgttgacagcttggatgtcaaggcacagacgccacttttcactgctgtcagtcatggccatctggactgtgtacgtgtgcttttggaagctggtgcctctcctggtggtagcatctacaacaactgttctcccgtgctcacagctgcccgtgatggtgctgttgctatcctgcaggagctcctagaccatggtgcagaggccaacgtcaaagctaaactaccagtctgggcatcaaacatagcttcatgttctggccccctctatttggccgcagtctacgggcacctggactgtttccgcctgcttttgctccacggggcagaccctgactacaactgcactgaccagggcctattggctcgtgtcccaagaccccgcaccctccttgaaatctgcctccatcataattgtgagccagagtatatccagctgttaatcgattttggtgctaatatctaccttccatctctctcccttgacctgacctcacaagatgataaaggcattgcattgctgctacaggcccgagccactccacggtcacttctatcacaggtccgtttagtcgtccgcagagccttgtgccaggctggccagccacaagccatcaaccagctggatattcctcccatgttgattagctacctaaaacaccaactgtaatcttgcagtctccccaggaacttatgatgcctccgaaaaccacctggggactcacgtagctggagagcattacagcctcatccacttacctggagctgctctcctgtattatcctccacaataaaattctccagaaaat

SEQ ID NO: 107444 - DNA, 2699 bp, Homo sapiens
  Payload ID: 1086
  Gene Symbol: ASB13
  Gene Name: ankyrin repeat and SOCS box containing 13
  Uniprot ID: Q8WXK3
  ENST ID: ENST00000357700
  CDS Start-End: 28-864
gtcgccgcgcggccgccggtgagccgcatggagccccgggcggcggacggctgcttcctgggcgacgtgggtttctgggtggagcggacccctgtgcacgaggcagcccagcggggtgagagcctgcagctgcaacagctgatcgagagcggcgcctgcgtgaaccaggtcaccgtggactccatcacgcccctgcacgcagccagtctgcagggccaggcgcggtgtgtgcagctgctgctggcggctggggcccaggtggatgctcgcaacatcgacggcagcaccccgctctgcgatgcctgcgcctcgggcagcatcgagtgtgtgaagctcttgctgtcctacggggccaaggtcaaccctcccctgtacacagcgtcccccctgcacgaggcctgcatgagcgggagttccgaatgtgtgaggcttcttattgacgtcggggccaatctggaagcgcacgattgccattttgggacccctctgcacgttgcctgtgcccgggagcatctggactgtgtcaaagtgctgctcaatgcaggggccaacgtgaatgcggcaaagcttcatgagactgcccttcaccacgcggccaaggtcaagaatgttgacctcatcgagatgcttatcgagtttggcggcaacatctacgcccgggacaaccgcgggaagaagccgtctgactacacgtggagcagcagcgctcccgccaagtgcttcgagtactacgaaaagacacctctgactctgtcacagctctgcagggtgaacttgaggaaggccactggcgtccgagggctggagaagattgccaagttaaacatcccgccccggctcattgattacctctcctacaactgaattgcaggtggggtccggaccgtggctgcccccgttgtgcccagcattgcccgggtgagggctctgcctgttcctctgaagcagcgtgattgctgtagatagaacaacgctccttcgagtcccttcctgcgatcctgtttaggcttctctcctggatcctggataatgtttccagggtgttgggaaggcctgcgtctcaggtcacagttgtgggtgtggccctgcgctgttctacagaacctaccctctcaatgggcatgggcccaaccatccagttttcctcttttacggaccatcctcaaaggcactctcaggacagacggcgtggggagcacagaggaggctggcagagctggggactgagggcattgttgctgattctcactcaccggggcagcctgccgcagatgcacaggccccaggtgcaggccaccacctccgggtcggcaccaggactgccctcggtgctcatagggaatggctgggcccacggaaggtcggcctgggatgtggcctgggactgctgctctgctggctgctgtgtggatgcttttcctggagcactttccaaggcatcccccagccccaagcctgcgcgcatctgtcactcagggactttctatgggtctttgtgggggaaggccctggctttgtattccccacaagtagcactgagtttcttaggaaatttgtcttcagtattaggtctccaactcttgtaaaaagtttatatgtaggataaaaaccttttagaggacacgtaggcggtaccactaaggttttggtaatgagccattcaaaccgacagcagtgtgaaggtgtgtcaaggtgtatattctcgtggctcggcattctcagtgcaaaggcctgtttggagactctgtgggaattgtttttcatctgtttctatggttgtcaaatgaattcttcacccaccctacagtttgctaactccttgaagctatcaaattagtaagaccatctatcacatccagcattgtcccagtgctttgagttggacgggaatgggactctgcagccaaggcaggataagaaaatcttgcaatcccgtcctgcagtgatagaaacaggtcgttctgcattataagccataggtggagcattcggtagcgtattcagactgcatgggccggcctaggagtctttgccttcataaattttaagaaccccgcccacaacagggagttaaactggaggactttgcatgattagttcagggatgagtggtttctggggcatctgaggtcaggagtttgaaaccagcctggccaacttgatgaaaccccatctctacccattctggagaacaggtcacgcctgtcctggagacagtgtgccgggaaaagggaacgtggtactcactggatgcacccaggccggcccgagcctcccaccgcagacagtgtggaacagagtgagcctgagctgcccaaggcgatgccctttgtgctgtatgactggaggcctctccgcgtgggtacttgggggtggggccacaaatctggcgaaaaacttcatgctggccgccgtgaggttttactccagcgttcccgccattgtcatggcgggtcttcgtcctaaactgagaagaaaagcattcctgtttgatcaccgccttagttaccagttctggatcagtcagtgtttctgcatggaataacaaccattaaaaaaagcactgggttctgccctttcatctttgtaagagattcttgcctctagcaatgacaacctgtgatgtctcacagtagagcacttagcgcagaatcaggtccccacggctgttgctcaataaaagtggcggaataaagtgc

SEQ ID NO: 107445 - DNA, 2780 bp, Homo sapiens
  Payload ID: 1086
  Gene Symbol: ASB13
  Gene Name: ankyrin repeat and SOCS box containing 13
  Uniprot ID: Q8WXK3
  ENST ID: ENST00000459912
  CDS Start-End: 28-549
gtcgccgcgcggccgccggtgagccgcatggagccccgggcggcggacggctgcttcctgggcgacgtgggtttctgggtggagcggacccctgtgcacgaggcagcccagcggggtgagagcctgcagctgcaacagctgatcgagagcggcgcctgcgtgaaccaggtcaccgtggactccatcacgcccctgcacgcagccagtctgcagggccaggcgcggtgtgtgcagctgctgctggcggctggggcccaggtggatgctcgcaacatcgacggcagcaccccgctctgcgatgcctgcgcctcgggcagcatcgagtgtgtgaagctcttgctgtcctacggggccaaggtcaaccctcccctgtacacagcgtcccccctgcacgaggcctgcatgagcgggagttccgaatgtgtgaggcttcttattgacgtcggggccaatctggaagcgcacgattgccattttgggacccctctgcacgttgcctgtgcccgggagcatctggactgtgtcaaagtgctgctcaatgcagcttgatgaatgtctgctcttatcgtgagaaagttgaggagtgcagagcttactctcttctctgaattgcctactgttttgggggccaacgtgaatgcggcaaagcttcatgagactgcccttcaccacgcggccaaggtcaagaatgttgacctcatcgagatgcttatcgagtttggcggcaacatctacgcccgggacaaccgcgggaagaagccgtctgactacacgtggagcagcagcgctcccgccaagtgcttcgagtactacgaaaagacacctctgactctgtcacagctctgcagggtgaacttgaggaaggccactggcgtccgagggctggagaagattgccaagttaaacatcccgccccggctcattgattacctctcctacaactgaattgcaggtggggtccggaccgtggctgcccccgttgtgcccagcattgcccgggtgagggctctgcctgttcctctgaagcagcgtgattgctgtagatagaacaacgctccttcgagtcccttcctgcgatcctgtttaggcttctctcctggatcctggataatgtttccagggtgttgggaaggcctgcgtctcaggtcacagttgtgggtgtggccctgcgctgttctacagaacctaccctctcaatgggcatgggcccaaccatccagttttcctcttttacggaccatcctcaaaggcactctcaggacagacggcgtggggagcacagaggaggctggcagagctggggactgagggcattgttgctgattctcactcaccggggcagcctgccgcagatgcacaggccccaggtgcaggccaccacctccgggtcggcaccaggactgccctcggtgctcatagggaatggctgggcccacggaaggtcggcctgggatgtggcctgggactgctgctctgctggctgctgtgtggatgcttttcctggagcactttccaaggcatcccccagccccaagcctgcgcgcatctgtcactcagggactttctatgggtctttgtgggggaaggccctggctttgtattccccacaagtagcactgagtttcttaggaaatttgtcttcagtattaggtctccaactcttgtaaaaagtttatatgtaggataaaaaccttttagaggacacgtaggcggtaccactaaggttttggtaatgagccattcaaaccgacagcagtgtgaaggtgtgtcaaggtgtatattctcgtggctcggcattctcagtgcaaaggcctgtttggagactctgtgggaattgtttttcatctgtttctatggttgtcaaatgaattcttcacccaccctacagtttgctaactccttgaagctatcaaattagtaagaccatctatcacatccagcattgtcccagtgctttgagttggacgggaatgggactctgcagccaaggcaggataagaaaatcttgcaatcccgtcctgcagtgatagaaacaggtcgttctgcattataagccataggtggagcattcggtagcgtattcagactgcatgggccggcctaggagtctttgccttcataaattttaagaaccccgcccacaacagggagttaaactggaggactttgcatgattagttcagggatgagtggtttctggggcatctgaggtcaggagtttgaaaccagcctggccaacttgatgaaaccccatctctacccattctggagaacaggtcacgcctgtcctggagacagtgtgccgggaaaagggaacgtggtactcactggatgcacccaggccggcccgagcctcccaccgcagacagtgtggaacagagtgagcctgagctgcccaaggcgatgccctttgtgctgtatgactggaggcctctccgcgtgggtacttgggggtggggccacaaatctggcgaaaaacttcatgctggccgccgtgaggttttactccagcgttcccgccattgtcatggcgggtcttcgtcctaaactgagaagaaaagcattcctgtttgatcaccgccttagttaccagttctggatcagtcagtgtttctgcatggaataacaaccattaaaaaaagcactgggttctgccctttcatctttgtaagagattcttgcctctagcaatgacaacctgtgatgtctcacagtagagcacttagcgcagaatcaggtccccacggctgttgctcaataaaagtggcggaataaagtgc

SEQ ID NO: 107446 - DNA, 3175 bp, Homo sapiens
  Payload ID: 1087
  Gene Symbol: ASB14
  Gene Name: ankyrin repeat and SOCS box containing 14
  Uniprot ID: A6NK59
  ENST ID: ENST00000389601
  CDS Start-End: 122-1885
agtccttaacagtgaaaacttcactgctgtcctagaggataaaacaaaagttgatctcttcacaactggaaaaatacttttaattcactctgactttaaagtaaacctgtccacgtttcacatggataattacaccagcgatgaagacatagatgaagactttgacacccagctcatcattcaacagagtttgcaggatatttataagccaggaacagcacaacatgcacctaaggatgagagtttgcattcctttttgagcgctgactataagaagatagttgaaacaatagagaaagtgggtaaggaagatgcattgtcacacttaaccaagtaccattccgcatttggtgaagcagatgagataggctggattcctctgcataaggctgcagtgcaattaaataggaaaattttggaaataaccctaagcgcttcagaccccagtctgtgggagcaaaccactcacaatggtgaaacgccactttttttggctgtcagcagttgcctcttagaaaatgccacttttcttcttctcaatggctgcaatccaaatgctaagaatttcgaaggcaattctcctcttcttgcagctgtgctgcgtgactgctatgacatggctgccttgctgatcaactatggagcagatgtcaatctgcgttgtgccaacgagaggacagctctccacgaagcagccaaactgggcagagaggacatggtgaagcttatgctggtttctggggcacaccctgacccacagagcacgtatggattcactcctcttgctcttgctgcccaaagtggacacactgaaatcatggaaatgttactgcggaaaggcaagatcttctgtttggcctctgattcttcttccatcttacttgaagccgcaagtggaggaaatccagatgctgtggctctcttgctggagtatggagctgatgccaacatccctaagaattcaggccacctgcccatccatgtggcagctgacaggggccacttactagctctaaagatactgattccagttacggatcttgctgccattaagcagagtgggatcagtccagttcactgtgcagcagcaggagcacatcctcagtgcctggaactcctcatccaggctggatttgatgtgaacttcatgctggatcagagaattaacaaacactacgatgaccacaggaagtcagctttgtattttgctgtatcaaacagtgacctctcttcagtcaagctgcttctgagtgctggagctctgcctaatcaagacccggttaactgcctccagatagccctcaggatgggcaactatgagctgatcagtctgctgctaaggcatggggccaatgtcaattacttctgcagagttaaccctttacatttcccatcagcactgcaatacactctgaaagatgaagtcatgctcaggatgctgctgaactatgggtatgacacagagcgatgttttgattgcccacatggagacaaagtccatccttcctatactgttgaaggctggacatctacagttatcaaagatactaagttctgtgaagtaataactttgtcatggctgcaacatctctctggaaaggttgttcgagtgatgcttgattatgttgatcaagttcggatctgttcaaagttgaaagctgtgctccaaaaacaggggatctggtcagaaatacattttatcttaacaaaccctcgctccctaaaacatttgtgccgcctaaagatccggaaatgcatgggacggttacatttgcgctgccctgtcttcatgtcatttcttccattacccaatcgtctaaaagcatatgtcctttacaaagaatacgacctttatggacaaggaatttttacaggaacctggtaatcaaaccattctaatggaaaaggacaacaaactgcccctcactactggcttggtttggtctactggaagcagctatcaaccgactttgttcttccaagtcctagtggaaaagacaaaaaagaaactaagttacttgtctgcagtcaaatggcaaattatgcagttaagatacattcttgagagccacttcttctgtcataaatatgtatgcatacttctgacaacttgataaaaagaaaagctacacccaaacaatacaacaccaaaatgaattttggcaccatcctataaaagccagcattcaaactaaaatctaatattttatctttctttttttatgaccaacaaccaaataaagcccatcatcaatcatctctcactatatattatagtaaaaccctcgaaagggatcacccccacactcctttcccttcccctctccagcccttttctccatccctgtccaattcatctttgctaaatcaggtgtcaccttccctcagcctcgcctatcaagaaagcctcacttcaatgtcatctttgccacttccctcttctttgtccagagagccagcccacagccaatgcttattgatctgttctaagcatcccagctgtctcctcttttctattcctactgtcaatctacaacccataacacgctcttacaatttcatggatcatttaatgcattcttcaagttttgctctgaaatttgtcttttaaaattattctgttggatggacaatgatttgacactcctggcaatattaaaaatatacatttcattatatatttcatataacatatatatttatttatttcccccccatagaaggcaaaatggctttcagcaatggcagttaagtctacacagcctctcaactgctttgacagagacaacctcctctgaaatattaaagttctggtatatttttgaaacagtcatattacatgtcaacgtaactataatgtaaacatcatatcaaaaaacagatgtgacccttttctgctatggtatgaatcatctgtttatgaagtggctgaacaagcagaaacagcccttcatttggaaattcaaatctgaaagtcatagtgctgaattaagtcttcacaaacaacacataaagatccagacattaggactgtataccttttcaatctgtttttgtttattgagttctttctgttgcttctcttttactctctctatttctttttgtttttctgatgccctacgatcctaaagaacagatgaataaaactaatgaattaaatatgaaataactt

SEQ ID NO: 107447 - DNA, 3179 bp, Homo sapiens
  Payload ID: 1087
  Gene Symbol: ASB14
  Gene Name: ankyrin repeat and SOCS box containing 14
  Uniprot ID: A6NK59
  ENST ID: ENST00000487349
  CDS Start-End: 122-1885
agtccttaacagtgaaaacttcactgctgtcctagaggataaaacaaaagttgatctcttcacaactggaaaaatacttttaattcactctgactttaaagtaaacctgtccacgtttcacatggataattacaccagcgatgaagacatagatgaagactttgacacccagctcatcattcaacagagtttgcaggatatttataagccaggaacagcacaacatgcacctaaggatgagagtttgcattcctttttgagcgctgactataagaagatagttgaaacaatagagaaaggtaaggaagatgcattgtcacacttaaccaagtaccattccgcatttggtgaagcagatgagataggctggattcctctgcataaggctgcagtgcaattaaataggaaaattttggaaataaccctaagcgcttcagaccccagtctgtgggagcaaaccactcacaatggtgaaacgccactttttttggctgtcagcagttgcctcttagaaaatgccacttttcttcttctcaatggctgcaatccaaatgctaagaatttcgaaggcaattctcctcttcttgcagctgtgctgcgtgactgctatgacatggctgccttgctgatcaactatggagcagatgtcaatctgcgttgtgccaacgagaggacagctctccacgaagcagccaaactgggcagagaggacatggtgaagcttatgctggtttctggggcacaccctgacccacagagcacgtatggattcactcctcttgctcttgctgcccaaagtggacacactgaaatcatggaaatgttactgcggaaaggagctaatgctcatggtcaggcctctgattcttcttccatcttacttgaagccgcaagtggaggaaatccagatgctgtggctctcttgctggagtatggagctgatgccaacatccctaagaattcaggccacctgcccatccatgtggcagctgacaggggccacttactagctctaaagatactgattccagttacggatcttgctgccattaagcagagtgggatcagtccagttcactgtgcagcagcaggagcacatcctcagtgcctggaactcctcatccaggctggatttgatgtgaacttcatgctggatcagagaattaacaaacactacgatgaccacaggaagtcagctttgtattttgctgtatcaaacagtgacctctcttcagtcaagctgcttctgagtgctggagctctgcctaatcaagacccggttaactgcctccagatagccctcaggatgggcaactatgagctgatcagtctgctgctaaggcatggggccaatgtcaattacttctgcagagttaaccctttacatttcccatcagcactgcaatacactctgaaagatgaagtcatgctcaggatgctgctgaactatgggtatgacacagagcgatgttttgattgcccacatggagacaaagtccatccttcctatactgttgaaggctggacatctacagttatcaaagatactaagttctgtgaagtaataactttgtcatggctgcaacatctctctggaaaggttgttcgagtgatgcttgattatgttgatcaagttcggatctgttcaaagttgaaagctgtgctccaaaaacaggggatctggtcagaaatacattttatcttaacaaaccctcgctccctaaaacatttgtgccgcctaaagatccggaaatgcatgggacggttacatttgcgctgccctgtcttcatgtcatttcttccattacccaatcgtctaaaagcatatgtcctttacaaagaatacgacctttatggacaaggaatttttacaggaacctggtaatcaaaccattctaatggaaaaggacaacaaactgcccctcactactggcttggtttggtctactggaagcagctatcaaccgactttgttcttccaagtcctagtggaaaagacaaaaaagaaactaagttacttgtctgcagtcaaatggcaaattatgcagttaagatacattcttgagagccacttcttctgtcataaatatgtatgcatacttctgacaacttgataaaaagaaaagctacacccaaacaatacaacaccaaaatgaattttggcaccatcctataaaagccagcattcaaactaaaatctaatattttatctttctttttttatgaccaacaaccaaataaagcccatcatcaatcatctctcactatatattatagtaaaaccctcgaaagggatcacccccacactcctttcccttcccctctccagcccttttctccatccctgtccaattcatctttgctaaatcaggtgtcaccttccctcagcctcgcctatcaagaaagcctcacttcaatgtcatctttgccacttccctcttctttgtccagagagccagcccacagccaatgcttattgatctgttctaagcatcccagctgtctcctcttttctattcctactgtcaatctacaacccataacacgctcttacaatttcatggatcatttaatgcattcttcaagttttgctctgaaatttgtcttttaaaattattctgttggatggacaatgatttgacactcctggcaatattaaaaatatacatttcattatatatttcatataacatatatatttatttatttcccccccatagaaggcaaaatggctttcagcaatggcagttaagtctacacagcctctcaactgctttgacagagacaacctcctctgaaatattaaagttctggtatatttttgaaacagtcatattacatgtcaacgtaactataatgtaaacatcatatcaaaaaacagatgtgacccttttctgctatggtatgaatcatctgtttatgaagtggctgaacaagcagaaacagcccttcatttggaaattcaaatctgaaagtcatagtgctgaattaagtcttcacaaacaacacataaagatccagacattaggactgtataccttttcaatctgtttttgtttattgagttctttctgttgcttctcttttactctctctatttctttttgtttttctgatgccctacgatcctaaagaacagatgaataaaactaatgaattaaatatgaaataactttaaa

SEQ ID NO: 107448 - DNA, 2706 bp, Homo sapiens
  Payload ID: 1088
  Gene Symbol: ASB15
  Gene Name: ankyrin repeat and SOCS box containing 15
  Uniprot ID: Q8WXK1
  ENST ID: ENST00000275699
  CDS Start-End: 43-1809
gtagattagctcaacactcgagaatcattgcagcttcaaggaatggatactaatgatgaccctgatgaagaccatcttacaagttatgatattcagctaagtattcaagaatccattgaagccagcaagactgcactttgtcctgaaagatttgtacccctaagtgctcaaaacagaaaacttgtggaggccataaaacaaggtcacattcctgagctccaggagtatgtaaaatataaatatgcaatggatgaagctgatgaaaaaggatggtttccattgcatgaagctgttgttcaacccattcaacaaatacttgagattgttctggatgcatcctataagacactctgggaattcaagacctgtgatggagaaacacccttgactttggcagtcaaagctggtctggtggaaaatgtaagaactttattagaaaagggagtgtggcccaacacaaaaaatgataaaggagagaccccccttctgattgctgtgaaaaagggctcctatgacatggtgtcgactctgatcaaacataacactagcctagaccagccctgtgtcaagcgatggtcagcaatgcatgaagcagccaagcaaggccgaaaagatatcgtagctctgctgctgaaacatggaggcaatgtccacctgagagatggatttggagtcacaccactaggcgtcgctgccgagtatggtcactgtgacgtgttagaacatctaatccacaaaggtggtgatgtgcttgctttggcggatgatggggcgtcggtgctgtttgaggcagcaggaggtggcaatcccgactgcatttccctcctgctggaatatggaggaagcggaaatgtacctaaccgagcaggacatcttcctatacaccgagctgcctatgaggggcattatcttgcactgaaatatcttatcccagtaacatctaaaaatgcaattcggaaaagtgggctaacaccaattcactcagcagcagatggacaaaatgcacagtgtctagaactgctcattgaaaatggttttgatgtcaacactctacttgctgaccacatttcccagagctatgacgatgagaggaagactgcgctgtattttggcgtttctaataatgacgttcattgcacagaagtccttctggctgcaggtgcagacccaaacttagatcccctcaactgtctacttgttgcagtgagggccaataattatgaaattgtcaggctgcttctctcccatggagctaatgtcaattgttattttatgcatgtgaatgacactcgtttccccagtgtcattcaatatgctctaaacgacgaggtaatgctgaggctattgctgaataatggctatcaagtggagatgtgctttgactgcatgcatggtgacatctttggaaattcatttgtgtggtcagagatacaggaagaggtgctgccaggatggacatcttgtgtaataaaagataacccgttctgtgagtttattacagttccttggatgaagcacttggtaggcagagttactcgtgtactaatagattacatggattatgttcctctgtgtgctaaactgaagtctgcactagaagtacagagagaatggccagaaatccgccaaatactagagaatccttgttcattgaagcatttgtgtcggttaaaaattcgaaggcttatgggtctccagaaactctgccagccagcctcagtggagaagcttcctctaccaccagctattcaaagatacatattatttaaagagtatgatctctatggacaagagctaaaattgacataacttaatattttaaaatgtgatttaaaaaaaatgttgaaatgtgattccctcagataatttcttgtaaccattttacatccttaattgtaaagtgtatttaaattcattgacagttttataggttatcatgtgttcttatgggaacaccatgatttatgtctttaaagacatttgcattttttaaagatagtattttgaacttagatttgtatctttgtttgctacaagtcatcaaactctccctatcaagtggctcctacaatatccacaatcaagtctctatgtttaaaaaacagataaccactttctcaaacccacatctgccagttgctggccagattctcctgtctttcacggtcttgctgtgtaaaagagctcctcctgcctgtaagttcacagactgtgatctggcatctgaccctccactgcttttctcaaggtccctgacaatctctttgttggtaaattcagtgaacattcttcagtccctcttccaatcgattcctacagcatctaacattgttgcctgttccttgcttgaaatgatatctctttccttgtttctcgcaaaacctgttctcttgggtgtcctcccacctccctggacactctgtctctggcttctttctgcctagctcatctctagccaatcttacagttatatatcttaagccctcttctctttgttctttaagttatatatcctaagccctctttgctttgttctctgggatattttatccacatccatggtcttaatcattttgctagagactacaaaatttccatccaaagctcagctctttctctcatgttctcctgacctatgtagacaattggcctcatgaacatttgaacacaaagacacctcaaattcaacatgtccccagatgaact

SEQ ID NO: 107449 - DNA, 2817 bp, Homo sapiens
  Payload ID: 1088
  Gene Symbol: ASB15
  Gene Name: ankyrin repeat and SOCS box containing 15
  Uniprot ID: Q8WXK1
  ENST ID: ENST00000434204
  CDS Start-End: 165-1931
cttcctctgatttaggaaggcaagtccctggataagaatgacaagatgatcattccaaaaggataaatcctgatgattctctcagggacctctagtagattagctcaacactcgagaatcattgcagcttcaagaacttgtctcgttcaaaattatatgcaggaatggatactaatgatgaccctgatgaagaccatcttacaagttatgatattcagctaagtattcaagaatccattgaagccagcaagactgcactttgtcctgaaagatttgtacccctaagtgctcaaaacagaaaacttgtggaggccataaaacaaggtcacattcctgagctccaggagtatgtaaaatataaatatgcaatggatgaagctgatgaaaaaggatggtttccattgcatgaagctgttgttcaacccattcaacaaatacttgagattgttctggatgcatcctataagacactctgggaattcaagacctgtgatggagaaacacccttgactttggcagtcaaagctggtctggtggaaaatgtaagaactttattagaaaagggagtgtggcccaacacaaaaaatgataaaggagagaccccccttctgattgctgtgaaaaagggctcctatgacatggtgtcgactctgatcaaacataacactagcctagaccagccctgtgtcaagcgatggtcagcaatgcatgaagcagccaagcaaggccgaaaagatatcgtagctctgctgctgaaacatggaggcaatgtccacctgagagatggatttggagtcacaccactaggcgtcgctgccgagtatggtcactgtgacgtgttagaacatctaatccacaaaggtggtgatgtgcttgctttggcggatgatggggcgtcggtgctgtttgaggcagcaggaggtggcaatcccgactgcatttccctcctgctggaatatggaggaagcggaaatgtacctaaccgagcaggacatcttcctatacaccgagctgcctatgaggggcattatcttgcactgaaatatcttatcccagtaacatctaaaaatgcaattcggaaaagtgggctaacaccaattcactcagcagcagatggacaaaatgcacagtgtctagaactgctcattgaaaatggttttgatgtcaacactctacttgctgaccacatttcccagagctatgacgatgagaggaagactgcgctgtattttggcgtttctaataatgacgttcattgcacagaagtccttctggctgcaggtgcagacccaaacttagatcccctcaactgtctacttgttgcagtgagggccaataattatgaaattgtcaggctgcttctctcccatggagctaatgtcaattgttattttatgcatgtgaatgacactcgtttccccagtgtcattcaatatgctctaaacgacgaggtaatgctgaggctattgctgaataatggctatcaagtggagatgtgctttgactgcatgcatggtgacatctttggaaattcatttgtgtggtcagagatacaggaagaggtgctgccaggatggacatcttgtgtaataaaagataacccgttctgtgagtttattacagttccttggatgaagcacttggtaggcagagttactcgtgtactaatagattacatggattatgttcctctgtgtgctaaactgaagtctgcactagaagtacagagagaatggccagaaatccgccaaatactagagaatccttgttcattgaagcatttgtgtcggttaaaaattcgaaggcttatgggtctccagaaactctgccagccagcctcagtggagaagcttcctctaccaccagctattcaaagatacatattatttaaagagtatgatctctatggacaagagctaaaattgacataacttaatattttaaaatgtgatttaaaaaaaatgttgaaatgtgattccctcagataatttcttgtaaccattttacatccttaattgtaaagtgtatttaaattcattgacagttttataggttatcatgtgttcttatgggaacaccatgatttatgtctttaaagacatttgcattttttaaagatagtattttgaacttagatttgtatctttgtttgctacaagtcatcaaactctccctatcaagtggctcctacaatatccacaatcaagtctctatgtttaaaaaacagataaccactttctcaaacccacatctgccagttgctggccagattctcctgtctttcacggtcttgctgtgtaaaagagctcctcctgcctgtaagttcacagactgtgatctggcatctgaccctccactgcttttctcaaggtccctgacaatctctttgttggtaaattcagtgaacattcttcagtccctcttccaatcgattcctacagcatctaacattgttgcctgttccttgcttgaaatgatatctctttccttgtttctcgcaaaacctgttctcttgggtgtcctcccacctccctggacactctgtctctggcttctttctgcctagctcatctctagccaatcttacagttatatatcttaagccctcttctctttgttctttaagttatatatcctaagccctctttgctttgttctctgggatattttatccacatccatggtcttaatcattttgctagagactacaaaatttccatccaaagctcagctctttctctcatgttctcctgacctatgtagacaattggcctcatgaacatttgaacacaaagacacctcaaattcaacatgtcc

SEQ ID NO: 107450 - DNA, 4788 bp, Homo sapiens
  Payload ID: 1088
  Gene Symbol: ASB15
  Gene Name: ankyrin repeat and SOCS box containing 15
  Uniprot ID: Q8WXK1
  ENST ID: ENST00000451558
  CDS Start-End: 522-2288
aaccctgggttcaggcttctgctgtatcatatttgctaaagacaccaaaactagatagagctatttgatcctgactaaggaaagcagtcaagacagtgcaggaggtgaggccatcttataggaagagcagttgtccagcctctggaagaaaaagctcagtggagatctgacagccttcctgggggatattaacagggctcctgtgttgcagaggaacactactttctcagtgtagctctgagaaagagaaccagaaaaaggatttctcttcagtagaaaaggcaaataccataaagaaggaatcgctgtaacttattgcttgataaatcctgatgattctctcagggacctctagtagattagctcaacactcgagaatcattgcagcttcaagggaccactgacagcagctgtttgcaatagttgacaaggagaaggaatagagggaaaagatagagaaaagaagagattttgtttcctctcagaaaaccaatggtccaagtgaaaacacaaacacaagaatggatactaatgatgaccctgatgaagaccatcttacaagttatgatattcagctaagtattcaagaatccattgaagccagcaagactgcactttgtcctgaaagatttgtacccctaagtgctcaaaacagaaaacttgtggaggccataaaacaaggtcacattcctgagctccaggagtatgtaaaatataaatatgcaatggatgaagctgatgaaaaaggatggtttccattgcatgaagctgttgttcaacccattcaacaaatacttgagattgttctggatgcatcctataagacactctgggaattcaagacctgtgatggagaaacacccttgactttggcagtcaaagctggtctggtggaaaatgtaagaactttattagaaaagggagtgtggcccaacacaaaaaatgataaaggagagaccccccttctgattgctgtgaaaaagggctcctatgacatggtgtcgactctgatcaaacataacactagcctagaccagccctgtgtcaagcgatggtcagcaatgcatgaagcagccaagcaaggccgaaaagatatcgtagctctgctgctgaaacatggaggcaatgtccacctgagagatggatttggagtcacaccactaggcgtcgctgccgagtatggtcactgtgacgtgttagaacatctaatccacaaaggtggtgatgtgcttgctttggcggatgatggggcgtcggtgctgtttgaggcagcaggaggtggcaatcccgactgcatttccctcctgctggaatatggaggaagcggaaatgtacctaaccgagcaggacatcttcctatacaccgagctgcctatgaggggcattatcttgcactgaaatatcttatcccagtaacatctaaaaatgcaattcggaaaagtgggctaacaccaattcactcagcagcagatggacaaaatgcacagtgtctagaactgctcattgaaaatggttttgatgtcaacactctacttgctgaccacatttcccagagctatgacgatgagaggaagactgcgctgtattttggcgtttctaataatgacgttcattgcacagaagtccttctggctgcaggtgcagacccaaacttagatcccctcaactgtctacttgttgcagtgagggccaataattatgaaattgtcaggctgcttctctcccatggagctaatgtcaattgttattttatgcatgtgaatgacactcgtttccccagtgtcattcaatatgctctaaacgacgaggtaatgctgaggctattgctgaataatggctatcaagtggagatgtgctttgactgcatgcatggtgacatctttggaaattcatttgtgtggtcagagatacaggaagaggtgctgccaggatggacatcttgtgtaataaaagataacccgttctgtgagtttattacagttccttggatgaagcacttggtaggcagagttactcgtgtactaatagattacatggattatgttcctctgtgtgctaaactgaagtctgcactagaagtacagagagaatggccagaaatccgccaaatactagagaatccttgttcattgaagcatttgtgtcggttaaaaattcgaaggcttatgggtctccagaaactctgccagccagcctcagtggagaagcttcctctaccaccagctattcaaagatacatattatttaaagagtatgatctctatggacaagagctaaaattgacataacttaatattttaaaatgtgatttaaaaaaaatgttgaaatgtgattccctcagataatttcttgtaaccattttacatccttaattgtaaagtgtatttaaattcattgacagttttataggttatcatgtgttcttatgggaacaccatgatttatgtctttaaagacatttgcattttttaaagatagtattttgaacttagatttgtatctttgtttgctacaagtcatcaaactctccctatcaagtggctcctacaatatccacaatcaagtctctatgtttaaaaaacagataaccactttctcaaacccacatctgccagttgctggccagattctcctgtctttcacggtcttgctgtgtaaaagagctcctcctgcctgtaagttcacagactgtgatctggcatctgaccctccactgcttttctcaaggtccctgacaatctctttgttggtaaattcagtgaacattcttcagtccctcttccaatcgattcctacagcatctaacattgttgcctgttccttgcttgaaatgatatctctttccttgtttctcgcaaaacctgttctcttgggtgtcctcccacctccctggacactctgtctctggcttctttctgcctagctcatctctagccaatcttacagttatatatcttaagccctcttctctttgttctttaagttatatatcctaagccctctttgctttgttctctgggatattttatccacatccatggtcttaatcattttgctagagactacaaaatttccatccaaagctcagctctttctctcatgttctcctgacctatgtagacaattggcctcatgaacatttgaacacaaagacacctcaaattcaacatgtccccagatgaactaaaaaaaaaaaaaaaaaaaaaacctctttcccgagctcagtagttagcacaatgctcaattcagtttccaaagaaaaaagcctggacattaggtttgaccatcccattttcctcacccaataagacaaatcaccaaatcctattaagtttatctcctgaagtcatcttccactcagcagccccccaccacccaccccgcatttggccctaagtctattatcttctttttcctgggataatacaatgctgcttatctggctcccctgactctgtcttgccctgtcccaaacactttctacatacagcatctcagaagagtcttttacaaatataatagagtttcacttctctgcttaagatcattcccattgctcttaaattccaaagttcttacttgaactttcatgatctaactcctgccttcttctttagcctcatctctggatgtctacctttcctcctttcccttgaaccttctagaattttattttttaaacactgattcccagacttcaaggtgtcatacactaataggttttattgtgtttatttttcaaaaagagtcattaaaaaataccatctactatcaccatcatttcataaaagaggggtcattttaatgccagaaagtaagatggtcataaattcagtcattcaagttgaatgacttttaccttgaaaagacctcacactgctctcatttccccattgacgagtgagaatttcactgtgggccatcaaatatctgaggacctttgtatggggaacctctgctgtagaatagaccatgctctcttttaacctcagggtcttcgcatttccttctctcatctggaactctctttccgctttttttgcaccctttcacctgatcaactcccacttaccctataggtctcagctgagatgttgcttcctctaggatgggaagcctcagcacagaacttgtcatgccatattatagatgcctgtgttccctgctgtcttcccactagactataagctctatgagggtaggttctatgtttgttttgttttccagtgctttctcagggccaaacacattccctagagcatggagttcaataattgtttgttgaaatatattgaataagtgacaaaaataatcagtgacatcatggtgaaataatagttttaaatttctgagtgagttatgtaatcttgtaattatttaatgctattattcttagattttaatagtgtatttttcttatatttatttttaccttgttaccgtattctttaaacagtaatatctcactggtctgtaaagttttcaagttgtatttagctttagttacctttgaaagataaataagtatgaaaaaaatcgtacaattagggctataattttaacttcttgtattccctagaggatatattttatatgtaagttaaactgtaatgtatttatatttaattgcaacatcttgtatacaagattttattattcttgtgttgcactcttagacgtggttaaatgtattgttacctaaaaatattactctaatgaataaaaaatcatattgaggttataagtctgctttatgatacttcatatattaaacttttgctcactaaa

SEQ ID NO: 107451 - DNA, 765 bp, Homo sapiens
  Payload ID: 1088
  Gene Symbol: ASB15
  Gene Name: ankyrin repeat and SOCS box containing 15
  ENST ID: ENST00000447789
  CDS Start-End: 43-765
gtagattagctcaacactcgagaatcattgcagcttcaaggaatggatactaatgatgaccctgatgaagaccatcttacaagttatgatattcagctaagtattcaagaatccattgaagccagcaagactgcactttgtcctgaaagatttgtacccctaagtgctcaaaacagaaaacttgtggaggccataaaacaaggtcacattcctgagctccaggagtatgtaaaatataaatatgcaatggatgaagctgatgaaaaaggatggtttccattgcatgaagctgttgttcaacccattcaacaaatacttgagattgttctggatgcatcctataagacactctgggaattcaagacctgtgatggagaaacacccttgactttggcagtcaaagctggtctggtggaaaatgtaagaactttattagaaaagggagtgtggcccaacacaaaaaatgataaaggagagaccccccttctgattgctgtgaaaaagggctcctatgacatggtgtcgactctgatcaaacataacactagcctagaccagccctgtgtcaagcgatggtcagcaatgcatgaagcagccaagcaaggccgaaaagatatcgtagctctgctgctgaaacatggaggcaatgtccacctgagagatggatttggagtcacaccactaggcgtcgctgccgagtatggtcactgtgacgtgttagaacatctaatccacaaaggtggtgatgtgcttgctttggcggat

SEQ ID NO: 107452 - DNA, 531 bp, Homo sapiens
  Payload ID: 1088
  Gene Symbol: ASB15
  Gene Name: ankyrin repeat and SOCS box containing 15
  ENST ID: ENST00000437535
  CDS Start-End: 240-531
tctgatttaggaaggcaagtccctggataagaatgacaagatgatcattccaaaaggaaagcagtcaagacagtgcaggaggtgaggccatcttataggaagagcagttgtccagcctctggaagaaaaagctcagtggagatctgacagccttcctgggggatattaacagggctcctgtgttgcagaggaacactactttctcagtgtagctctgagaaagagaaccagaaaaaggaatggatactaatgatgaccctgatgaagaccatcttacaagttatgatattcagctaagtattcaagaatccattgaagccagcaagactgcactttgtcctgaaagatttgtacccctaagtgctcaaaacagaaaacttgtggaggccataaaacaaggtcacattcctgagctccaggagtatgtaaaatataaatatgcaatggatgaagctgatgaaaaaggatggtttccattgcatgaagctgttgttcaacccattcaacaaatacttgagattgttctggatg

SEQ ID NO: 107453 - DNA, 2956 bp, Homo sapiens
  Payload ID: 1088
  Gene Symbol: ASB15
  Gene Name: ankyrin repeat and SOCS box containing 15
  Uniprot ID: Q8WXK1
  ENST ID: ENST00000451215
  CDS Start-End: 293-2059
aggaaggcaagtccctggataagaatgacaagatgatcattccaaaaggaaagcagtcaagacagtgcaggaggtgaggccatcttataggaagagcagttgtccagcctctggaagaaaaagctcagtggagatctgacagccttcctgggggatattaacagggctcctgtgttgcagaggaacactactttctcagtgtagctctgagaaagagaaccagaaaaaggatttctcttcagtagaaaaggcaaataccataaagaaggaatcgctgtaacttattgcttgaatggatactaatgatgaccctgatgaagaccatcttacaagttatgatattcagctaagtattcaagaatccattgaagccagcaagactgcactttgtcctgaaagatttgtacccctaagtgctcaaaacagaaaacttgtggaggccataaaacaaggtcacattcctgagctccaggagtatgtaaaatataaatatgcaatggatgaagctgatgaaaaaggatggtttccattgcatgaagctgttgttcaacccattcaacaaatacttgagattgttctggatgcatcctataagacactctgggaattcaagacctgtgatggagaaacacccttgactttggcagtcaaagctggtctggtggaaaatgtaagaactttattagaaaagggagtgtggcccaacacaaaaaatgataaaggagagaccccccttctgattgctgtgaaaaagggctcctatgacatggtgtcgactctgatcaaacataacactagcctagaccagccctgtgtcaagcgatggtcagcaatgcatgaagcagccaagcaaggccgaaaagatatcgtagctctgctgctgaaacatggaggcaatgtccacctgagagatggatttggagtcacaccactaggcgtcgctgccgagtatggtcactgtgacgtgttagaacatctaatccacaaaggtggtgatgtgcttgctttggcggatgatggggcgtcggtgctgtttgaggcagcaggaggtggcaatcccgactgcatttccctcctgctggaatatggaggaagcggaaatgtacctaaccgagcaggacatcttcctatacaccgagctgcctatgaggggcattatcttgcactgaaatatcttatcccagtaacatctaaaaatgcaattcggaaaagtgggctaacaccaattcactcagcagcagatggacaaaatgcacagtgtctagaactgctcattgaaaatggttttgatgtcaacactctacttgctgaccacatttcccagagctatgacgatgagaggaagactgcgctgtattttggcgtttctaataatgacgttcattgcacagaagtccttctggctgcaggtgcagacccaaacttagatcccctcaactgtctacttgttgcagtgagggccaataattatgaaattgtcaggctgcttctctcccatggagctaatgtcaattgttattttatgcatgtgaatgacactcgtttccccagtgtcattcaatatgctctaaacgacgaggtaatgctgaggctattgctgaataatggctatcaagtggagatgtgctttgactgcatgcatggtgacatctttggaaattcatttgtgtggtcagagatacaggaagaggtgctgccaggatggacatcttgtgtaataaaagataacccgttctgtgagtttattacagttccttggatgaagcacttggtaggcagagttactcgtgtactaatagattacatggattatgttcctctgtgtgctaaactgaagtctgcactagaagtacagagagaatggccagaaatccgccaaatactagagaatccttgttcattgaagcatttgtgtcggttaaaaattcgaaggcttatgggtctccagaaactctgccagccagcctcagtggagaagcttcctctaccaccagctattcaaagatacatattatttaaagagtatgatctctatggacaagagctaaaattgacataacttaatattttaaaatgtgatttaaaaaaaatgttgaaatgtgattccctcagataatttcttgtaaccattttacatccttaattgtaaagtgtatttaaattcattgacagttttataggttatcatgtgttcttatgggaacaccatgatttatgtctttaaagacatttgcattttttaaagatagtattttgaacttagatttgtatctttgtttgctacaagtcatcaaactctccctatcaagtggctcctacaatatccacaatcaagtctctatgtttaaaaaacagataaccactttctcaaacccacatctgccagttgctggccagattctcctgtctttcacggtcttgctgtgtaaaagagctcctcctgcctgtaagttcacagactgtgatctggcatctgaccctccactgcttttctcaaggtccctgacaatctctttgttggtaaattcagtgaacattcttcagtccctcttccaatcgattcctacagcatctaacattgttgcctgttccttgcttgaaatgatatctctttccttgtttctcgcaaaacctgttctcttgggtgtcctcccacctccctggacactctgtctctggcttctttctgcctagctcatctctagccaatcttacagttatatatcttaagccctcttctctttgttctttaagttatatatcctaagccctctttgctttgttctctgggatattttatccacatccatggtcttaatcattttgctagagactacaaaatttccatccaaagctcagctctttctctcatgttctcctgacctatgtagacaattggcctcatgaacatttgaacacaaagacacctcaaattcaacatgtccccagatgaact

SEQ ID NO: 107454 - DNA, 1651 bp, Homo sapiens
  Payload ID: 1088
  Gene Symbol: ASB15
  Gene Name: ankyrin repeat and SOCS box containing 15
  ENST ID: ENST00000540573
  CDS Start-End: 622-1371
aggataaatcctgatgattctctcagggacctctagtagattagctcaacactcgagaatcattgcagcttcaaggaatggatactaatgatgaccctgatgaagaccatcttacaagttatgatattcagctaagtattcaagaatccattgaagccagcaagactgcactttgtcctgaaagatttgtacccctaagtgctcaaaacagaaaacttgtggaggccataaaacaaggtcacattcctgagctccaggagtatgtaaaatataaatatgcaatggatgaagctgatgaaaaaggatggtttccattgcatgaagctgttgttcaacccattcaacaaatacttgagattgttctggatgcatcctataagacactctgggaattcaagacctgtgatggagaaacacccttgactttggcagtcaaagctggtctggtggaaaatgtaagaactttattagaaaagggagtgtggcccaacacaaaaaatgataaaggagagaccccccttctgattgctgtgaaaaagggctcctatgacatggtgtcgactctgatcaaacataacactagcctagaccagccctgtgtcaagcgatggtcagcaatgcatgaagcagccaagcaaggccgaatatggtcactgtgacgtgttagaacatctaatccacaaaggtggtgatgtgcttgctttggcggatgatggggcgtcggtgctgtttgaggcagcaggaggtggcaatcccgactgcatttccctcctgctggaatatggaggaagcggaaatgtacctaaccgagcaggacatcttcctatacaccgagctgcctatgaggggcattatcttgcactgaaatatcttatcccagtaacatctaaaaatgcaattcggaaaagtgggctaacaccaattcactcagcagcagatggacaaaatgcacagtgtctagaactgctcattgaaaatggttttgatgtcaacactctacttgctgaccacatttcccagagctatgacgatgagaggaagactgcgctgtattttggcgtttctaataatgacgttcattgcacagaagtccttctggctgcaggtgcagacccaaacttagatcccctcaactgtctacttgttgcagtgagggccaataattatgaaattgtcaggctgcttctctcccatggagctaatgtcaattgttattttatgcatgtgaatgacactcgtttccccagtgtcattcaatatgctctaaacgacgaggtaatgctgaggctattgctgaataatggctatcaagtggagatgtgctttgactgcatgcatggtgacatctttggaaattcatttgtgtgctaaactgaagtctgcactagaagtacagagagaatggccagaaatccgccaaatactagagaatccttgttcattgaagcatttgtgtcggttaaaaattcgaaggcttatgggtctccagaaactctgccagccagcctcagtggagaagcttcctctaccaccagctattcaaagatacatattatttaaagagtatgatctctatggacaagagctaaaattgacataacttaatattttaaaatgtgatttaaaaaaaatgttgaaatgtgattccctc

SEQ ID NO: 107455 - DNA, 2139 bp, Homo sapiens
  Payload ID: 1089
  Gene Symbol: ASB16
  Gene Name: ankyrin repeat and SOCS box containing 16
  Uniprot ID: Q96NS5
  ENST ID: ENST00000293414
  CDS Start-End: 85-1446
ggctcctcagagcaagggaggtagtcgggtcgagggaacctggctctgcccaggtgccactgcccaaacccctgggccccatccatggcaagagagaccttccccttcacctcctccatgctgcgctctctccgcctgcagcaggagtggctggaatgggaggaccggcggcgggcggctgcccagcagtgccggagccgcaggtgcccgtcaagtccccgggcccgactcactaggcctcaccgttcctgccgagacccagctgtccaccaagccctcttctccggcaacctgcagcaggtccaagccctgttccaagatgaagaggccgccaacatgattgtggagactgtgagcaaccagctggcctggtcggctgaacaggggttctgggtgctgacccccaagaccaagcagacggcacccctcgccatcgctacagcccgaggctacacagactgtgctcgacacctgatccggcagggagctgagctggatgcccgtgtcgggggtcgcgctgccttgcatgaggcctgtgcccgagcccagtttgactgtgtgcggctgctgctgaccttcggagccaaggctaatgtgctgactgaggagggcacgactcctttgcacctctgcacgatccccgagtccttgcagtgcgccaagttgctgctggaagcaggagcgacggtgaacctggcagcaggcgagagccaggagacgcccctgcacgtggcggcggcgcgcggcctggagcaacatgtggctctgtacctggagcatggcgccgacgtgggcctgcgcaccagccagggcgagactgcgctgaacacggcgtgcgctggggccgagggcccaggtagctgcaggcgacaccaggctgcggcgcgccggctcctggaggctggagctgatgcccgggcggccgggcgcaagcgccacacgccgctgcacaacgcttgtgccaacggctgcgggggcctggccgagctgctgctgcgttacggggcccgcgctgaggtccccaatggggcgggccacacgcccatggactgtgcgctgcaggccgtccaggactcccccaactgggagcctgaagtccttttcgccgcactgctggactacggggcgcagccagtgcgccctgagatgctgaaacactgcgccaacttccctcgggccctggaagtcctgcttaatgcctatccttgtgtcccatcctgtgagacctgggtggaggcggtgctcccagagctgtggaaggagcacgaagccttctacagctcggccctgtgcatggtgaaccagccaaggcagctgcagcacctggcccgactagctgtgcgcgctcggttgggaagccgctgccggcagggtgccacccggctgccactgcccccgctcctcagggactacctgctgctgcgtgtggaggggtgcatccagtgaaccccatgtcaggctgtcccatggtgtgttctgcccctcccacctgtccccgcctccaactgcggaggaccagttcctggccctcttttcttttctttttgagacctagtctcactctgttgcccaggctggagtgcagtggcgctatctcggctcactgcaacttctaccacctaggttcaagcgattcttgtgccccaaacttccgagtagctgggactacaggcatgagtcaccacacctggctgattttgtatttttagtagagacagggtctcaccatgttggccaggctggtctcacactgacctcaggtgatccacccgccttggcctcccaaagtgttgggattacaggcatgagccactgcgcctggttgcctgcccctcttttctgtactccacgtgctgtcctggtccacctcactcctccatgggcttcttgagacacctgctgacctctagccggacctgagcttcagaccctctctccagcaggaagggctgcagactcggcctgttcccagactcggccttcacctcccttctcctcctgtgtttaagtggatggcccctctatccatccaggtcccatgccaagaaccagtgattctagtggcccaccacctccctctcctgccacccttatacctgttcagcctcctaaagagggacaaactctgtctctgcgtgc

SEQ ID NO: 107456 - DNA, 1743 bp, Homo sapiens
  Payload ID: 1089
  Gene Symbol: ASB16
  Gene Name: ankyrin repeat and SOCS box containing 16
  ENST ID: ENST00000589618
  CDS Start-End: 67-888
aggtagtcgggtcgagggaacctggctctgcccaggtgccactgcccaaacccctgggccccatccatggcaagagagaccttccccttcacctcctccatgctgcgctctctccgcctgcagcaggagtggctggaatgggaggaccggcggcgggcggctgcccagcagtgccggagccgcaggtgcccgtcaagtccccgggcccgactcactaggcctcaccgttcctgccgagacccagctgtccaccaagccctcttctccggcaacctgcagcaggtccaagccctgttccaagatgaagaggccgccaacatgattgtggagactgtgagcaaccagctggcctggtcggctgaacaggggttctgggtgctgacccccaagaccaagcagacggcacccctcgccatcgctacagcccgaggctacacagactgtgctcgacacctgatccggcagggagctgagctggatgcccgtgtcgggggtcgcgctgccttgcatgaggcctgtgcccgagcccagtttgactgtgtgcggctgctgctgaccttcggagccaaggctaatgtgctgactgaggagggcacgactcctttgcacctctgcacgatccccgagtccttgcagtgcgccaagttgctgctggaagcaggagcgacggtgaacctggcagcaggcgagagccaggagacgcccctgcacgtggcggcggcgcgcggcctggagcaacatgtggctctgtacctggagcatggcgccgacgtgggcctgcgcaccagccagggcgagactgcgctgaacacggcgtgcgctggggccgagggcccagatgctgaaacactgcgccaacttccctcgggccctggaagtcctgcttaatgcctatccttgtgtcccatcctgtgagacctgggtggaggcggtgctcccagagctgtggaaggagcacgaagccttctacagctcggccctgtgcatggtgaaccagccaaggcagctgcagcacctggcccgactagctgtgcgcgctcggttgggaagccgctgccggcagggtgccacccggctgccactgcccccgctcctcagggactacctgctgctgcgtgtggaggggtgcatccagtgaaccccatgtcaggctgtcccatggtgtgttctgcccctcccacctgtccccgcctccaactgcggaggaccagttcctggccctcttttcttttctttttgagacctagtctcactctgttgcccaggctggagtgcagtggcgctatctcggctcactgcaacttctaccacctaggttcaagcgattcttgtgccccaaacttccgagtagctgggactacaggcatgagtcaccacacctggctgattttgtatttttagtagagacagggtctcaccatgttggccaggctggtctcacactgacctcaggtgatccacccgccttggcctcccaaagtgttgggattacaggcatgagccactgcgcctggttgcctgcccctcttttctgtactccacgtgctgtcctggtccacctcactcctccatgggcttcttgagacacctgctgacctctagccggacctgagcttcagaccctctctccagcaggaagggctgcagactcggcctgttcccagactcggccttcacctcccttctcctcctgtgtttaagtggatggcccctctatccatccaggtcccatgccaagaacca

SEQ ID NO: 107457 - DNA, 499 bp, Homo sapiens
  Payload ID: 1089
  Gene Symbol: ASB16
  Gene Name: ankyrin repeat and SOCS box containing 16
  ENST ID: ENST00000591700
  CDS Start-End: 287-499
aacccaagatgctcgctctagagatgaaggtggatgcagatgctggggttcgggggtggcctcagctgagggcctgctgaccaaccaaaggcaggagtggctggaatgggaggaccggcggcgggcggctgcccagcagtgccggagccgcaggtgcccgtcaagtccccgggcccgactcactaggcctcaccgttcctgccgagacccagctgtccaccaagccctcttctccggcaacctgcagcaggtccaagccctgttccaagatgaagaggccgccaacatgattgtggagactgtgagcaaccagctggcctggtcggctgaacaggggttctgggtgctgacccccaagaccaagcagacggcacccctcgccatcgctacagcccgaggctacacagactgtgctcgacacctgatccggcagggagctgagctggatgcccgtgtcgggggtcgcgctgccttgcatgaggcctgtgcccgagcccag

SEQ ID NO: 107458 - DNA, 1107 bp, Homo sapiens
  Payload ID: 1090
  Gene Symbol: ASB17
  Gene Name: ankyrin repeat and SOCS box containing 17
  Uniprot ID: Q8WXJ9
  ENST ID: ENST00000284142
  CDS Start-End: 141-1028
aatatttattttttctggttacagtttaaagggcacttctgtttgtggagtaaagcctgccacattgtcaaaatatgtaactggaggattacagtatgcttacctctgattttatttctacagtgctgctataagtaacaatgagtaaatctactaaattatgtggtaagacttcttgtccaagaagcaatatattctgcaatctccttgacaaaattgttaaaagaccctccctacagtttttgggtcagtggggatatcactgttacgaaccaaggatttacagatcactggcaaaaattctgaggtatgtggacttggatggttttgacgcactactcacagattacattgcatttgtggaaaaatcaggataccgttttgaagtaagttttaacctcgacttcactgaaatatgtgtgaatacaattctgtactgggtttttgccagaaaaggtaatcctgactttgtggaattgcttctcaagaagacaaaagactatgttcaagacagaagttgtaacctggcactgatatggagaactttcacaccagtatactgtccaagcccattaagtggcatcacacctctcttttatgtagctcagacaagacagtctaatatcttcaaaatactactgcaatatggaatcttagaaagagaaaaaaaccctatcaacattgtcttaacaatagtactctacccttcgagagtaagagtaatggttgatcgtgaattggctgacatccatgaagatgccaaaacatgtttggtactatgttccagagtgctttctgtcatttcagtcaaggaaataaagacacagctgagtttaggaagacatccaattatttcaaattggtttgattacattccttcaacaagatacaaagatccatgtgaactattacatctttgcagactaaccatcaggaatcaactattaaccaacaatatgctcccagatggaatattttcacttctaattcctgctcgtctacaaaactatctgaatttagaaatctaacatacgtcagtgtcctaagttccttaacaatgcttaccaatgtatggcttagaagttaataaaaattcacttcatgtaa

SEQ ID NO: 107459 - DNA, 1401 bp, Homo sapiens
  Payload ID: 1091
  Gene Symbol: ASB18
  Gene Name: ankyrin repeat and SOCS box containing 18
  Uniprot ID: Q6ZVZ8
  ENST ID: ENST00000409749
  CDS Start-End: 1-1401
atgtccaactcggattaccttcccgactacccactcaactcagatttagtgaagagattaaagtctgccctggatgccaaagatgaggagagagtgagggatttaatctgcactgaaatcacgcctgtggacgctgtgatagaactggccaatgacgactggatgaaagacccctcggctcagctgcccaccggcatgctgctaggggacctcgaccatctgaagcccctcatggaccagttcttccaggatgccaacgtggtgtttgagatcaataaggatgagatggaatggcaggtgaaatctccagccacgtttggactatcaggcctctggaccctggagtacaagcgtgagctcaccacgcccctgtgcatcgccgcggcccacggccacaccgcctgcgtgcgacacctgctcggccgcggcgcagacccagacgccagccccggcggccgcggcgccctgcacgaggcctgcctcgggggccacaccgcctgcgtccgcctgctgctgcagcaccgcgccgaccccgacctgctcagcgccgagggcctggcgcctctgcacctctgccgcacggccgcctcgctcgggtgcgcgcaggcgctgctggagcacggggcctcggtgcagcgcgtgggcggcacgggccgggacacgccgctgcacgtggcggcgcagcgcggcctggacgagcacgcgcgcctgtacctgggccgcggggcgcacgtggacgcgaggaacggccgcggagagacggctctgagcgcggcctgcggtgcggcgcggaggcccgacgagcacgggcgctgcctgcgcctgtgcgcgctgctgctgcggcgcggggcggaggcggacgcgcgcgacgaggacgagcgcagcccgctgcacaaagcctgcggccacgcgagccacagcctggcgcgcctcctactgcggcacggcgccgacgcgggcgcgctcgactatggcggggcctcgccgctgggccgcgtgctccagaccgcatcctgcgctctccaggcctcaccgcagcgcacggtgcaggcgctgctcaaccacggctctcccaccgtgtggcccgacgccttccccaaggtgctgaagacctgtgcatctgtccccgcagtcatcgaggtgcttttcaactcctaccctcagctctgcttgtcagagtcctggaaggaagtgattcctgaggaagtattccagatgcacaagccgttctaccagtccctctttgccttggccctcaccccacgctgcctgcagcatctttgccgctgtgctcttcgcagactgtttggcaaaaggtgctttgacctcatccccctgttacccttgccaaagcccctgcagaattacctacttttggagccacagggtgttttgcactga

SEQ ID NO: 107460 - DNA, 650 bp, Homo sapiens
  Payload ID: 1091
  Gene Symbol: ASB18
  Gene Name: ankyrin repeat and SOCS box containing 18
  ENST ID: ENST00000430053
  CDS Start-End: 65-650
gctgactttggagtcgctttagaggaagaaaagaagggctggtcactgcagaaacgacgtaacaatgtccaactcggattaccttcccgactacccactcaactcagatttagtgaagagattaaagtctgccctggatgccaaagatgaggagagagtgagggatttaatctgcactgaaatcacgcctgtggacgctgtgatagaactggccaatgacgactggatgaaagacccctcggctcagctgcccaccggcatgctgctaggcctctggaccctggagtacaagcgtgagctcaccacgcccctgtgcatcgccgcggcccacggccacaccgcctgcgtgcgacacctgctcggccgcggcgcagacccagacgccagccccggcggccgcggcgccctgcacgaggcctgcctcgggggccacaccgcctgcgtccgcctgctgctgcagcaccgcgccgaccccgacctgctcagcgccgagggcctggcgcctctgcacctctgccgcacggccgcctcgctcgggtgcgcgcaggcgctgctggagcacggggcctcggtgcagcgcgtgggcggcacgggccgggacacgccgctgcacgtggcggcgcagcgcggcctggacgagcacgcgcgcc

SEQ ID NO: 107461 - DNA, 568 bp, Homo sapiens
  Payload ID: 1091
  Gene Symbol: ASB18
  Gene Name: ankyrin repeat and SOCS box containing 18
  ENST ID: ENST00000447030
  CDS Start-End: 1-447
gcgcgcgacgaggacgagcgcagcccgctgcacaaagcctgcggccacgcgagccacagcctggcgcgcctcctactgcggcacggcgccgacgcgggcgcgctcgactatggcggggcctcgccgctgggccgcgtgctccagaccgcatcctgcgctctccaggcctcaccgcagcgcacggtgcaggcgctgctcaaccacggctctcccaccgtgtggcccgacgccttccccaaggtgctgaagacctgtgcatctgtccccgcagtcatcgaggtgcttttcaactcctaccctcagctctgcttgtcagagtcctggaaggaagtgattcctgaggaagtattccaggcaagagggctgcctttctgcccatctttagtacaaaacttttgtctgtttttgcttctttgcatggggagttttgcactgatattcggctaagtattatacatctgaaaaaggaagaatgggaaatgagggtgtatttgcacgtttctggttttttctggaggctccataatcacacagccaggagcttgttatagtagttgcggtgccatgg

SEQ ID NO: 107462 - DNA, 2743 bp, Homo sapiens
  Payload ID: 1092
  Gene Symbol: ASB2
  Gene Name: ankyrin repeat and SOCS box containing 2
  Uniprot ID: Q96Q27
  ENST ID: ENST00000315988
  CDS Start-End: 490-2253
aggttactatagtgtctgctcctacccctgggacaagatcccctaatgagctggcaggtgggcgtggggggcacaggtacagcttggcttctcagctttgctcccctatcctctgctttgccatgaatctctcatccagccccgcagggatctgcctggccagcagtgagcctgagcccctttcatcctgggacctgccgaccacggctcacatcctcctgggtgaagaatgtcaccttgcttcctatctgcctctttcgtggttggctggggagggggaccggggggtggggtgaggttaacctcattgttgtcttatatggtcatttaaatctcccagggcttcctccaagggccaaaaataatccggagacacagcagctgtgtccagcacacagaggacccggccatctgctttggttcagagccctgtgtctgtcagtcagtctctccctggctctccctccatcctcattcctgcctgaagccatgacccgcttctcctatgcagagtacttttccctctttcactcctgctctgcaccctccaggtccactgcacctcctgagagttcgccggcccgggccccaatgggcttgttccaaggggtcatgcagaaatacagcagcagcttgttcaagacctcccagctggcgcctgcggaccccttgataaaggccatcaaggatggcgatgaagaggccttgaagaccatgatcaaggaagggaagaatctcgcagagcccaacaaggagggctggctgccgctgcacgaggccgcatactatggccaggtgggctgcctgaaagtcctgcagcgagcgtacccagggaccatcgaccagcgcaccctgcaggaggaaacagccgtttacttggcaacgtgcaggggccacctggactgtctcctgtcactgctccaagcaggggcagagccggacatctccaacaaatcccgagagacaccgctctacaaagcctgcgagcgcaagaacgcggaggccgtgaagattctggtgcagcacaatgcagacaccaaccaccgctgcaaccgcggctggaccgctctgcacgagtctgtgtctcgcaatgacctggaggtcatgcagatcctggtgagcggaggagccaaggtggaatccaagaacgcctacggcatcacccccttgttcgtggccgcccagagtggacagttggaggccttgaggttcttagccaagtacggtgctgacatcaacacgcaggccagcgacaacgcgtctgccctctacgaggcctgcaagaatgagcatgaggaggtggtggagtttctgctgtcacagggtgccgacgccaacaagaccaacaaggacggcttgctcccgctgcacatcgcctccaagaagggcaactacaggatcgtgcagatgctgctgccggtgaccagccgcacgcgcatacgccgtagcggcgtcagtccgctgcacctggcggccgagcgcaaccacgacgaggtgctggaggcgctgctgagcgcgcgcttcgacgtgaacacgccgctggcccccgagcgcgcgcgcctctacgaagaccggcgcagctccgcgctgtacttcgcggtggtcaacaacaacgtgtacgccaccgagctgctgctgcaacacggcgccgaccccaaccgcgacgtcatcagccccttgctcgtggccatccgccacggctgcctgcgcacaatgcagctgctgctggaccacggcgcgaacatcgacgcctatatcgccacgcaccccaccgccttccccgccaccatcatgttcgccatgaagtgcctgtcgctgctcaagttcctcatggacctgggctgcgacggcgagccctgcttctcatgcctctacggcaacggcccgcacccgccggccccgcagccctccagcaggttcaacgacgcgcccgcggccgacaaggagcccagcgtggtgcagttctgtgagttcgtatctgccccagaggtgagccgctgggcggggcccatcatcgatgtcctcctggactacgtgggcaacgtgcagctctgctcgcggctgaaggaacacatcgacagctttgaggactgggccgtcatcaaggagaaggcagaacctccaagacctctggctcacctttgccgactgcgggttcgaaaggccattgggaaataccgtataaaactcctagacaccttgccgctcccaggcaggctgattagatacctgaaatacgagaacacccagtaactggggccacggggagagaggagtagcccctcagactcttcttactaagtctcaggacgtcggtgttcccaactccaaggggacctggtgacagacgaggctgcaggctgcctccctctcagcctggacagctaccaggatctcactgggtctcagggcccagagctttggccagagcagagaacagaatgtgtcaaggagaagaatcatttgtttacaaactgatgagcagatcccagaccttctctaccttcaggaatggcagaaacctctattcctggggccagggcagagcttgaggtgttctggggaaggtggtgctcagagccttccctgtgcccctccacttgttctggaaaactcaccacttgacttcagagctttctctccaaagactaagatgaagacgtggcccaaggtagggggtagggggagcctgggtcttggagggctttgttaagtattaatataataaatgttacacatgtga

SEQ ID NO: 107463 - DNA, 1911 bp, Homo sapiens
  Payload ID: 1092
  Gene Symbol: ASB2
  Gene Name: ankyrin repeat and SOCS box containing 2
  ENST ID: ENST00000555507
  CDS Start-End: 468-1911
agctggggtccctttggagacactccaggaaaaggggggcacatacccccactgggcttttcctgatgctgacaggggctgctctggctgttcctaagtggaactcgtcaaggtggcagtgacggtgctgatggggacctcaggacttatctgatcagtttcccatcgtccttgctgggtctgttgcttcaccggcatctgtgctctgacaccattaataaccacagagtctgagagtcaggaggaagtgctgctcacgctggaggaagtggctgggagagtgcaggggctggtggcagagaccgcccagagcccatcctagcccaacatggcgtgggtgtcctgggaatgaggcctgcctccagcctcaccttctccatctgggaaatgggactattgatgcagaagcctccccaaaagtggatctgagaggcatagacatcgtggttctcacggactctccaaggatgaggcctgcggaccccttgataaaggccatcaaggatggcgatgaagaggccttgaagaccatgatcaaggaagggaagaatctcgcagagcccaacaaggagggctggctgccgctgcacgaggccgcatactatggccaggtgggctgcctgaaagtcctgcagcgagcgtacccagggaccatcgaccagcgcaccctgcaggaggaaacagccgtttacttggcaacgtgcaggggccacctggactgtctcctgtcactgctccaagcaggggcagagccggacatctccaacaaatcccgagagacaccgctctacaaagcctgcgagcgcaagaacgcggaggccgtgaagattctggtgcagcacaatgcagacaccaaccaccgctgcaaccgcggctggaccgctctgcacgagtctgtgtctcgcaatgacctggaggtcatgcagatcctggtgagcggaggagccaaggtggaatccaagaacgcctacggcatcacccccttgttcgtggccgcccagagtggacagttggaggccttgaggttcttagccaagtacggtgctgacatcaacacgcaggccagcgacaacgcgtctgccctctacgaggcctgcaagaatgagcatgaggaggtggtggagtttctgctgtcacagggtgccgacgccaacaagaccaacaaggacggcttgctcccgctgcacatcgcctccaagaagggcaactacaggatcgtgcagatgctgctgccggtgaccagccgcacgcgcatacgccgtagcggcgtcagtccgctgcacctggcggccgagcgcaaccacgacgaggtgctggaggcgctgctgagcgcgcgcttcgacgtgaacacgccgctggcccccgagcgcgcgcgcctctacgaagaccggcgcagctccgcgctgtacttcgcggtggtcaacaacaacgtgtacgccaccgagctgctgctgcaacacggcgccgaccccaaccgcgacgtcatcagccccttgctcgtggccatccgccacggctgcctgcgcacaatgcagctgctgctggaccacggcgcgaacatcgacgcctatatcgccacgcaccccaccgccttccccgccaccatcatgttcgccatgaagtgcctgtcgctgctcaagttcctcatggacctgggctgcgacggcgagccctgcttctcatgcctctacggcaacggcccgcacccgccggccccgcagccctccagcaggttcaacgacgcgcccgcggccgacaaggagcccagcgtggtgcagttctgtgagttcgtatctgccccagaggtgagccgctgggcggggcccatcatcgatgtcctcctggactacgtgggcaacgtgcagctctgctcgcggctgaaggaacacatcgacagctttgaggactggg

SEQ ID NO: 107464 - DNA, 576 bp, Homo sapiens
  Payload ID: 1092
  Gene Symbol: ASB2
  Gene Name: ankyrin repeat and SOCS box containing 2
  ENST ID: ENST00000557613
  CDS Start-End: 210-576
aaaagatttccagccagccctgcaggtgaggaggggctatggaggattccccctgccctgcctgagccttcccgctctgctgcctggagttaaagcctccagaaccccctgtgtcttctgccactaaggaaccaagggttttctgatttgctgttccctcctccccactgggtgtctgttctggaggccagggtgagaggtggaggaggatggccacgcagatcagcactcggggcagccagtgtaccattgggcaggaggagtacagcctgtacagcagcctgagcgaggatgaactggtgcagatggccatcgagcagagcctagcggacaagacaaggggcccaaccactgctgaggccaccgcgtctgcatgtaccaaccgccaacctgcccatttctacccatggaccaggcctgcggaccccttgataaaggccatcaaggatggcgatgaagaggccttgaagaccatgatcaaggaagggaagaatctcgcagagcccaacaaggagggctggctgccgctgcacgaggccgcatactatggccaggtgggctgcctgaaagtcctgc

SEQ ID NO: 107465 - DNA, 2842 bp, Homo sapiens
  Payload ID: 1092
  Gene Symbol: ASB2
  Gene Name: ankyrin repeat and SOCS box containing 2
  Uniprot ID: Q96Q27
  ENST ID: ENST00000555019
  CDS Start-End: 432-2339
acaaatgatgacatcacgtgagggccaaagctccgggatcctctctgaagtgagagtctgtattcgatgcacccggaggaacggaaggcaggattgcagcttcctcagtgcaacctccaaacaggaaatctgagatgtataacatcttatagtttggcttgtcaacgttggtcatgcggtggccccaaaataaactccctgcttcaaaggacagcgtttcagaactgcctggcagagcagccagaagcttggggccagggcagaaggaaaactcggggagcatgttctgaattaagacactttcaagaaaatcctttgtattacccctgaattgtacccttgtttcagagcctaacagggttttctgatttgctgttccctcctccccactgggtgtctgttctggaggccagggtgagaggtggaggaggatggccacgcagatcagcactcggggcagccagtgtaccattgggcaggaggagtacagcctgtacagcagcctgagcgaggatgaactggtgcagatggccatcgagcagagcctagcggacaagacaaggggcccaaccactgctgaggccaccgcgtctgcatgtaccaaccgccaacctgcccatttctacccatggaccaggtccactgcacctcctgagagttcgccggcccgggccccaatgggcttgttccaaggggtcatgcagaaatacagcagcagcttgttcaagacctcccagctggcgcctgcggaccccttgataaaggccatcaaggatggcgatgaagaggccttgaagaccatgatcaaggaagggaagaatctcgcagagcccaacaaggagggctggctgccgctgcacgaggccgcatactatggccaggtgggctgcctgaaagtcctgcagcgagcgtacccagggaccatcgaccagcgcaccctgcaggaggaaacagccgtttacttggcaacgtgcaggggccacctggactgtctcctgtcactgctccaagcaggggcagagccggacatctccaacaaatcccgagagacaccgctctacaaagcctgcgagcgcaagaacgcggaggccgtgaagattctggtgcagcacaatgcagacaccaaccaccgctgcaaccgcggctggaccgctctgcacgagtctgtgtctcgcaatgacctggaggtcatgcagatcctggtgagcggaggagccaaggtggaatccaagaacgcctacggcatcacccccttgttcgtggccgcccagagtggacagttggaggccttgaggttcttagccaagtacggtgctgacatcaacacgcaggccagcgacaacgcgtctgccctctacgaggcctgcaagaatgagcatgaggaggtggtggagtttctgctgtcacagggtgccgacgccaacaagaccaacaaggacggcttgctcccgctgcacatcgcctccaagaagggcaactacaggatcgtgcagatgctgctgccggtgaccagccgcacgcgcatacgccgtagcggcgtcagtccgctgcacctggcggccgagcgcaaccacgacgaggtgctggaggcgctgctgagcgcgcgcttcgacgtgaacacgccgctggcccccgagcgcgcgcgcctctacgaagaccggcgcagctccgcgctgtacttcgcggtggtcaacaacaacgtgtacgccaccgagctgctgctgcaacacggcgccgaccccaaccgcgacgtcatcagccccttgctcgtggccatccgccacggctgcctgcgcacaatgcagctgctgctggaccacggcgcgaacatcgacgcctatatcgccacgcaccccaccgccttccccgccaccatcatgttcgccatgaagtgcctgtcgctgctcaagttcctcatggacctgggctgcgacggcgagccctgcttctcatgcctctacggcaacggcccgcacccgccggccccgcagccctccagcaggttcaacgacgcgcccgcggccgacaaggagcccagcgtggtgcagttctgtgagttcgtatctgccccagaggtgagccgctgggcggggcccatcatcgatgtcctcctggactacgtgggcaacgtgcagctctgctcgcggctgaaggaacacatcgacagctttgaggactgggccgtcatcaaggagaaggcagaacctccaagacctctggctcacctttgccgactgcgggttcgaaaggccattgggaaataccgtataaaactcctagacaccttgccgctcccaggcaggctgattagatacctgaaatacgagaacacccagtaactggggccacggggagagaggagtagcccctcagactcttcttactaagtctcaggacgtcggtgttcccaactccaaggggacctggtgacagacgaggctgcaggctgcctccctctcagcctggacagctaccaggatctcactgggtctcagggcccagagctttggccagagcagagaacagaatgtgtcaaggagaagaatcatttgtttacaaactgatgagcagatcccagaccttctctaccttcaggaatggcagaaacctctattcctggggccagggcagagcttgaggtgttctggggaaggtggtgctcagagccttccctgtgcccctccacttgttctggaaaactcaccacttgacttcagagctttctctccaaagactaagatgaagacgtggcccaaggtagggggtagggggagcctgggtcttggagggctttgttaagtattaatataataaatgttacacatgtgacacctgcccagtg

SEQ ID NO: 107466 - DNA, 661 bp, Homo sapiens
  Payload ID: 1092
  Gene Symbol: ASB2
  Gene Name: ankyrin repeat and SOCS box containing 2
  ENST ID: ENST00000555287
  CDS Start-End: 327-661
ccggaggaacggaaggcaggattgcagcttcctcagtgcaacctccaaacaggaaatctgagatgtataacatcttatagtttggcttgtcaacgttggtcatgcggtggccccaaaataaactccctgcttcaaaggacagcgtttcagaactgcctggcagagcagccagaagcttggggccagggcagaaggaaaactcggggagcatgttctgaattaagacactttcaagaaaatcctttgtattacccctgaattgtacccttgtttcagagcctaacaggtccactgcacctcctgagagttcgccggcccgggccccaatgggcttgttccaaggggtcatgcagaaatacagcagcagcttgttcaagacctcccagctggcgcctgcggaccccttgataaaggccatcaaggatggcgatgaagaggccttgaagaccatgatcaaggaagggaagaatctcgcagagcccaacaaggagggctggctgccgctgcacgaggccgcatactatggccaggtgggctgcctgaaagtcctgcagcgagcgtacccagggaccatcgaccagcgcaccctgcaggaggaaacagccgtttacttggcaacgtgcaggggccacctggactgtctcctgtcactgctccaagc

SEQ ID NO: 107467 - DNA, 566 bp, Homo sapiens
  Payload ID: 1092
  Gene Symbol: ASB2
  Gene Name: ankyrin repeat and SOCS box containing 2
  ENST ID: ENST00000556062
  CDS Start-End: 160-566
agagcccatcctagcccaacatggcgtgggtgtcctgggaatgaggcctgcctccagcctcaccttctccatctgggaaatgggactattgatgcagaagcctccccaaaagtggatctgagaggcatagacatcgtggttctcacggactctccaaggatgaggcctgcggaccccttgataaaggccatcaaggatggcgatgaagaggccttgaagaccatgatcaaggaagggaagaatctcgcagagcccaacaaggagggctggctgccgctgcacgaggccgcatactatggccaggtgggctgcctgaaagtcctgcagcgagcctgcgagcgcaagaacgcggaggccgtgaagattctggtgcagcacaatgcagacaccaaccaccgctgcaaccgcggctggaccgctctgcacgagtctgtgtctcgcaatgacctggaggtcatgcagatcctggtgagcggaggagccaaggtggaatccaagaacgcctacggcatcacccccttgttcgtggccgcccagagtggacagttggaggccttgaggttctt

SEQ ID NO: 107468 - DNA, 2842 bp, Homo sapiens; identical to SEQ ID NO: 107465
  Payload ID: 1092
  Gene Symbol: ASB2
  Gene Name: ankyrin repeat and SOCS box containing 2
  Uniprot ID: Q96Q27
  ENST ID: ENST00000612647
  CDS Start-End: 432-2339

SEQ ID NO: 107469 - DNA, 661 bp, Homo sapiens; identical to SEQ ID NO: 107466
  Payload ID: 1092
  Gene Symbol: ASB2
  Gene Name: ankyrin repeat and SOCS box containing 2
  ENST ID: ENST00000628500
  CDS Start-End: 327-661

SEQ ID NO: 107470 - DNA, 1911 bp, Homo sapiens; identical to SEQ ID NO: 107463
  Payload ID: 1092
  Gene Symbol: ASB2
  Gene Name: ankyrin repeat and SOCS box containing 2
  ENST ID: ENST00000626296
  CDS Start-End: 468-1911

SEQ ID NO: 107471 - DNA, 576 bp, Homo sapiens; identical to SEQ ID NO: 107464
  Payload ID: 1092
  Gene Symbol: ASB2
  Gene Name: ankyrin repeat and SOCS box containing 2
  ENST ID: ENST00000625949
  CDS Start-End: 210-576

SEQ ID NO: 107472 - DNA, 2743 bp, Homo sapiens; identical to SEQ ID NO: 107462
  Payload ID: 1092
  Gene Symbol: ASB2
  Gene Name: ankyrin repeat and SOCS box containing 2
  Uniprot ID: Q96Q27
  ENST ID: ENST00000629617
  CDS Start-End: 490-2253

SEQ ID NO: 107473 - DNA, 566 bp, Homo sapiens; identical to SEQ ID NO: 107467
  Payload ID: 1092
  Gene Symbol: ASB2
  Gene Name: ankyrin repeat and SOCS box containing 2
  ENST ID: ENST00000626017
  CDS Start-End: 160-566

SEQ ID NO: 107474 - DNA, 2214 bp, Homo sapiens
  Payload ID: 1093
  Gene Symbol: ASB3
  Gene Name: ankyrin repeat and SOCS box containing 3
  Uniprot ID: Q9Y575
  ENST ID: ENST00000263634
  CDS Start-End: 136-1692
gtctctcgttttcggacggctgcagcatcgcggtggggatcgaaagcgggggcttctgggacgcagctctggagacgcggcctcggaccagccatttcggtgtagaagtggcagcacggcagactggtcaaacaaatggattttacagaggcttacgcggacacgtgctctacagttggacttgctgccagggaaggcaatgttaaagtcttaaggaaactgctcaaaaagggccgaagtgtcgatgttgctgataacaggggatggatgccaattcatgaagcagcttatcacaactctgtagaatgtttgcaaatgttaattaatgcagattcatctgaaaactacattaagatgaagacctttgaaggtttctgtgctttgcatctcgctgcaagtcaaggacattggaaaatcgtacagattcttttagaagctggggcagatcctaatgcaactactttagaagaaacgacaccattgtttttagctgttgaaaatggacagatagatgtgttaaggctgttgcttcaacacggagcaaatgttaatggatcccattctatgtgtggatggaactccttgcaccaggcttcttttcaggaaaatgctgagatcataaaattgcttcttagaaaaggagcaaacaaggaatgccaggatgactttggaatcacacctttatttgtggctgctcagtatggcaagctagaaagcttgagcatacttatttcatcgggtgcaaatgtcaattgtcaagccttggacaaagctacacccttgttcattgctgctcaagagggacacacaaaatgtgtggagcttttgctctccagtggggcagatcctgatctttactgtaatgaggacagttggcagttacctattcatgcagctgcacaaatgggccatacaaaaatcttggacttgttaataccacttactaaccgggcctgtgacactgggctaaacaaagtaagccctgtttactcagcagtgtttgggggacatgaagattgcctagaaatattactccggaatggctacagcccagacgcccaggcgtgccttgtttttggattcagttctcctgtgtgcatggctttccaaaaggactgtgagttctttggaattgtgaacattcttttgaaatatggagcccagataaatgaacttcatttggcatactgcctgaagtacgagaagttttcgatatttcgctactttttgaggaaaggttgctcattgggaccatggaaccatatatatgaatttgtaaatcatgcaattaaagcacaagcaaaatataaggagtggttgccacatcttctggttgctggatttgacccactgattctactgtgcaattcttggattgactcagtcagcattgacacccttatcttcactttggagtttactaattggaagacacttgcaccagctgttgaaaggatgctctctgctcgtgcctcaaacgcttggattctacagcaacatattgccactgttccatccctgacccatctttgtcgtttggaaattcggtccagtctaaaatcagaacgtctacggtctgacagttatattagtcagctgccacttcccagaagcctacataattatttgctctatgaagacgttctgaggatgtatgaagttccagaactggcagctattcaagatggataaatcagtgaaactacttaacacagctaatttttttctctgaaaaatcatcgagacaaaagagccacagagtacaagtttttatgattttatagtcaaaagatgattattgattgtgagataggttaggttttggggggccagtagttcagtgagaatgtttatgtttacaactagccttcccagtaaaaaaaaaaaaaaaaaaaaaaaaaattgtaaacatcacttatattactttattgcagcttcatcaccagtacattatatgttgtaatatttatttacctgatcattttgatcattttctgctttattttgctaataaactgtgatgttacttctagtgctaaacatggcatatttccacctatgattcgtgtttacctggtattaggagctcagaatggaatgcataaagcttcactggaagtgtatacaactgtggtgtagaatctgttattattatcattattattttatttagacttgactatctcttatgtttattaaagaacatgttttcct

SEQ ID NO: 107475 - DNA, 1734 bp, Homo sapiens
  Payload ID: 1093
  Gene Symbol: ASB3
  Gene Name: ankyrin repeat and SOCS box containing 3
  ENST ID: ENST00000394717
  CDS Start-End: 213-1550
agacgacatatcaacatccgggggtcgcggagccgtccgcctacgggggccgggacgtcgcctgcgcgtctctcgttttcggacggctgcagcatcgcggtggggatcgaaagcgggggcttctgggacgcagctctggagacgcggcctcggaccagccatttcggtgtagaagtggcagcacggcagattcatctgaaaactacattaagatgaagacctttgaaggtttctgtgctttgcatctcgctgcaagtcaaggacattggaaaatcgtacagattcttttagaagctggggcagatcctaatgcaactactttagaagaaacgacaccattgtttttagctgttgaaaatggacagatagatgtgttaaggctgttgcttcaacacggagcaaatgttaatggatcccattctatgtgtggatggaactccttgcaccaggcttcttttcaggaaaatgctgagatcataaaattgcttcttagaaaaggagcaaacaaggaatgccaggatgactttggaatcacacctttatttgtggctgctcagtatggcaagctagaaagcttgagcatacttatttcatcgggtgcaaatgtcaattgtcaagccttggacaaagctacacccttgttcattgctgctcaagagggacacacaaaatgtgtggagcttttgctctccagtggggcagatcctgatctttactgtaatgaggacagttggcagttacctattcatgcagctgcacaaatgggccatacaaaaatcttggacttgttaataccacttactaaccgggcctgtgacactgggctaaacaaagtaagccctgtttactcagcagtgtttgggggacatgaagattgcctagaaatattactccggaatggctacagcccagacgcccaggcgtgccttgtttttggattcagttctcctgtgtgcatggctttccaaaaggactgtgagttctttggaattgtgaacattcttttgaaatatggagcccagataaatgaacttcatttggcatactgcctgaagtacgagaagttttcgatatttcgctactttttgaggaaaggttgctcattgggaccatggaaccatatatatgaatttgtaaatcatgcaattaaagcacaagcaaaatataaggagtggttgccacatcttctggttgctggatttgacccactgattctactgtgcaattcttggattgactcagtcagcattgacacccttatcttcactttggagtttactaattggaagacacttgcaccagctgttgaaaggatgctctctgctcgtgcctcaaacgcttggattctacagcaacatattgccactgttccatccctgacccatctttgtcgtttggaaattcggtccagtctaaaatcagaacgtctacggtctgacagttatattagtcagctgccacttcccagaagcctacataattatttgctctatgaagacgttctgaggatgtatgaagttccagaactggcagctattcaagatggataaatcagtgaaactacttaacacagctaatttttttctctgaaaaatcatcgagacaaaagagccacagagtacaagtttttatgattttatagtcaaaagatgattattgattgtgagataggttaggttttggggggccagtagttcagtgagaatgtttatgtttacaactagccttcccagt

SEQ ID NO: 107476 - DNA, 2205 bp, Homo sapiens
  Payload ID: 1093
  Gene Symbol: ASB3
  Gene Name: ankyrin repeat and SOCS box containing 3
  ENST ID: ENST00000406687
  CDS Start-End: 684-2021
gcgtctctcgttttcggacggctgcagcatcgcggtggggatcgaaagcgggggcttctgggacgcagctctggagacgcggcctcggaccagccatttcggtgtagaagtggcagcacggcaggtcggtgagtctcggaggcggcagccgcttcctgaagccattcccgctgctctccagtgggcaggcagaggtttgacccacacggagtgatagcgggaagaagacagtgtgaaccgtgcgggtgcgggtccttagatgagaaaattcgaagtagcgatgagatgtgagaaatggcggtgttcctgactgacctgccttcttgcagcttttcttctttttctccgcatttggcatttgtacacttcatttttcccgcttgaggcttatctccatctcttctgctgtggaccgtggccatctcgttacttaacagcttctgactaacgcagggcagtttgttcagcgactgcaactctgtgttaggggaaacctggggtgaggtagcccgccatctccccgtaggtgaataccgcaagcctccgaatttggcgtggtgggcgactctcgtggaatgggcagctagacatcacaaccctacatttttaccctccatctctagattgaagtgttggggtgttgttttatcaaggaagctgattcatctgaaaactacattaagatgaagacctttgaaggtttctgtgctttgcatctcgctgcaagtcaaggacattggaaaatcgtacagattcttttagaagctggggcagatcctaatgcaactactttagaagaaacgacaccattgtttttagctgttgaaaatggacagatagatgtgttaaggctgttgcttcaacacggagcaaatgttaatggatcccattctatgtgtggatggaactccttgcaccaggcttcttttcaggaaaatgctgagatcataaaattgcttcttagaaaaggagcaaacaaggaatgccaggatgactttggaatcacacctttatttgtggctgctcagtatggcaagctagaaagcttgagcatacttatttcatcgggtgcaaatgtcaattgtcaagccttggacaaagctacacccttgttcattgctgctcaagagggacacacaaaatgtgtggagcttttgctctccagtggggcagatcctgatctttactgtaatgaggacagttggcagttacctattcatgcagctgcacaaatgggccatacaaaaatcttggacttgttaataccacttactaaccgggcctgtgacactgggctaaacaaagtaagccctgtttactcagcagtgtttgggggacatgaagattgcctagaaatattactccggaatggctacagcccagacgcccaggcgtgccttgtttttggattcagttctcctgtgtgcatggctttccaaaaggactgtgagttctttggaattgtgaacattcttttgaaatatggagcccagataaatgaacttcatttggcatactgcctgaagtacgagaagttttcgatatttcgctactttttgaggaaaggttgctcattgggaccatggaaccatatatatgaatttgtaaatcatgcaattaaagcacaagcaaaatataaggagtggttgccacatcttctggttgctggatttgacccactgattctactgtgcaattcttggattgactcagtcagcattgacacccttatcttcactttggagtttactaattggaagacacttgcaccagctgttgaaaggatgctctctgctcgtgcctcaaacgcttggattctacagcaacatattgccactgttccatccctgacccatctttgtcgtttggaaattcggtccagtctaaaatcagaacgtctacggtctgacagttatattagtcagctgccacttcccagaagcctacataattatttgctctatgaagacgttctgaggatgtatgaagttccagaactggcagctattcaagatggataaatcagtgaaactacttaacacagctaatttttttctctgaaaaatcatcgagacaaaagagccacagagtacaagtttttatgattttatagtcaaaagatgattattgattgtgagataggttaggttttggggggccagtagttcagtgagaatgtttatgtttacaactagccttcccagt

SEQ ID NO: 107477 - DNA, 2648 bp, Homo sapiens
  Payload ID: 1093
  Gene Symbol: ASB3
  Gene Name: ankyrin repeat and SOCS box containing 3
  ENST ID: ENST00000406053
  CDS Start-End: 1-1432
ggacacgtgctctacagttggacttgctgccagggaaggcaatgttaaagtcttaaggaaactgctcaaaaagggccgaagtgtcgatgttgctgataacaggggatggatgccaattcatgaagcagcttatcacaactctgtagaatgtttgcaaatgttaattaatgcagattcatctgaaaactacattaagatgaagacctttgaaggtttctgtgctttgcatctcgctgcaagtcaaggacattggaaaatcgtacagattcttttagaagctggggcagatcctaatgcaactactttagaagaaacgacaccattgtttttagctgttgaaaatggacagatagatgtgttaaggctgttgcttcaacacggagcaaatgttaatggatcccattctatgtgtggatggaactccttgcaccaggcttcttttcaggaaaatgctgagatcataaaattgcttcttagaaaaggagcaaacaaggaatgccaggatgactttggaatcacacctttatttgtggctgctcagtatggcaagctagaaagcttgagcatacttatttcatcgggtgcaaatgtcaattgtcaagccttggacaaagctacacccttgttcattgctgctcaagagggacacacaaaatgtgtggagcttttgctctccagtggggcagatcctgatctttactgtaatgaggacagttggcagttacctattcatgcagctgcacaaatgggccatacaaaaatcttggacttgttaataccacttactaaccgggcctgtgacactgggctaaacaaagtaagccctgtttactcagcagtgtttgggggacatgaagattgcctagaaatattactccggaatggctacagcccagacgcccaggcgtgccttgtttttggattcagttctcctgtgtgcatggctttccaaaaggactgtgagttctttggaattgtgaacattcttttgaaatatggagcccagataaatgaacttcatttggcatactgcctgaagtacgagaagttttcgatatttcgctactttttgaggaaaggttgctcattgggaccatggaaccatatatatgaatttgtaaatcatgcaattaaagcacaagcaaaatataaggagtggttgccacatcttctggttgctggatttgacccactgattctactgtgcaattcttggattgactcagtcagcattgacacccttatcttcactttggagtttactaattggaagacacttgcaccagctgttgaaaggatgctctctgctcgtgcctcaaacgcttggattctacagcaacatattgaacaaggcttcattctgcaaaaatatctgggaccttcaaattcacaagtggattttctgctcaggggagagctaccaatcggttgaaaggtttctcttccatatgcagaaaactgaaactggacctcttccttacaccttatacaaaaattagctcaagatggattaaagatttaaatgtaagacctaaaaccataaaaaccctagaagaaaacctaggcaatatcattcagtacataggcatgggcaaagacttcatgactaaaacaccaaaagcaattgcaacaaaagccaaaactgacaaatgggatctaattaaattaacaagcttctgcacagcaaaagaaactatcatcagagtgaacaggcaacctacagaatgggagaaaagtttctcaatctatccatctgacaaacggctactatccagaatctacaaggaacttaaacaaatttacaagaaaaaacaaacaaccccatcaaaaagtgggcaaaggatatgaacagacacgaacatctatgcagccaacagacacatgaaaaaatggtcatcatcactggtcatcagagaaatgcaaatcaaaaccacaatgagataccatctcacaccagttagaatggcaatcattaaaaagtcaggaaacaacagatgctggagaggatgtggagaaataggaatgcttttacactgttggtgggagtgtaattacttcaaccattgtggaagacagtgtggcaattccttaaggatctagaaccagaaataccatttgacccagcaatcccattactgggtatatacccaaaggattataaatcattctactataaagacacaagcacacgtatgtttactgaagcactattcacaatagcaaagactttgaaccaagccaaatacccattaatgattgactggataaagaaaatgtggcacatatacaccatggaatactatgcagccataaaaaagaatgagttcatgtcctttgcagggacatggatgaagctggaaaccatcattctcagcaaactaacacaggaacaaaaaaccaaacaccgcatgttctcactcataagtgggagttgaacaatgagaatatatgggcacagggaggggaacatcacacactggggcctgtcattgggtcgggggcaaggggagggatagcattaggagaaatacctaatgtagatgatgggttgatgggtgcagcagaccaccatagcacatgtatacctacgtaacaaacctgcacgttctgcacatgtatcccagaacttgaagtatagtaaaaaaaaa

SEQ ID NO: 107478 - DNA, 3825 bp, Homo sapiens
  Payload ID: 1094
  Gene Symbol: ASB4
  Gene Name: ankyrin repeat and SOCS box containing 4
  Uniprot ID: Q9Y574
  ENST ID: ENST00000325885
  CDS Start-End: 72-1352
cagcatgcgcctgtttgctcggtgctgttctctcgataaatcacaacaaagcttccagagggagaggaaggatggacggcaccactgcccctgtcactaaatctggagctgccaagttagttaagagaaatttccttgaggcgctaaagtccaatgacttcggaaaattgaaggctattttgatccaaaggcaaatagatgtggacactgtttttgaagtcgaagatgagaatatggttttggcatcttataaacaaggttactggttgcctagctataaattgaagtcttcctgggccacaggcctccatctctctgtcttgtttggccatgtggaatgtcttctggtgctactggaccacaatgctacaatcaactgtagacccaatgggaaaacccctcttcacgtggcttgtgaaatggccaatgtggattgtgttaagatcctctgtgatcgtggggcaaagctcaattgctactccttaagtggacacacagctttgcacttttgtacaactccaagttccattctctgtgccaagcaattggtttggagaggggcgaatgtgaacatgaagaccaacaaccaagatgaggagacgcccttgcacacggctgcccacttcggcctttcggagctggtggccttctacgtggaacacggggccatagtggacagcgtgaatgcccacatggagacccccctggccatcgccgcctactgggccctccgctttaaggagcaggagtacagcacggagcaccacctggtctgccgcatgctgcttgactacaaagccgaagtcaatgcccgagatgacgactttaaatctcccctccacaaggcagcctggaactgtgaccacgtgctcatgcacatgatgctggaagctggcgccgaagccaatctcatggatatcaacggctgtgctgccatccagtacgtgctgaaggtcacctccgtgcgccctgctgcccagcctgagatctgctaccagctcctgttgaaccatggggctgcccgaatataccctccacagttccataaggtgatacaggcctgccattcttgtcctaaagcaattgaagttgtagtcaatgcctatgaacacatcagatggaacacaaagtggagaagagctatccccgatgatgacttggagaaatactgggatttttaccactctctctttactgtgtgctgtaactctccaaggactctcatgcacttatcgagatgtgccattagaagaacattacacaacagatgccatagagcaattcctttgctttccctcccattgtcattgaaaaagtacttgcttttagagccagagggaattatttattaagccttatgagacagcagttcccaatcctaggtatttaagtggacttgctgggtagacacagtttgcctaaataaaatggtacttgggttgattataacacttcagggatttcaaaacactttacaaacactgccattaatcctagaatatcatggtatggggaaataaagaagaagtaaagttaaggaattttcaaagacaaggatgtattcagaatgtactgatagaacagtaataactaatatgtatagtgttcttactaagtacctgaaatatttttgtaaaacttcttatatcttatctcatctgaaatgggacccaggttttcttccaaccaatataattctgtgccttatcagtaatatgtttacattctcattcaaatggccatatagcaggctttgcaattggcctcttaaacttggtgttttcccccattaccccttagcagtaattactgtcactagttttgcaaactcctactccccaaaccaagctactcaagtttatttcagtgatgaaggcatatgagcatagtcaaaacaaggagatcttggagtcaaattagaaatgagaaagaaacatcagtccagttaatagtcaagaatggacatttgaaccagacatcactgagccagagactggagatgcaaagatgagtcccatgtgactcctgccttccaggatctcaccatttagcagaggatccagacatacacacagctaactgcaatataaagtgatggggcaagagtacaggtgcagactcacttttaatgcttatctttcaaagttgtgtttctgacatgaagtgtgatttttcttttaagcatgaagttaaagagtgaaggggttatgtaaagtagagggatctcctgctcttgttagggtatttttaaggttttttctagatagtgtgtctttttggtatggtttcttggttagtattaatactttcccagactccttgagaaaaatattgcacactcaatggctccagtgcatgtgacaaggaagcataggaaaatgggggaaagaaagtgtgtgaggggacctagttgattacttcggtctttttatgtagcagactgacatttcatagcattgtagctaagagataaggagcactttgctagtgacagtgggctacgaaaagtaaatagagagactttttgaaaatggtaaaagtttgagaaacttgggaagattagtgtgttaatcaggcttgctagttagtggattgcagaaagaaaaatgtaggtgattaagctctgggccttgtggtttatgaggtcaattttgcttcacttttttttttgttcttgctataatcacttttagataagctcattgctcttagcatcattttttagaggttaaagcagaagtaaattgcaaacaaatctgtcagttgtgagcagatttcttttatgtgtgtggttctccatcatatttaactttggatgctggagtgttgaatagagatgatgtcagatattccaataggctatcatttaatgttaactggcaatcacctaactggttaatctcagttgagactgtgcttctgaactgggattgtcttactcccagggctgtgtaagaaaagtcataggtggatacaataatctcttttaagtatcagttttactcagatattttggtggagatattttgtactaaaacaagatctatatcatggaatagaatgctgaatttgtatgaattattcacataaagcttgatctttcaaaaaatagtttgcttgcagcaagtggtattagaacacatcctaaaacagaatgaaatgatgtcttttgcagcaacttggatggagctggaggccattattctaagtgaagtaactcaggaatggaaagtgaaataccatatgttctcacttataagtgggagctaagcaatgaggatgcaaagacatccagagtgatataatggactatggggacttgcaaggggaagcttgagagtggggtgagggataaaagactacatattgggtacagtgtacactgctccagtgatgggtgcactaaaatctcaaaattcaccactaaagaatgtatccatgtaaccaaaaaccacctgtacccccaaaactattgaaatcttaaaatagtaataattaacaaagtaaaacaagatcacaccctggaacaattggaggattgcttgctgccctgcatcttaaggcgtattctagcagcaaagcttgtgatgcactgacttggggcaagtaaaactgatgctgaggacaaagggagaagatgttcctcgcccagggaaatgaaaacttttcttattcaccttgcttgtgcttaaacacttatgttcatctagtgtagaatacatggctacttgtttgtaatttttttattggtggaattaaagtaatttttccttatctttgaacttttatttagagaacttaaataaagctcttctgtctcctttc

SEQ ID NO: 107479 - DNA, 1547 bp, Homo sapiens
  Payload ID: 1094
  Gene Symbol: ASB4
  Gene Name: ankyrin repeat and SOCS box containing 4
  Uniprot ID: Q9Y574
  ENST ID: ENST00000428113
  CDS Start-End: 72-1121
cagcatgcgcctgtttgctcggtgctgttctctcgataaatcacaacaaagcttccagagggagaggaaggatggacggcaccactgcccctgtcactaaatctggagctgccaagttagttaagagaaatttccttgaggcgctaaagtccaatgacttcggaaaattgaaggctattttgatccaaaggcaaatagatgtggacactgtttttgaagtcgaagatgagaatatggttttggcatcttataaacaaggttactggttgcctagctataaattgaagtcttcctgggccacaggcctccatctctctgtcttgtttggccatgtggaatgtcttctggtgctactggaccacaatgctacaatcaactgtagacccaatgggaaaacccctcttcacgtggcttgtgaaatggccaatgtggattgtgttaagatcctctgtgatcgtggggcaaagctcaattgctactccttaagtggacacacagctttgcacttttgtacaactccaagttccattctctgtgccaagcaattggtttggagaggggcgaatgtgaacatgaagaccaacaaccaagatgaggagacgcccttgcacacggctgcccacttcggcctttcggagctggtggccttctacgtggaacacggggccatagtggacagcgtgaatgcccacatggagacccccctggccatcgccgcctactgggccctccgctttaaggagcaggagtacagcacggagcaccacctggtctgccgcatgctgcttgactacaaagccgaagtcaatgcccgagatgacgactttaaatctcccctccacaaggcagcctggaactgtgaccacgtgctcatgcacatgatgctggaagctggcgccgaagccaatctcatggatatcaacggctgtgctgccatccagtacgtgctgaaggtcacctccgtgcgccctgctgcccagcctgagatctgctaccagctcctgttgaaccatggggctgcccgaatataccctccacagttccataaggtgaggctctgcccagtggtcagcaggttgaggaagattcaaatggcagccttgtctgaaatctccaagtaactcaagcttgcttgaggcttgagtcctgggctaactacctctgatcctctttgaccttccattacatacctaatcctagctgtctcctcatctcatcctagtctaggtttgcttgaaattgggtgtgagagctagaatgagaaaaagagtagcaaataatttgttttgccttgtgtgaacaccagtgcactggtggcttcctgagggactgaggtaagtctgccagaaaggtgaatagtgttagacaggcatacatttgccatcttttaaacagaatgactgatctaaagatgactcagcctgctttgaaattagcttgtagccatgaaagggccacccgattttccagtttaatgaaagctaacgtttattaagtactaaaattatatttattatgtataataaataagcacactgttataagca

SEQ ID NO: 107480 - DNA, 3031 bp, Homo sapiens
  Payload ID: 1095
  Gene Symbol: ASB5
  Gene Name: ankyrin repeat and SOCS box containing 5
  Uniprot ID: Q8WWX0
  ENST ID: ENST00000296525
  CDS Start-End: 115-1104
accagctgatattttctttcctcaggaccagctgttcaggagcatcccggacgagagccaggcacatttgagacttggatccaactaaagaccgccgcagattcttctgcagcaatgtcggtgttagaagaaaatcggccgtttgctcaacaattatccaatgtctactttacaatactttcgctgttctgttttaagctttttgtgaaaatcagccttgccatcctcagtcatttctacatagtgaaaggcaaccgcaaggaagcggcaaggatagcagctgaattttatggagtaacccaaggacaaggttcctgggcagatcgatcaccactacatgaagcagcaagtcaaggtcgccttcttgctctgagaacattattatcacagggttataatgtaaatgcagtaaccttagaccatgtcaccccattgcacgaagcctgccttggagatcacgtggcatgtgccagaactctgctggaagcaggagctaatgtaaatgcaatcacgatagatggcgtgactccgttattcaacgcatgctcccaaggcagtccaagctgtgcagagctgcttctggagtatggtgccaaagcccagctggagtcatgtcttccatccccaacgcatgaggccgccagtaaaggtcaccatgaatgtcttgacatcctgatatcctggggcatagatgttgaccaagaaattcctcatttgggaactcctctctatgtagcttgtatgtcacagcaattccattgcatctggaagcttctttatgctggtgctgacgtacagaaaggcaaatattgggatactccattacatgctgctgctcaacaatccagcacagaaattgtaaacttactgctagaatttggagcagatatcaatgccaaaaatacagagcttctgcgacctatagatgtagctacgtctagcagtatggtggaaaggatattgcttcaacatgaagctaccccaagctctctttaccaactttgccgactctgtatccgaagctacataggaaaaccaagattgcaccttatcccacaactccagctgccaacgttactgaagaatttcttacagtatcgataaaacagtaaagtaattctaaataccttgaaaatcaaaatttctatttcttttgcttaaggaatagttcatataaaaatatgctaaagataggataaaagtgagtgtgagatcacccagggaagcagtaaaatatcaattttcattttaagtgtattagtactattgttttatcatttatgctgtctttggattatagcatatttataatatctattttttgttatttcaatataccctcctgtttattcaggaaaaaataataaagtcactatcttatgttttcttttggattggaaagaaataaagctcctagtaaagttattcatattatatttaaaaaggtctatgttcttcaactaatgggttaactttttaattttggctattgtaattggctaacttgttactgatattgacataaaatatgaatatggcttagcaaagagcaactaatatgttttctgaaaccaggatgatgctcattcaggaaatccactatgttgaatgtccactggtcattagaatgaacacttcataaagataaattgcccccctctcccccacttacccctggcaaaggactcacaagtcacttctcttctccatagtacatggacttgttacagaaaagtgataggatgaaaggtcaatactgccctctcaccctgagatatttagaacattacacaccttctaaggctatgttaagactgcctccttctcaggagtagcccctgatgatctcttatcaaggcggttatatgcatattactccagccttcttccatttcagaaattgtcaatagctagtgatacttggacttaagaaaatgaactatatatctaattaacaaacaggccctggatcatattccggggatcatcacatcagtccaaggatataaaaaaatggaagattaaaaactcaaattgtggagtttttaaagagtgggtgccacttaacacattggagaccttaaaaaatgtatatagagaacttaatcgcactgtttctaattctttttacacaaaacaagggcttagagtatactgtatttgcaagtaatagcaagagagtattgtataaaagaagatattactaagctagtcctctgcaagggtaaatactacgtttattctcttcagctttaactatacttgagtgcaataaaaaacttaataaaattttatgcctgttttgtaattcagggcctattatgattttagaaataagataatcaacgtacaactctttgtaaaacaaaagcaactttgggtgagttttatagatttattaaattttgataaagtaaatattttgaccactattttcaacaacccagggcttattttcttctgacttcttggctaacttccagactatgggaaaataaattatgattgtatgtgacccccagatcactaagcttgcattttggcagaaagaaaaaaaatcagttgtgatttaaaacgtttgttgagattttcaaacatagaaataaagctgtagcatattcactaaacaatgttttatatgaggatagggacctttaaatatgtgttttatagaatatctcacacatttgtaatggataacgtgcattaaaatggagttcttattatagaataacctggttaaacagatattaaagctgcttttgggtaaaacaggtttccaccagtattttccctgagctagaggagaagtcttagattttaagagtaatacaacccatctatcttattagtcttgtgccaataagagaagtaaatatcaaacattaaaatggtcactttacaatttcagtatgtctgtaccttgtatcttagcttgagtatgattgtcttatcaaagtagtgttctaactttaatgtattgtatgtttgttattatattaaagtgtgattattattcattggaataaaa

SEQ ID NO: 107481 - DNA, 1036 bp, Homo sapiens
  Payload ID: 1095
  Gene Symbol: ASB5
  Gene Name: ankyrin repeat and SOCS box containing 5
  Uniprot ID: Q8WWX0
  ENST ID: ENST00000512254
  CDS Start-End: 179-1009
actcactatcactaggccaacagatttaggtactcatgtttaagtaaagtagaataaaaaataaaatggagcaagaactgggctcagatatgactcctaaaggttgtatgagggcacggccttgtaaagaaacccaaagcagcacagcctctgagaactgaataatggccccttccagatgcctctttgcaatggtggaaatttggcagtaacaggttcctgggcagatcgatcaccactacatgaagcagcaagtcaaggtcgccttcttgctctgagaacattattatcacagggttataatgtaaatgcagtaaccttagaccatgtcaccccattgcacgaagcctgccttggagatcacgtggcatgtgccagaactctgctggaagcaggagctaatgtaaatgcaatcacgatagatggcgtgactccgttattcaacgcatgctcccaaggcagtccaagctgtgcagagctgcttctggagtatggtgccaaagcccagctggagtcatgtcttccatccccaacgcatgaggccgccagtaaaggtcaccatgaatgtcttgacatcctgatatcctggggcatagatgttgaccaagaaattcctcatttgggaactcctctctatgtagcttgtatgtcacagcaattccattgcatctggaagcttctttatgctggtgctgacgtacagaaaggcaaatattgggatactccattacatgctgctgctcaacaatccagcacagaaattgtaaacttactgctagaatttggagcagatatcaatgccaaaaatacagagcttctgcgacctatagatgtagctacgtctagcagtatggtggaaaggatattgcttcaacatgaagctaccccaagctctctttaccaactttgccgactctgtatccgaagctacataggaaaaccaagattgcaccttatcccacaactccagctgccaacgttactgaagaatttcttacagtatcgataaaacagtaaagtaattctaaataccttg

SEQ ID NO: 107482 - DNA, 603 bp, Homo sapiens
  Payload ID: 1095
  Gene Symbol: ASB5
  Gene Name: ankyrin repeat and SOCS box containing 5
  ENST ID: ENST00000505299
  CDS Start-End: 544-603
aatgctgaggttggtggacaaataaaggcttcactcgactttttattgatttgacattctggtactagataaaggaaagagcaaaacaaagtgcaggatcgagagaaaatcgattgcttgaaaaactgggtattttacttgctgcaagtcccgactgtgtcagctgatgagtttaacactatgacagcacagtcctcacctgcctgctcgctgctgtaatccccacactgttgtgtgccctatagcacctggcacacgggaagcgctcaagagatgtgtgtgaatgaaggagccacatcttgacttgcgacgcggagcagtaagctgcagttatttggtagcggtggaagaataaattctacctcctgcttgcctcgctgcagtggggatgagggagaggggactcagccagatgctgaattccccagacagctgacaggttcccaatttccaggaccagctgttcaggagcatcccggacgagagccaggcacatttgagacttggatccaactaaagaccgccgcagattcttctgcagcaatgtcggtgttagaagaaaatcggccgtttgctcaacaattatccaatgtctactttaca

SEQ ID NO: 107483 - DNA, 2330 bp, Homo sapiens
  Payload ID: 1096
  Gene Symbol: ASB6
  Gene Name: ankyrin repeat and SOCS box containing 6
  Uniprot ID: Q9NWX5
  ENST ID: ENST00000277458
  CDS Start-End: 167-1432
cttccggcgggggcgcggcttggactgaggagcggacccggccgggcgcaggggctggactggcggagcaggtggggtccgcggccgccggagcgttccggtcggcgtctgggcatctcggcctcggcagaaagcgcgacggccctgctgcgcggggcccgcggcgatgccgttcctgcacggcttccggaggatcatcttcgagtaccagccgctggtggatgcgattctgggctccctggggatccaggaccccgagcggcaggagtctctggaccggcccagttatgtcgccagcgaggagagccgaatccttgttctcactgagctgctggagaggaaagcccactctcccttttaccaggaaggcgtgagcaacgccctgctcaagatggctgagctggggctgacgcgggcggccgacgttctcttgcggcatggggccaatctcaactttgaagacccagtcacctactacacggccttgcacatcgccgtcctgcggaaccagccggacatggtggagctgctggtgcatcacggggccgacgttaatcggagggaccggatccacgagagtagccccttggacctggccagcgaggagcctgagcgcctgccctgcctgcagcgcctcctggaccttggagctgatgtcaatgccgctgacaagcatggaaaaactgctctgctccatgctctggccagcagcgacggggtgcagatccacaatactgagaacattcgtctcttactggaaggaggggcagacgtcaaggccaccaccaaagatggggacacagtgttcacctgcatcatcttcctgcttggtgagaccgtgggaggggacaaagaggaggcccagatgatcaaccgcttctgcttccaagtcacacggctgctgctggcacacggggccgaccccagcgagtgcccagcccacgagtccctcacccacatctgcctgaagagctttaaactgcacttccctctcctgcgcttcctcctggagtccggagccgcctacaactgctccctgcacggtgcgtcctgctggtctggctttcacatcatctttgagaggctctgttcccacccaggctgcacggaagacgagagccatgcggacctcctgcgcaaagctgagactgtcctggatctcatggtgaccaactctcagaaactccagctgcccgaaaacttcgatatccaccctgtgggcagcctggcggaaaagatccaggccctccacttctccttgaggcagctggagagctatcccccgcccctcaagcacctgtgccgtgtggccatccggctctaccttcagccgtggcctgtggatgtgaaggtcaaagccctgcctctgcccgacaggctgaagtggtacctccttagcgagcacagtggctccgtggaagatgacatctgataggtctcaggctacaggaacgggggacacgggcagctcaggtcagcctgttggtagatgctgggacagcattagaagagggtctttttgatctgggagatgagacgggatccttcatgagaaaagccagccaggtagagcctgaagctgtgatcactccagtggtgaagggtgcagctctggttcttccagagagactgcccccttccctccagcggcactccaagtcccccccatgttggaaagaggaacagggcttggattgatgtttataccctctgaattggagggcagtgccagggcatttgcagaagctgggaaggaccaagcctcagcaccccagggctgcggggctcttgttggccgcacgtggcagtgcagctggagaggaagcctggggcacgtcctgtgcggtgccaccaaggccccacccctgccccttttccttccaggttctgttactcacagaagtgtttctggtgggctctgcgggagaagacactaagggccccacaggcttgtttcatggtgttgcaagccaagctggcccctgcctgttcctgtagctctggggccaggtcagccgtggccccacctaccagaactgtgctctgctggcagctgtgcttttgccaaacccagggcctcagcgaccatgacttctgctaaaaagcaatcatgagtgcgtggctggggacagacctctctgaagtgtctcctgttgtgaggggctcactttggagccactgaagagccgactgtgccacccacttgcgagcctcagtcccttccaagctgcactggtcattgggaattgtgtaaacacctctggggataagctgaggtgactaaatgatatatttatattataagattaaactgactttcttggccttaa

SEQ ID NO: 107484 - DNA, 2180 bp, Homo sapiens
  Payload ID: 1096
  Gene Symbol: ASB6
  Gene Name: ankyrin repeat and SOCS box containing 6
  Uniprot ID: Q9NWX5
  ENST ID: ENST00000277459
  CDS Start-End: 126-719
ccgggcgcaggggctggactggcggagcaggtggggtccgcggccgccggagcgttccggtcggcgtctgggcatctcggcctcggcagaaagcgcgacggccctgctgcgcggggcccgcggcgatgccgttcctgcacggcttccggaggatcatcttcgagtaccagccgctggtggatgcgattctgggctccctggggatccaggaccccgagcggcaggagtctctggaccggcccagttatgtcgccagcgaggagagccgaatccttgttctcactgagctgctggagaggaaagcccactctcccttttaccaggaaggcgtgagcaacgccctgctcaagatggctgagctggggctgacgcgggcggccgacgttctcttgcggcatggggccaatctcaactttgaagacccagtcacctactacacggccttgcacatcgccgtcctgcggaaccagccggacatggtggagctgctggtgcatcacggggccgacgttaatcggagggaccgggaaaaactgctctgctccatgctctggccagcagcgacggggtgcagatccacaatactgagaacattcgtctcttactggaaggaggggcagacgtcaaggccaccaccaaagatggggacacagtgttcacctgcatcatcttcctgcttggtgagaccgtgggaggggacaaagaggaggcccagatgatcaaccgcttctgcttccaagtcacacggctgctgctggcacacggggccgaccccagcgagtgcccagcccacgagtccctcacccacatctgcctgaagagctttaaactgcacttccctctcctgcgcttcctcctggagtccggagccgcctacaactgctccctgcacggtgcgtcctgctggtctggctttcacatcatctttgagaggctctgttcccacccaggctgcacggaagacgagagccatgcggacctcctgcgcaaagctgagactgtcctggatctcatggtgaccaactctcagaaactccagctgcccgaaaacttcgatatccaccctgtgggcagcctggcggaaaagatccaggccctccacttctccttgaggcagctggagagctatcccccgcccctcaagcacctgtgccgtgtggccatccggctctaccttcagccgtggcctgtggatgtgaaggtcaaagccctgcctctgcccgacaggctgaagtggtacctccttagcgagcacagtggctccgtggaagatgacatctgataggtctcaggctacaggaacgggggacacgggcagctcaggtcagcctgttggtagatgctgggacagcattagaagagggtctttttgatctgggagatgagacgggatccttcatgagaaaagccagccaggtagagcctgaagctgtgatcactccagtggtgaagggtgcagctctggttcttccagagagactgcccccttccctccagcggcactccaagtcccccccatgttggaaagaggaacagggcttggattgatgtttataccctctgaattggagggcagtgccagggcatttgcagaagctgggaaggaccaagcctcagcaccccagggctgcggggctcttgttggccgcacgtggcagtgcagctggagaggaagcctggggcacgtcctgtgcggtgccaccaaggccccacccctgccccttttccttccaggttctgttactcacagaagtgtttctggtgggctctgcgggagaagacactaagggccccacaggcttgtttcatggtgttgcaagccaagctggcccctgcctgttcctgtagctctggggccaggtcagccgtggccccacctaccagaactgtgctctgctggcagctgtgcttttgccaaacccagggcctcagcgaccatgacttctgctaaaaagcaatcatgagtgcgtggctggggacagacctctctgaagtgtctcctgttgtgaggggctcactttggagccactgaagagccgactgtgccacccacttgcgagcctcagtcccttccaagctgcactggtcattgggaattgtgtaaacacctctggggataagctgaggtgactaaatgatatatttatattataagattaaactgactttcttggccttaa

SEQ ID NO: 107485 - DNA, 4535 bp, Homo sapiens
  Payload ID: 1096
  Gene Symbol: ASB6
  Gene Name: ankyrin repeat and SOCS box containing 6
  ENST ID: ENST00000450050
  CDS Start-End: 171-1349
gtcacttccggcgggggcgcggcttggactgaggagcggacccggccgggcgcaggggctggactggcggagcaggtggggtccgcggccgccggagcgttccggtcggcgtctgggcatctcggcctcggcagaaagcgcgacggccctgctgcgcggggcccgcggcgatgccgttcctgcacggcttccggaggatcatcttcgagtaccagccgctggtggatgcgattctgggctccctggggatccaggaccccgagcggcaggagtctctggaccggcccagttatgtcgccagcgaggagagccgaatccttgttctcactgagctgctggagaggaaagcccactctcccttttaccaggaaggcgtgagcaacgccctgctcaagatggctgagctggggctgacgcgggcggccgacgttctcttgcggcatggggccaatctcaactttgaagacccagtcacctactacacggccttgcacatcgccgtcctgcggaaccagccggacatggtggagctgctggtgcatcacggggccgacgttaatcggagggaccggatccacgagagtagccccttggacctggccagcgaggagcctgagcgcctgccctgcctgcagcgcctcctggaccttggagctgatgtcaatgccgctgacaagcatggggcagacgtcaaggccaccaccaaagatggggacacagtgttcacctgcatcatcttcctgcttggtgagaccgtgggaggggacaaagaggaggcccagatgatcaaccgcttctgcttccaagtcacacggctgctgctggcacacggggccgaccccagcgagtgcccagcccacgagtccctcacccacatctgcctgaagagctttaaactgcacttccctctcctgcgcttcctcctggagtccggagccgcctacaactgctccctgcacggtgcgtcctgctggtctggctttcacatcatctttgagaggctctgttcccacccaggctgcacggaagacgagagccatgcggacctcctgcgcaaagctgagactgtcctggatctcatggtgaccaactctcagaaactccagctgcccgaaaacttcgatatccaccctgtgggcagcctggcggaaaagatccaggccctccacttctccttgaggcagctggagagctatcccccgcccctcaagcacctgtgccgtgtggccatccggctctaccttcagccgtggcctgtggatgtgaaggtcaaagccctgcctctgcccgacaggctgaagtggtacctccttagcgagcacagtggctccgtggaagatgacatctgataggtctcaggctacaggaacgggggacacgggcagctcaggtcagcctgttggtagatgctgggacagcattagaagagggtctttttgatctgggagatgagacgggatccttcatgagaaaagccagccaggtagagcctgaagctgtgatcactccagtggtgaagggtgcagctctggttcttccagagagactgcccccttccctccagcggcactccaagtcccccccatgttggaaagaggaacagggcttggattgatgtttataccctctgaattggagggcagtgccagggcatttgcagaagctgggaaggaccaagcctcagcaccccagggctgcggggctcttgttggccgcacgtggcagtgcagctggagaggaagcctggggcacgtcctgtgcggtgccaccaaggccccacccctgccccttttccttccaggttctgttactcacagaagtgtttctggtgggctctgcgggagaagacactaagggccccacaggcttgtttcatggtgttgcaagccaagctggcccctgcctgttcctgtagctctggggccaggtcagccgtggccccacctaccagaactgtgctctgctggcagctgtgcttttgccaaacccagggcctcagcgaccatgacttctgctaaaaagcaatcatgagtgcgtggctggggacagacctctctgaagtgtctcctgttgtgaggggctcactttggagccactgaagagccgactgtgccacccacttgcgagcctcagtcccttccaagctgcactggtcattgggaattgtgtaaacacctctggggataagctgaggtgactaaatgatatatttatattataagattaaactgactttcttggccttaacaaggtccttatataaaatttccaccccgcccctccatagttcaggatagaggctcccacagcagccggtaaggaagtgggtggcaggtgtgaggggatgctgtgtttggggggttgtttccaagtccctgcaaagaagcaccactctagactggcaagggcctccacagtgtggaggtcccattttattatttttttttttcgagacactctgtcacccaggctggagtgcaatggtgcaatctcggctcactgcgacctctgcctcccaggttcaagcagttctcctgcctcagcctcctgagtagctggcattataggtgcccaccaccatgcctggctgatttttgtatttttagtagagacggggtttcgccatgttggtcaggctggtctcaaactcctgacctcaggtgattcgcctgcctcggcctttcaaagtgctgggattacagacatgagccactgtgcccggcccccattttattttagttttattttgagacagagtctcgctctgtcacctaggctggagtgcagtggcgcaatctcacctcactgcaagctctgcctcccgggctcaccccattctcctgcctcagcctcctgagtagctgggactacaggcgcccgccatcacgcctggctaattttttttttttttgtattttaagtagagacggggtttcacctgttagccaggatggtctcaatctcctgacctcgtgatctgcccgcctcggcctcccaaagtgctgggattacaggcgtgagccaccgcgcccagccccattttattttttactttaaatgcctgccaaggagcagcctcaagcccagagaagactgaggctacggggaacttcccttgctgcaggctgttgtaacactttaagggccccaggtctccactgccaagcaggacttggcacatgagcacccaccccacagcaccatcaggcagcacccatgggctccaccagcccagctctgtccctcccctaggtaaagatcacactgaagtcttcaagtccccagcaaccaagttgggggtggtttccttcctcttcaggcagccaggcccatggctggaaggccgggctggaggcccagggaatcggttactgatgtggccaccctattcccacatggggagcaccaggagccctggagccccttccacccaatcccatctcgcaggagagcagggtctgggctcctgcctcaccgctggttcagcagcaccctccccgccgggtcccaccttgccttttgaagaagagcccgcataatgagtggacggcagacagctatatttagtggtgcctcgacactcacgaaccgccagcgtggcgcctggatcttgcccagctgccagctccccccaccaggactgtggttcctcagtttctcctgccagccccggctcatctcagggcaaagctatagacatggtagatctcatcggggaggttctcctgcctctcctcggccaggaggctgaggcctgcactgcagatgatcctgcggaccacgtcaaggtcccggcacacgctgctgtccacgtcgtccagaatcacgccctcctgggccatgttgtctttgatgacgatgatgccgttggggcggaggctgcccttgcagcgccgcaggaactcggccaggtgctgatcggtgaggtggcctggggagggcagaggcaaggttaccagggcaccatgcaagcggatgtcggcactggatgggatgtacttctcagccccgctgagcccctcatttgtgcccagcattttgtgtgcacacatggcctcattggctctcagtcccgagagatttactaaaccccaattcatagaataggaaactgtggctcagaggtcatctacctaaagacacattaagccagaatttgacttgacgggatggcttacaagtcctgcctgatacctacacaccatgatgccccacccctgccaggcttggatcggaggagtgaacctgggctaagagtttggcattgcaggagctcccagagagactgccttccctacactagaagtccccacaaaggcttctgagaccacaaaatacaaggccagacctagagtgtccacagcaggcctgtgctgcccgcctcaggaggtggccgactgctgctagcggcctgccgccacgtcagcagcccagggcacagcgctcgaggtgtgctgttaggctaagagggtgcagggctagacacgaagcttaaactattcatcttattaaaaataaaacccttataaaactcc

SEQ ID NO: 107486 - DNA, 4985 bp, Homo sapiens
  Payload ID: 1097
  Gene Symbol: ASB7
  Gene Name: ankyrin repeat and SOCS box containing 7
  Uniprot ID: Q9H672
  ENST ID: ENST00000332783
  CDS Start-End: 786-1742
aggctcaggctccactgcgggcgctgattggttgttgaaggcttggtcccatcccagtgaccccaaagtgctgaagggagggggcgggggtggcccagtgcaaagtgcatcccgaaagccccctgtccggagaccccacggctggcacttcgggccccgtatgacctgggacctcgccgtcccgagacctcctgggtccctccgtagctggaagcctccggcccggagcgcggcagccccctgctccgagccctggaccgggactgcccccccacccgagccaggacttcctccctgcctccctgcacctctgccccaaggctgcccggcggccgggatcgccacctcctgccttctcggctgttcggatgttcgccgggctggggccgtgaggcaccgaggaggatcaggaacaccagggtccggccctgcctggggtatttcttcaatggagaagttggtgagtgtagaggaggctgaaaggaggaagagaagcagcagctgaggagacaggtttgagctggctgaagaagacgcgaaagcaggaagaggtctgcccacctatcagagaagcagaaggcacagtgcctctgaccagcatcgtctgtaaaggttaagaaggcttttttgctctgtagcctggacgtactttgaagcccctccccacgatgctgtacgtgcacaatggttactaggcaatccgtacatcaggagaagggacactcttccataaggctgatccccgtaacctaatgaatcctttgtaaaaagtggactcagctaggatgttacaccatcattgtcgaaggaaccctgagctccaggaagagttgcagattcaggccgcggtggctgctggggatgtccacacagtgcgaaagatgctagaacaaggctattccccgaatggccgagatgcgaatggctggactctgcttcatttctctgcagcaagaggaaaggaaagatgtgttcgggtttttctagaacacggagctgatcctacagttaaagacttaatcggaggcttcacggctcttcactatgcagccatgcatggccgggcccgcattgcacgcttgatgttagaatctgaatacaggagcgacatcattaatgcaaaaagcaatgacggctggactcccctccatgtggctgcccactacggcagggactcatttgtccggctcctcctggagttcaaggctgaggttgacccactcagtgataaaggtaccacaccgcttcagctcgccattatccgagagaggtcaagctgtgtgaaaatcctcctggaccacaatgccaacatcgacattcagaatggtttcctgttgcgatacgccgtgatcaaaagcaatcactcttattgccgaatgttccttcagagaggggcagacacaaacttgggtcgcttagaagacggacagactcctttacacttatctgcccttagggatgatgtgctgtgtgcacggatgttatataattacggagcagacacgaacacacggaactatgaaggacagaccccattggctgtttcaataagtatttctggaagtagtcgaccatgtttggatttcttacaagaagtcacaagacagcccagaaacttgcaggacctgtgccgaattaaaattcgacaatgtataggccttcaaaacctaaagctacttgatgaactaccaattgccaaggtcatgaaagactacttaaaacacaaatttgatgatatctgatatgccagaactgtgagcaagattaggagttctattctagatacttaaaaggctttttgccttgcacaaagtatatcctatgcaatttctgatttgctgtgaaatcagaaagcaggtatacacttttgggttttctgtttgtttggttggttttcattgtaggggagggattttttatatatatataaaaacacacaccacatgcttgaaggtcttaatttggtttcttggtccaagtttaagaggtccaagctttgtatacaatactgcatttagaaaaattgtcttttcttaaatgacacaagcaggtttagagtggagaatttaccctttccaaatttatggttccttggtaagcacggtattctaaaccagcagagcacttgttaacgtttggaggcacagtttcacccagggcgaccctgggttcttttggaaaatgccctaagaaatgtttgaagtaacgctgtcacctcattcatttttaatgagtacaaactggccgtttcaaactgttctttttcctaattaatgtagctttcggatgacataaatccagtatctctgcttatgacataaatccagtacctctgcttttcttttgctgtgctcttgtttttaacttattttttttttaacaactgtagtacactaccctgagacactgcatctcgatttctatctctagttagagttgtacttttaaaaaaattaacgggaaagaaaataactttgtgaagccagtgtattctgtttttaaaactgtgcctgcagtgcaatactccttctggtgtattttatccattatttcacttgctggtcgtcatttcacagccagctttgacatgcccgtgaggacaggagccgccgcttcagttgtcactgcagagccatcgtatgtcagttgcaatttccatctgaagctatgtctttgacttcactttaagcagaaaattttgtaccctggtggtcgagtcttcccttaaaaattgttaaatcatttggctttaatggttcaataatttggggtggcttcatggtgtttcttttcttcccagtttaaaaaaaaaactttttaagcgtaaaatctttaaggggtacacatttataagtctggctaatttctaatatgctaattaaacatttcccattttaaggttatatacagtgaggctcttcaggacaattattttctgggttgattgggcatatgtttgccgtgtaaacacggatatgataaagtgtcagtaacaatggaaaaggtcccagaggcattaggcatctaagaggatgccctcagaaacgtattctggcttgatttgtgttattaacttcagaagaaccttttcaaatgtcccagtatcgttcttagtgctttgggaaaaaatatttaacacactgttaataaatttgttatcagaagtttacaagacgaagggcttctctcgtctgaatttctagatttaagtcatgaagtgtaaaactgtttcacccagaagtgtaactaagcagaactaggagttttctctggcttcacctttttcagagccagcagtgctgttttctcaagcacagcgtttgctcttagactctgatctgcttgtgcctaagcattgcacaggtttccgaagacgggcagcttcagagaagaggattattcgggagattgctggtgtggcccatagactctttggcatagactctttcgcaggcagccactctgagtgtggccagttctataaccatccccaaactagctggagcctgatggataggaacgggtagtctgtcctcttccccataaaaatgttccaaaaagttatctccagagagagtcccttatgaagacagttgccaagctgtattctcattctttaaaccaatacccaggtcagggctagttcacactagcactgttagggacatggtgtggctagaaatgaattgagtgtgacttctccctacaaccccaggcccagggataggaggaggcagaggggtgcctggagtttctgcactctcatcagtgatgttcatgttacacttgcacaagggctgatttccacgtatgtgtgtgttaatttattcacttagtttcaaaagattttctctccccagccattcagaggtttccaaactaagccactgagtttgagtcagggaattccacgtaaaaagatcagattaaggtaaattctttgttctgtattgctgctgtgacttcagaaaaaaaaaattatgagagctcttcctggaattttgaaatttctatttaatgaagaagtgtataattccattatttattgtttgaggtttgatttatctggaagcttaaaaagaatgttttatttttgttgttaataaaatcccaatcacatttcacaataactaaaatgtctccaggtgggttactggtagatgatagtggtgacacctgcaggtctgcatttgaattggattcacagagaagcattccatggtcacataatgaatagggagaacagatattttcagaaaaatcaaccgattgttttttccagaaacagaacagaaaatgttcagaatattttcaaatttgtcagattcttttatgtttcctttgaaatttattatttaagcctattactaaacctttataaaaatatatttggcaaatacaccaaagaaaccagcttacaaaagattatgatcattaatgaactgcaaacctcatctttcgaaaacaaggttttgtgtttttttttttttgtaaatatttgtgtttataaatgtacagcagagtaagagtgttttttagattatttaattcccatatttctaaactatttactacacagtaatccatgcctgttagtttggaggacttgactgtctcattttttaattcattgtcagtcatgcttggaacagcatttccactagagaatccagcgttctggcagtagcaagagtacacatctggagcatgagggactctagcatgactcgtcagatgcacaccccaagagacaagaatgtgtagtttaatgaccggcgtggaccatacgaaattgagattctaactttcctgcaggagtgctcatgagcccagaatgtgattgggataaggccatttgcccacaaatttagctttcatgtaactcctagtgtgttatatcataatgtattttgttcttcctttttaatgtaagttttgctttgggtcaatttgaattaaaaaaatcaaatctgatttaaaacatg

SEQ ID NO: 107487 - DNA, 1694 bp, Homo sapiens
  Payload ID: 1097
  Gene Symbol: ASB7
  Gene Name: ankyrin repeat and SOCS box containing 7
  Uniprot ID: Q9H672
  ENST ID: ENST00000343276
  CDS Start-End: 711-1535
gggagggggcgggggtggcccagtgcaaagtgcatcccgaaagccccctgtccggagaccccacggctggcacttcgggccccgtatgacctgggacctcgccgtcccgagacctcctgggtccctccgtagctggaagcctccggcccggagcgcggcagccccctgctccgagccctggaccgggactgcccccccacccgagccaggacttcctccctgcctccctgcacctctgccccaaggctgcccggcggccgggatcgccacctcctgccttctcggctgttcggatgttcgccgggctggggccgtgaggcaccgaggaggatcaggaacaccagggtccggccctgcctggggtatttcttcaatggagaagttggtgagtgtagaggaggctgaaaggaggaagagaagcagcagctgaggagacaggtttgagctggctgaagaagacgcgaaagcaggaagaggtctgcccacctatcagagaagcagaaggcacagtgcctctgaccagcatcgtctgtaaaggttaagaaggcttttttgctctgtagcctggacgtactttgaagcccctccccacgatgctgtacgtgcacaatggttactaggcaatccgtacatcaggagaagggacactcttccataaggctgatccccgtaacctaatgaatcctttgtaaaaagtggactcagctaggatgttacaccatcattgtcgaaggaaccctgagctccaggaagagttgcagattcaggccgcggtggctgctggggatgtccacacagtgcgaaagatgctagaacaaggctattccccgaatggccgagatgcgaatggctggactctgcttcatttctctgcagcaagaggaaaggaaagatgtgttcgggtttttctagaacacggagctgatcctacagttaaagacttaatcggaggcttcacggctcttcactatgcagccatgcatggccgggcccgcattgcacgcttgatgttagaatctgaatacaggagcgacatcattaatgcaaaaagcaatgacggctggactcccctccatgtggctgcccactacggcagggactcatttgtccggctcctcctggagttcaaggctgaggttgacccactcagtgataaaggtaccacaccgcttcagctcgccattatccgagagaggtcaagctgtgtgaaaatcctcctggaccacaatgccaacatcgacattcagaatggtttcctgttgcgatacgccgtgatcaaaagcaatcactcttattgccgaatgttccttcagagaggggcagacacaaacttgggtcgcttagaagacggacagactcctttacacttatctgcccttagggatgatgtgctgtgtgcacggatgttatataattacggagcagacacgaacacacggaactatgaaggacagaccccattggctgtttcaataagtatttctggaagtagtcgaccatgtttggatttcttacaagaagtcacaagtatgtaatataattattactttattgcattttttaaaaatttgcatcttctgaggagcttaatgtgtttttgcaacttaagatgactagatattaatcattcctataaccactgcttggtaagcgatgcctcattcttctgaaataaaaaaaaaactttgactgta

SEQ ID NO: 107488 - DNA, 2133 bp, Homo sapiens
  Payload ID: 1097
  Gene Symbol: ASB7
  Gene Name: ankyrin repeat and SOCS box containing 7
  ENST ID: ENST00000558747
  CDS Start-End: 712-1062
agggagggggcgggggtggcccagtgcaaagtgcatcccgaaagccccctgtccggagaccccacggctggcacttcgggccccgtatgacctgggacctcgccgtcccgagacctcctgggtccctccgtagctggaagcctccggcccggagcgcggcagccccctgctccgagccctggaccgggactgcccccccacccgagccaggacttcctccctgcctccctgcacctctgccccaaggctgcccggcggccgggatcgccacctcctgccttctcggctgttcggatgttcgccgggctggggccgtgaggcaccgaggaggatcaggaacaccagggtccggccctgcctggggtatttcttcaatggagaagttggtgagtgtagaggaggctgaaaggaggaagagaagcagcagctgaggagacaggtttgagctggctgaagaagacgcgaaagcaggaagaggtctgcccacctatcagagaagcagaaggcacagtgcctctgaccagcatcgtctgtaaaggttaagaaggcttttttgctctgtagcctggacgtactttgaagcccctccccacgatgctgtacgtgcacaatggttactaggcaatccgtacatcaggagaagggacactcttccataaggctgatccccgtaacctaatgaatcctttgtaaaaagtggactcagctaggatgttacaccatcattgtcgaaggaaccctgagctccaggaagagttgcagattcaggccgcggtggctgctggggatgtccacacagtgcgaaagatgctagaacaaggctattccccgaatggccgagatgcgaatggctggactctgcttcatttctctgcagcaagaggaaaggaaagatgtgttcgggtttttctagaacacggaggacagcccagaaacttgcaggacctgtgccgaattaaaattcgacaatgtataggccttcaaaacctaaagctacttgatgaactaccaattgccaaggtcatgaaagactacttaaaacacaaatttgatgatatctgatatgccagaactgtgagcaagattaggagttctattctagatacttaaaaggctttttgccttgcacaaagtatatcctatgcaatttctgatttgctgtgaaatcagaaagcaggtatacacttttgggttttctgtttgtttggttggttttcattgtaggggagggattttttatatatatataaaaacacacaccacatgcttgaaggtcttaatttggtttcttggtccaagtttaagaggtccaagctttgtatacaatactgcatttagaaaaattgtcttttcttaaatgacacaagcaggtttagagtggagaatttaccctttccaaatttatggttccttggtaagcacggtattctaaaccagcagagcacttgttaacgtttggaggcacagtttcacccagggcgaccctgggttcttttggaaaatgccctaagaaatgtttgaagtaacgctgtcacctcattcatttttaatgagtacaaactggccgtttcaaactgttctttttcctaattaatgtagctttcggatgacataaatccagtatctctgcttatgacataaatccagtacctctgcttttcttttgctgtgctcttgtttttaacttattttttttttaacaactgtagtacactaccctgagacactgcatctcgatttctatctctagttagagttgtacttttaaaaaaattaacgggaaagaaaataactttgtgaagccagtgtattctgtttttaaaactgtgcctgcagtgcaatactccttctggtgtattttatccattatttcacttgctggtcgtcatttcacagccagctttgacatgcccgtgaggacaggagccgccgcttcagttgtcactgcagagccatcgtatgtcagttgcaatttccatctgaagctatgtctttgacttcactttaagcagaaaattttgtaccctggtggtcgagtcttcccttaaaaattgttaaatcatttggctttaatggttcaataatttggggtggcttcatggtgtttcttttcttcccagtttaaaaaaaaaa

SEQ ID NO: 107489 - DNA, 2615 bp, Homo sapiens
  Payload ID: 1098
  Gene Symbol: ASB8
  Gene Name: ankyrin repeat and SOCS box containing 8
  Uniprot ID: Q9H765
  ENST ID: ENST00000317697
  CDS Start-End: 171-1037
gaacactcatcagtgcgcaggcgcccatcttagttggtcttctagtccggtaaacagagggcctgcccccgacagcttctgcttccgggtcacgccttgacagcggctttcaacccccacctcagcccagcaattcggcagtttggagcatgtgaacaccttgagccttgatgagttccagtatgtggtatattatgcagagcattcagagcaaatactctctctccgagcgcttaatccgaacaattgctgccatccgttccttcccacatgataatgtagaggacctcatcagagggggagcagatgtgaactgcactcatggcacactgaagcccttgcactgtgcctgtatggtgtcagatgctgactgtgtggagttacttctggaaaaaggagccgaggtgaatgccctggatgggtataaccgaacagccctccactatgcagcagagaaagatgaggcttgtgtggaggtcctattggagtatggtgcaaaccccaatgctttggatggcaacagagataccccacttcactgggcagcctttaagaacaatgctgagtgtgtgcgggctctcctagagagcggggcctctgtcaatgccctggattacaacaatgatacaccgctcagctgggctgccatgaagggaaatcttgagagtgtcagcatccttctggattatggcgcagaggtcagagtcatcaacctaataggccagacacccatctcccgcctggtggctctgctagtcaggggacttggaacagagaaagaggactcttgctttgagctcctccacagagctgttggacactttgaattgaggaaaaatggcaccatgccacgagaggtggccagagacccgcagctatgtgaaaaactgactgttctgtgctcagctccaggaactctaaaaacactcgctcgctatgccgtgcgccgtagcctgggactccagtatctccccgatgcagtgaagggccttccactgccagcttctttgaaggaatacctgttacttttagaatagccggagaagatgtttgcaccatcgtgcaggcagctctgggtgaggttgtccctgcagtactccttgtcacagaaaacagaaaaacagttgttcctgttgtgtggtttatagatttcgaagcaacatgtcacaacaataacctccatagcacctccccttcccaaaccaaacaacccaacaaaaaaaatccctcacttttgttttctgtttattgcttacctggctttttatattgcattttgcaaaagaagaggtctccctcaatcctcccctttagggaaggagtcaacagtgtaactaaatttctctaggaagatggaaagtacttaaataatgtgtgtgtggttttcctttggggacgtggttaacggtccagaagaatcccttctagaaagcattttaggccagccatggtggctcacgtctgtaatcccaggactttgggaggctgaggcaggtggatcacctgaggtcaggagttcgagcccagcctgaccaatatgatgaaaccccgtctctactaaaaatacaaaaattagctgggcatggtggcatgcgcctgtaatcccagctactcaggaggctgagacagaagaatcgcttgaacctgtgaggcagaggttgcagtgagccaagatcgcgccattgcactccagcctggacaacaagagcaaaactgtctcaaaaaaaaaaaaaaaaaaaaaaaaccattttaattgatctgtgaaaaaacttaagaaaatcacaatttcagctaacagcaattgtgtcccaaagatgaagatactataacctcaaatggtgcagatccagaactgggctggatgacatccctactgtgccatgtcctggggcatttggaagggactggacctctttcccctcatcaaaggaaacagcagtctttgcctctttctgttggttgtgcccaagggctacagtagctctgaaataacaagagctctgtaataacagtaataaatagctctgaaataacagtcctaagaactcctaaagtcctgagaacttttcttgtaatgcagctttttctcttcctgagaaacagtgtgttctaatgggattcccaggcagttcctacacctacggtgtgtgttccagcagggaggagttatgggctgggctgccttttcccatgggtcttcattcccaatggaaagttcactctgcttagtttggaattatttttctttcagttgttctggaacctttgctttttattgatttatacaatacaattggtgggagggtggacttgggatgggagtgggaaaagcatgtaagagctccttttgtgatggtccatctacccaaaagagatctgctttagtgaacgatactctttcatttttctaaattagatcaagttgttattgattttagatgacttgtatgcaaatttgaaaaacttttttttttaaagctgattgggaactacaaacaatgaatggaatctactgacacagctaattggaaaacagatgtcttcttctgtcctattgatgctggtgtttaaaaaacatcacttaaaaaaaaagaataaatagttctaaaagcaag

SEQ ID NO: 107490 - DNA, 659 bp, Homo sapiens
  Payload ID: 1098
  Gene Symbol: ASB8
  Gene Name: ankyrin repeat and SOCS box containing 8
  ENST ID: ENST00000540782
  CDS Start-End: 141-401
atcttagttggtcttctagtccggtaaacagagggcctgcccccgacagcttctgcttccgggtcacgccttgacagcggctttcaacccccacctcagcccagcaattcgtttggagcatgtgaacaccttgagccttgatgagttccagtatgtggtatattatgcagagcattcagagcaaatactctctctccgagcgcttaatccgaacaattgctgccatccgttccttcccacatgataatgtagaggacctcatcagagggggagcagatgtgaactgcactcatggcacactgaagcccttgcactgtgcctgtatggtgtcagatgctgactgtgtggagttacttctggaaaaaggagccgaggtaatgtttttaacacattcacattaatgactcactaaaacttgagcttcatgttttcttagaatttctccccatcactcctccatctcttccctcctccagtctgaacttctaactcaaggtaatgttggcatagccaatattaaggaaaatgtaatggtaaatatataaaatgatctaaggatttcattcttttacctttctgtccccaccctgcttgcccccattgtatggtgctgatactctgcctttctttcttctccttaacttaagctgtcactggcc

SEQ ID NO: 107491 - DNA, 570 bp, Homo sapiens
  Payload ID: 1098
  Gene Symbol: ASB8
  Gene Name: ankyrin repeat and SOCS box containing 8
  ENST ID: ENST00000545791
  CDS Start-End: 229-570
ctgcttccgggtcacgccttgacagcggctttcaacccccacctcagcccagcaattcgtaccggacctaccgggattgctgcgatctgtttagagcccgtgcagaaagtgacaccgcacgtccttgcgtttcgtgcccttgccccccgccccctagcctcagcgagacagctgccgcgggccctcccgcagcaggcagtttggagcatgtgaacaccttgagccttgatgagttccagtatgtggtatattatgcagagcattcagagcaaatactctctctccgagcgcttaatccgaacaattgctgccatccgttccttcccacatgataatgtagaggacctcatcagagggggagcagatgtgaactgcactcatggcacactgaagcccttgcactgtgcctgtatggtgtcagatgctgactgtgtggagttacttctggaaaaaggagccgaggtgaatgccctggatgggtataaccgaacagccctccactatgcagcagagaaagatgaggcttgtgtggaggtcctattggagtatggtgcaaaccccaatgctttg

SEQ ID NO: 107492 - DNA, 538 bp, Homo sapiens
  Payload ID: 1098
  Gene Symbol: ASB8
  Gene Name: ankyrin repeat and SOCS box containing 8
  ENST ID: ENST00000539865
  CDS Start-End: 53-250
acctcagcccagcaattcggcagtttggagcatgtgaacaccttgagccttgatgagttccagtatgtggtatattatgcagagcattcagagcaaatactctctctccgagcgcttaatccgaacaattgctgccatccgttccttcccacatgataatgtagaggacctcatcagagggagcatggtggccatagaaagtggattgctggtccagctttcctgcctgatgataagggagcagatgtgaactgcactcatggcacactgaagcccttgcactgtgcctgtatggtgtcagatgctgactgtgtggagttacttctggaaaaaggagccgaggtgaatgccctggatgggtataaccgaacagccctccactatgcagcagagaaagatgaggcttgtgtggaggtcctattggagtatggtgcaaaccccaatgctttggatggcaacagagataccccacttcactgggcagcctttaagaacaatgctgagtgtgtgcgggctctcctagagagcggggcctctg

SEQ ID NO: 107493 - DNA, 923 bp, Homo sapiens
  Payload ID: 1098
  Gene Symbol: ASB8
  Gene Name: ankyrin repeat and SOCS box containing 8
  ENST ID: ENST00000536953
  CDS Start-End: 166-423
ctcatcagtgcgcaggcgcccatcttagttggtcttctagtccggtaaacagagggcctgcccccgacagcttctgcttccgggtcacgccttgacagcggctttcaacccccacctcagcccagcaattcggcagtttggagcatgtgaacaccttgagccttgatgagttccagtatgtggtatattatgcagagcattcagagcaaatactctctctccgagcgcttaatccgaacaattgctgccatccgttccttcccacatgataatgtagaggacctcatcagagggggagcagatgtgaactgcactcatggcacactgaagcccttgcactgtgcctgtatggtgtcagatgctgactgtgtggagttacttctggaaaaaggagccgaggactccctgggagttgcttgctgaccctcctgttcagagcactgcatagcaaaggtgaatgccctggatgggtataaccgaacagccctccactatgcagcagagaaagatgaggcttgtgtggaggtcctattggagtatggtgcaaaccccaatgctttggatggcaacagagataccccacttcactgggcagcctttaagaacaatgctgagtgtgtgcgggctctcctagagagcggggcctctgtcaatgccctggattacaacaatgatacaccgctcagctgggctgccatgaagggaaatcttgagagtgtcagcatccttctggattatggcgcagaggtcagagtcatcaacctaataggccagacacccatctcccgcctggtggctctgctagtcaggggacttggaacagagaaagaggactcttgctttgagctcctccacagagctgttggacactttgaattgaggaaaaatggcaccatgccacgagaggtggccagagacccgca

SEQ ID NO: 107494 - DNA, 580 bp, Homo sapiens
  Payload ID: 1098
  Gene Symbol: ASB8
  Gene Name: ankyrin repeat and SOCS box containing 8
  ENST ID: ENST00000539464
  CDS Start-End: 167-367
actcatcagtgcgcaggcgcccatcttagttggtcttctagtccggtaaacagagggcctgcccccgacagcttctgcttccgggtcacgccttgacagcggctttcaacccccacctcagcccagcaattcggcagtttggagcatgtgaacaccttgagccttgatgagttccagtatgtggtatattatgcagagcattcagagcaaatactctctctccgagcgcttaatccgaacaattgctgccatccgttccttcccacatgataatgtagaggacctcatcagagggagcatggtggccatagaaagtggattgctggtccagctttcctgcctgatgataaggtttccagtgctttgatacataagattgtcttcagtgatgtccagggagcagatgtgaactgcactcatggcacactgaagcccttgcactgtgcctgtatggtgtcagatgctgactgtgtggagttacttctggaaaaaggagccgaggtgaatgccctggatgggtataaccgaacagccctccactatgcagcagagaaagatgaggcttgtgtggaggtcctat

SEQ ID NO: 107495 - DNA, 657 bp, Homo sapiens
  Payload ID: 1098
  Gene Symbol: ASB8
  Gene Name: ankyrin repeat and SOCS box containing 8
  ENST ID: ENST00000535055
  CDS Start-End: 163-420
actcatcagtgcgcaggcgcccatcttagttggtcttctagtccggtaaacagagggcctgcccccgacagcttctgcttccgggtcacgccttgacagcggctttcaacccccacctcagcccagcaattcgtttggagcatgtgaacaccttgagccttgatgagttccagtatgtggtatattatgcagagcattcagagcaaatactctctctccgagcgcttaatccgaacaattgctgccatccgttccttcccacatgataatgtagaggacctcatcagagggggagcagatgtgaactgcactcatggcacactgaagcccttgcactgtgcctgtatggtgtcagatgctgactgtgtggagttacttctggaaaaaggagccgaggactccctgggagttgcttgctgaccctcctgttcagagcactgcatagcaaaggtgaatgccctggatgggtataaccgaacagccctccactatgcagcagagaaagatgaggcttgtgtggaggtcctattggagtatggtgcaaaccccaatgctttggatggcaacagagataccccacttcactgggcagcctttaagaacaatgctgagtgtgtgcgggctctcctagagagcggggcctctgtcaatgccctg

SEQ ID NO: 107496 - DNA, 561 bp, Homo sapiens
  Payload ID: 1098
  Gene Symbol: ASB8
  Gene Name: ankyrin repeat and SOCS box containing 8
  ENST ID: ENST00000540212
  CDS Start-End: 225-561
aattcggtgagtgcggtccttggagtgggtctacagccaggtttcctaacccaggtaccggacctaccgggattgctgcgatctgtttagagcccgtgcagaaagtgacaccgcacgtccttgcgtttcgtgcccttgccccccgccccctagcctcagcgagacagctgccgcgggccctcccgcagcaggcagtttggagcatgtgaacaccttgagccttgatgagttccagtatgtggtatattatgcagagcattcagagcaaatactctctctccgagcgcttaatccgaacaattgctgccatccgttccttcccacatgataatgtagaggacctcatcagagggggagcagatgtgaactgcactcatggcacactgaagcccttgcactgtgcctgtatggtgtcagatgctgactgtgtggagttacttctggaaaaaggagccgaggtgaatgccctggatgggtataaccgaacagccctccactatgcagcagagaaagatgaggcttgtgtggaggtcctattggagtatggtgcaaaccccaatg

SEQ ID NO: 107497 - DNA, 568 bp, Homo sapiens
  Payload ID: 1098
  Gene Symbol: ASB8
  Gene Name: ankyrin repeat and SOCS box containing 8
  ENST ID: ENST00000536071
  CDS Start-End: 91-378
gcttccgggtcacgccttgacagcggctttcaacccccacctcagcccagcaattcggcagtttggagcatgtgaacaccttgagccttgatgagttccagtatgtggtatattatgcagagcattcagagcaaatactctctctccgagcgcttaatccgaacaattgctgccatccgttccttcccacatgataatgtagaggacctcatcagagggggagcagatgtgaactgcactcatggcacactgaagcccttgcactgtgcctgtatggtgtcagatgctgactgtgtggagttacttctggaaaaaggagccgagctcctgtcatatcttcatctttatcaccaggactccctgggagttgcttgctgaccctcctgttcagagcactgcatagcaaaggtgaatgccctggatgggtataaccgaacagccctccactatgcagcagagaaagatgaggcttgtgtggaggtcctattggagtatggtgcaaaccccaatgctttggatggcaacagagataccccacttcactgggcagcctttaagaacaatgctg

SEQ ID NO: 107498 - DNA, 679 bp, Homo sapiens
  Payload ID: 1098
  Gene Symbol: ASB8
  Gene Name: ankyrin repeat and SOCS box containing 8
  ENST ID: ENST00000535988
  CDS Start-End: 163-423
atcagtgcgcaggcgcccatcttagttggtcttctagtccggtaaacagagggcctgcccccgacagcttctgcttccgggtcacgccttgacagcggctttcaacccccacctcagcccagcaattcggcagtttggagcatgtgaacaccttgagccttgatgagttccagtatgtggtatattatgcagagcattcagagcaaatactctctctccgagcgcttaatccgaacaattgctgccatccgttccttcccacatgataatgtagaggacctcatcagagggggagcagatgtgaactgcactcatggcacactgaagcccttgcactgtgcctgtatggtgtcagatgctgactgtgtggagttacttctggaaaaaggagccgaggtaatgtttttaacacattcacattaatgactcactaaaacttgagcttcatgttttcttagaatttctccccatcactcctccatctcttccctcctccagtctgaacttctaactcaaggtaatgttggcatagccaatattaaggaaaatgtaatggtaaatatataaaatgatctaaggatttcattcttttacctttctgtccccaccctgcttgcccccattgtatggtgctgatactctgcctttctttcttctccttaacttaagctgtcactgg

SEQ ID NO: 107499 - DNA, 559 bp, Homo sapiens
  Payload ID: 1098
  Gene Symbol: ASB8
  Gene Name: ankyrin repeat and SOCS box containing 8
  ENST ID: ENST00000540143
  CDS Start-End: 87-287
gcttccgggtcacgccttgacagcggctttcaacccccacctcagcccagcaattcgtttggagcatgtgaacaccttgagccttgatgagttccagtatgtggtatattatgcagagcattcagagcaaatactctctctccgagcgcttaatccgaacaattgctgccatccgttccttcccacatgataatgtagaggacctcatcagagggagcatggtggccatagaaagtggattgctggtccagctttcctgcctgatgataaggtttccagtgctttgatacataagattgtcttcagtgatgtccagggagcagatgtgaactgcactcatggcacactgaagcccttgcactgtgcctgtatggtgtcagatgctgactgtgtggagttacttctggaaaaaggagccgaggtgaatgccctggatgggtataaccgaacagccctccactatgcagcagagaaagatgaggcttgtgtggaggtcctattggagtatggtgcaaaccccaatgctttggatggcaacagagataccccacttcactgg

SEQ ID NO: 107500 - DNA, 800 bp, Homo sapiens
  Payload ID: 1098
  Gene Symbol: ASB8
  Gene Name: ankyrin repeat and SOCS box containing 8
  ENST ID: ENST00000539503
  CDS Start-End: 419-800
gaaattattggagaagcacaaaaggccatgggaaacatgtgcagagatcaagcagtttggctggtccagtcaagttccaggtcaaacatttgagagccaagggaccaagacccgaaccctgcggctgtggccgagaacgctgcactgagcctgcgcgcaaagcctctgagtaaaaggagaaagtaaccccctaactaggcctctggagggcgaaagctgctgcacaagtctgcgcaggcgcgccccgctgacgaacactcatcagtgcgcaggcgcccatcttagttggtcttctagtccggtaaacagagggcctgcccccgacagcttctgcttccgggtcacgccttgacagcggctttcaacccccacctcagcccagcaattcgtttggagcatgtgaacaccttgagccttgatgagttccagtatgtggtatattatgcagagcattcagagcaaatactctctctccgagcgcttaatccgaacaattgctgccatccgttccttcccacatgataatgtagaggacctcatcagagggggagcagatgtgaactgcactcatggcacactgaagcccttgcactgtgcctgtatggtgtcagatgctgactgtgtggagttacttctggaaaaaggagccgaggtgaatgccctggatgggtataaccgaacagccctccactatgcagcagagaaagatgaggcttgtgtggaggtcctattggagtatggtgcaaaccccaatgctttggatggcaacagagataccccacttcactgggcagccttta

SEQ ID NO: 107501 - DNA, 839 bp, Homo sapiens
  Payload ID: 1098
  Gene Symbol: ASB8
  Gene Name: ankyrin repeat and SOCS box containing 8
  ENST ID: ENST00000539528
  CDS Start-End: 74-331
gccttgacagcggctttcaacccccacctcagcccagcaattcgtttggagcatgtgaacaccttgagccttgatgagttccagtatgtggtatattatgcagagcattcagagcaaatactctctctccgagcgcttaatccgaacaattgctgccatccgttccttcccacatgataatgtagaggacctcatcagagggggagcagatgtgaactgcactcatggcacactgaagcccttgcactgtgcctgtatggtgtcagatgctgactgtgtggagttacttctggaaaaaggagccgaggactccctgggagttgcttgctgaccctcctgttcagagcactgcatagcaaaggtagtgggtaaccatgcaagcttctttgctgctgtcctgtcttcctctcagtagtctgtctactgtaatagttcctccctttttacaggtgaatgccctggatgggtataaccgaacagccctccactatgcagcagagaaagatgaggcttgtgtggaggtcctattggagtatggtgcaaaccccaatgctttggatggcaacagagataccccacttcactgggcagcctttaagaacaatgctgagtgtgtgcgggctctcctagagagcggggcctctgtcaatgccctggattacaacaatgatacaccgctcagctgggctgccatgaagggaaatcttgagagtgtcagcatccttctggattatggcgcagaggtcagagtcatcaacctaataggccagacacccatctcccgcctggtggctctgctagtcaggggacttggaacagagaaagaggactcttgcttt

SEQ ID NO: 107502 - DNA, 2610 bp, Homo sapiens
  Payload ID: 1098
  Gene Symbol: ASB8
  Gene Name: ankyrin repeat and SOCS box containing 8
  Uniprot ID: Q9H765
  ENST ID: ENST00000536549
  CDS Start-End: 167-1033
gaacactcatcagtgcgcaggcgcccatcttagttggtcttctagtccggtaaacagagggcctgcccccgacagcttctgcttccgggtcacgccttgacagcggctttcaacccccacctcagcccagcaattcgtttggagcatgtgaacaccttgagccttgatgagttccagtatgtggtatattatgcagagcattcagagcaaatactctctctccgagcgcttaatccgaacaattgctgccatccgttccttcccacatgataatgtagaggacctcatcagagggggagcagatgtgaactgcactcatggcacactgaagcccttgcactgtgcctgtatggtgtcagatgctgactgtgtggagttacttctggaaaaaggagccgaggtgaatgccctggatgggtataaccgaacagccctccactatgcagcagagaaagatgaggcttgtgtggaggtcctattggagtatggtgcaaaccccaatgctttggatggcaacagagataccccacttcactgggcagcctttaagaacaatgctgagtgtgtgcgggctctcctagagagcggggcctctgtcaatgccctggattacaacaatgatacaccgctcagctgggctgccatgaagggaaatcttgagagtgtcagcatccttctggattatggcgcagaggtcagagtcatcaacctaataggccagacacccatctcccgcctggtggctctgctagtcaggggacttggaacagagaaagaggactcttgctttgagctcctccacagagctgttggacactttgaattgaggaaaaatggcaccatgccacgagaggtggccagagacccgcagctatgtgaaaaactgactgttctgtgctcagctccaggaactctaaaaacactcgctcgctatgccgtgcgccgtagcctgggactccagtatctccccgatgcagtgaagggccttccactgccagcttctttgaaggaatacctgttacttttagaatagccggagaagatgtttgcaccatcgtgcaggcagctctgggtgaggttgtccctgcagtactccttgtcacagaaaacagaaaaacagttgttcctgttgtgtggtttatagatttcgaagcaacatgtcacaacaataacctccatagcacctccccttcccaaaccaaacaacccaacaaaaaaaatccctcacttttgttttctgtttattgcttacctggctttttatattgcattttgcaaaagaagaggtctccctcaatcctcccctttagggaaggagtcaacagtgtaactaaatttctctaggaagatggaaagtacttaaataatgtgtgtgtggttttcctttggggacgtggttaacggtccagaagaatcccttctagaaagcattttaggccagccatggtggctcacgtctgtaatcccaggactttgggaggctgaggcaggtggatcacctgaggtcaggagttcgagcccagcctgaccaatatgatgaaaccccgtctctactaaaaatacaaaaattagctgggcatggtggcatgcgcctgtaatcccagctactcaggaggctgagacagaagaatcgcttgaacctgtgaggcagaggttgcagtgagccaagatcgcgccattgcactccagcctggacaacaagagcaaaactgtctcaaaaaaaaaaaaaaaaaaaaaaaaccattttaattgatctgtgaaaaaacttaagaaaatcacaatttcagctaacagcaattgtgtcccaaagatgaagatactataacctcaaatggtgcagatccagaactgggctggatgacatccctactgtgccatgtcctggggcatttggaagggactggacctctttcccctcatcaaaggaaacagcagtctttgcctctttctgttggttgtgcccaagggctacagtagctctgaaataacaagagctctgtaataacagtaataaatagctctgaaataacagtcctaagaactcctaaagtcctgagaacttttcttgtaatgcagctttttctcttcctgagaaacagtgtgttctaatgggattcccaggcagttcctacacctacggtgtgtgttccagcagggaggagttatgggctgggctgccttttcccatgggtcttcattcccaatggaaagttcactctgcttagtttggaattatttttctttcagttgttctggaacctttgctttttattgatttatacaatacaattggtgggagggtggacttgggatgggagtgggaaaagcatgtaagagctccttttgtgatggtccatctacccaaaagagatctgctttagtgaacgatactctttcatttttctaaattagatcaagttgttattgattttagatgacttgtatgcaaatttgaaaaacttttttttttaaagctgattgggaactacaaacaatgaatggaatctactgacacagctaattggaaaacagatgtcttcttctgtcctattgatgctggtgtttaaaaaacatcacttaaaaaaaaagaataaatagttctaaaagcaa

SEQ ID NO: 107503 - DNA, 582 bp, Homo sapiens
  Payload ID: 1098
  Gene Symbol: ASB8
  Gene Name: ankyrin repeat and SOCS box containing 8
  ENST ID: ENST00000548228
  CDS Start-End: 430-582
tatattgcaaggcccagtgttataaataacttaatggtggtgctgatcataaaaaccacaaaaattcaaagaaggaaaataatgttttttgacctcttcagccttttaaaaatcctattccttgcctagtcgtttgtaaaccacacagagctccacgggggtcttagtacctcttggggaaatctcgtgctagactaggttagagtagaacatttgtgtccaggtttatccaactccctaggcaactattataatccaattccttatgattatggaaatagtattaatcactccttgaaatctgcttttagcattgggaaggcctcagagaagacctaaccctaaagacaggtgtgctcagtgatattgtatatgccgaaaacttctttgtttcaggcagtttggagcatgtgaacaccttgagccttgatgagttccagtatgtggtatattatgcagagcattcagagcaaatactctctctccgagcgcttaatccgaacaattgctgccatccgttccttcccacatgataatgtagaggacctcatcagagggggagcagatgtgaactgcactcat

SEQ ID NO: 107504 - DNA, 278 bp, Homo sapiens
  Payload ID: 1098
  Gene Symbol: ASB8
  Gene Name: ankyrin repeat and SOCS box containing 8
  ENST ID: ENST00000629941
  CDS Start-End: 78-278
gccttgacagcggctttcaacccccacctcagcccagcaattcggcagtttggagcatgtgaacaccttgagccttgatgagttccagtatgtggtatattatgcagagcattcagagcaaatactctctctccgagcgcttaatccgaacaattgctgccatccgttccttcccacatgataatgtagaggacctcatcagagggagcatggtggccatagaaagtggattgctggtccagctttcctgcctgatgataaggtttccagtgctttga

SEQ ID NO: 107505 - DNA, 1612 bp, Homo sapiens
  Payload ID: 1099
  Gene Symbol: ASB9
  Gene Name: ankyrin repeat and SOCS box containing 9
  Uniprot ID: Q96DX5
  ENST ID: ENST00000380483
  CDS Start-End: 178-936
gtagcactcagattaccctgcctgctctgtgctttgctgcagaccatttgaccagaacgtgtgcagctcagccagccacagaactggaatttttcaggagcagggggagcatggagtttggactttgctgagcaactgaagtggagcgcagagcttgctcgcttaggagagagcatcatggatggcaaacaagggggcatggatgggagcaagcccgcggggccaagggactttcctggcatcaggcttctttcaaacccattgatgggcgatgctgtgtctgattggtctcctatgcatgaagctgcaatccacggacatcagctgtctctgaggaacctcatcagccaggggtgggctgtgaacatcatcacggcagatcatgtttccccactccatgaagcctgtcttggaggtcatctctcttgtgtgaagattttattaaagcatggagctcaggtgaatggtgtgacagcagactggcacactccactgtttaatgcttgtgtcagcggcagctgggattgtgtgaatttgcttctgcagcacggagccagcgttcaacctgagagtgatctggcatcccccatccatgaagctgctaggagagcttatgggggcaacattgaccataagatcagccacctgggcactccactctatttggcttgtgaaaaccaacagagagcctgtgtcaagaagcttctggagtcaggagcggacgtgaaccaagggaaaggtcaggattccccacttcatgcagtggccaggacagccagtgaagagctggcctgcctgctcatggattttggagcggacacccaggccaagaatgctgaaggcaaacgtcctgtggagctggtgcctccagagagccccttggcccagctcttcttggagagagaaggtgcttctttgccaaaacctaagccctaatctgttgacatcccttggggctctagtagaagggcccccttctttgatgcagttatgccgccttagaattcggaagtgttttggaatccagcagcatcataagataaccaaactcgtcctcccagaggatctgaaacagtttctcctacatctttaaatgcatctagggaatggattcacaaacgatgtgaaaacattattgagtgttgtagccactagaattttaaaatcaagttggatttatagagtttgactagttttttcgattagatttgtatttgttataaacttgtttatggagtttgactaattttttctattcaatttgtatttgttaaactcaagccagggttgaaagacactgcatacgtttgtattattagttagaaggcatgaagacttttttccctgcatggagagtgtcataagttattgttttgcatatctactgcatgccaagcactttctgcatcatctaatttagccctcacagccactgggtcaagatgtccaattttccagagtaaggatagaggagtcaaattcaaatacaggttttctgacattaacttatgtgatgacttgatcgaggcaggcttttccagcatcactgtcctggttccatctctgctatatgggaatgaaaataaagaaacatatttcttggcttgtctaa

SEQ ID NO: 107506 - DNA, 1652 bp, Homo sapiens
  Payload ID: 1099
  Gene Symbol: ASB9
  Gene Name: ankyrin repeat and SOCS box containing 9
  Uniprot ID: Q96DX5
  ENST ID: ENST00000380485
  CDS Start-End: 188-976
ctgatcacaggtagcactcagattaccctgcctgctctgtgctttgctgcagaccatttgaccagaacgtgtgcagctcagccagccacagaactggaatttttcaggagcagggggagcatggagtttggactttgctgagcaactgaagtggagcgcagagcttgctcgcttaggagagagcatcatggatggcaaacaagggggcatggatgggagcaagcccgcggggccaagggactttcctggcatcaggcttctttcaaacccattgatgggcgatgctgtgtctgattggtctcctatgcatgaagctgcaatccacggacatcagctgtctctgaggaacctcatcagccaggggtgggctgtgaacatcatcacggcagatcatgtttccccactccatgaagcctgtcttggaggtcatctctcttgtgtgaagattttattaaagcatggagctcaggtgaatggtgtgacagcagactggcacactccactgtttaatgcttgtgtcagcggcagctgggattgtgtgaatttgcttctgcagcacggagccagcgttcaacctgagagtgatctggcatcccccatccatgaagctgctaggagaggccacgtggagtgtgtcaactctcttatagcttatgggggcaacattgaccataagatcagccacctgggcactccactctatttggcttgtgaaaaccaacagagagcctgtgtcaagaagcttctggagtcaggagcggacgtgaaccaagggaaaggtcaggattccccacttcatgcagtggccaggacagccagtgaagagctggcctgcctgctcatggattttggagcggacacccaggccaagaatgctgaaggcaaacgtcctgtggagctggtgcctccagagagccccttggcccagctcttcttggagagagaaggtgcttctttgccaaaacctaagccctaatctgttgacatcccttggggctctagtagaagggcccccttctttgatgcagttatgccgccttagaattcggaagtgttttggaatccagcagcatcataagataaccaaactcgtcctcccagaggatctgaaacagtttctcctacatctttaaatgcatctagggaatggattcacaaacgatgtgaaaacattattgagtgttgtagccactagaattttaaaatcaagttggatttatagagtttgactagttttttcgattagatttgtatttgttataaacttgtttatggagtttgactaattttttctattcaatttgtatttgttaaactcaagccagggttgaaagacactgcatacgtttgtattattagttagaaggcatgaagacttttttccctgcatggagagtgtcataagttattgttttgcatatctactgcatgccaagcactttctgcatcatctaatttagccctcacagccactgggtcaagatgtccaattttccagagtaaggatagaggagtcaaattcaaatacaggttttctgacattaacttatgtgatgacttgatcgaggcaggcttttccagcatcactgtcctggttccatctctgctatatgggaatgaaaataaagaaacatatttcttggcttgtctaa

SEQ ID NO: 107507 - DNA, 1678 bp, Homo sapiens
  Payload ID: 1099
  Gene Symbol: ASB9
  Gene Name: ankyrin repeat and SOCS box containing 9
  Uniprot ID: Q96DX5
  ENST ID: ENST00000380488
  CDS Start-End: 275-1159
gtggcctctggcgggcctccagccagttaggtaaaacgtgtgtgtgtgtgtgtgtgtgtgtgtgtgtacacgagcgcatgcctctctctgatcacaggtagcactcagattaccctgcctgctctgtgctttgctgcagaccatttgaccagaacgtgtgcagctcagccagccacagaactggaatttttcaggagcagggggagcatggagtttggactttgctgagcaactgaagtggagcgcagagcttgctcgcttaggagagagcatcatggatggcaaacaagggggcatggatgggagcaagcccgcggggccaagggactttcctggcatcaggcttctttcaaacccattgatgggcgatgctgtgtctgattggtctcctatgcatgaagctgcaatccacggacatcagctgtctctgaggaacctcatcagccaggggtgggctgtgaacatcatcacggcagatcatgtttccccactccatgaagcctgtcttggaggtcatctctcttgtgtgaagattttattaaagcatggagctcaggtgaatggtgtgacagcagactggcacactccactgtttaatgcttgtgtcagcggcagctgggattgtgtgaatttgcttctgcagcacggagccagcgttcaacctgagagtgatctggcatcccccatccatgaagctgctaggagaggccacgtggagtgtgtcaactctcttatagcttatgggggcaacattgaccataagatcagccacctgggcactccactctatttggcttgtgaaaaccaacagagagcctgtgtcaagaagcttctggagtcaggagcggacgtgaaccaagggaaaggtcaggattccccacttcatgcagtggccaggacagccagtgaagagctggcctgcctgctcatggattttggagcggacacccaggccaagaatgctgaaggcaaacgtcctgtggagctggtgcctccagagagccccttggcccagctcttcttggagagagaagggcccccttctttgatgcagttatgccgccttagaattcggaagtgttttggaatccagcagcatcataagataaccaaactcgtcctcccagaggatctgaaacagtttctcctacatctttaaatgcatctagggaatggattcacaaacgatgtgaaaacattattgagtgttgtagccactagaattttaaaatcaagttggatttatagagtttgactagttttttcgattagatttgtatttgttataaacttgtttatggagtttgactaattttttctattcaatttgtatttgttaaactcaagccagggttgaaagacactgcatacgtttgtattattagttagaaggcatgaagacttttttccctgcatggagagtgtcataagttattgttttgcatatctactgcatgccaagcactttctgcatcatctaatttagccctcacagccactgggtcaagatgtccaattttccagagtaaggatagaggagtcaaattcaaatacaggttttctgacattaacttatgtgatgacttgatcgaggcaggcttttccagcatcactgtcctggttccatctctgctatatgggaatgaaaataaagaaacatatttcttggcttgtctaa

SEQ ID NO: 107508 - DNA, 1947 bp, Homo sapiens
  Payload ID: 1099
  Gene Symbol: ASB9
  Gene Name: ankyrin repeat and SOCS box containing 9
  Uniprot ID: Q96DX5
  ENST ID: ENST00000546332
  CDS Start-End: 485-1273
gtacagatggccagggcgtgctgtgcatgttactgtgcaagcaattcagcagggctgctgcaaaaccagctttctcagctctgggtgctcgggcttgtctccataacaagctaccatgtaacaaacggatctcagcagggtgaacaacagttgcagaaagtgagctgtttccttcacccccaccctgctcccttcactctcaaaagttacaaactgagtttccttcctgataaactccaaggcttcctcactgattggtctcagtttgggaaaggacgtgacatcagcaacttcgcagacttagggctggagggttcttgtggcctctggcgggcctccagccagttagaccatttgaccagaacgtgtgcagctcagccagccacagaactggaatttttcaggagcagggggagcatggagtttggactttgctgagcaactgaagtggagcgcagagcttgctcgcttaggagagagcatcatggatggcaaacaagggggcatggatgggagcaagcccgcggggccaagggactttcctggcatcaggcttctttcaaacccattgatgggcgatgctgtgtctgattggtctcctatgcatgaagctgcaatccacggacatcagctgtctctgaggaacctcatcagccaggggtgggctgtgaacatcatcacggcagatcatgtttccccactccatgaagcctgtcttggaggtcatctctcttgtgtgaagattttattaaagcatggagctcaggtgaatggtgtgacagcagactggcacactccactgtttaatgcttgtgtcagcggcagctgggattgtgtgaatttgcttctgcagcacggagccagcgttcaacctgagagtgatctggcatcccccatccatgaagctgctaggagaggccacgtggagtgtgtcaactctcttatagcttatgggggcaacattgaccataagatcagccacctgggcactccactctatttggcttgtgaaaaccaacagagagcctgtgtcaagaagcttctggagtcaggagcggacgtgaaccaagggaaaggtcaggattccccacttcatgcagtggccaggacagccagtgaagagctggcctgcctgctcatggattttggagcggacacccaggccaagaatgctgaaggcaaacgtcctgtggagctggtgcctccagagagccccttggcccagctcttcttggagagagaaggtgcttctttgccaaaacctaagccctaatctgttgacatcccttggggctctagtagaagggcccccttctttgatgcagttatgccgccttagaattcggaagtgttttggaatccagcagcatcataagataaccaaactcgtcctcccagaggatctgaaacagtttctcctacatctttaaatgcatctagggaatggattcacaaacgatgtgaaaacattattgagtgttgtagccactagaattttaaaatcaagttggatttatagagtttgactagttttttcgattagatttgtatttgttataaacttgtttatggagtttgactaattttttctattcaatttgtatttgttaaactcaagccagggttgaaagacactgcatacgtttgtattattagttagaaggcatgaagacttttttccctgcatggagagtgtcataagttattgttttgcatatctactgcatgccaagcactttctgcatcatctaatttagccctcacagccactgggtcaagatgtccaattttccagagtaaggatagaggagtcaaattcaaatacaggttttctgacattaacttatgtgatgacttgatcgaggcaggcttttccagcatcactgtcctggttccatctctgctatatgggaatgaaaataaagaaacatatttcttggcttgtct

SEQ ID NO: 107509 - DNA, 633 bp, Homo sapiens
  Payload ID: 1099
  Gene Symbol: ASB9
  Gene Name: ankyrin repeat and SOCS box containing 9
  ENST ID: ENST00000477346
  CDS Start-End: 1-633
tgaagattttattaaagcatggagctcaggtgaatggtgtgacagcagactggcacactccactgtttaatgcttgtgtcagcggcagctgggattgtgtgaatttgcttctgcagcacggagccagcgttcaacctgagagtgatctggcatcccccatccatgaagctgctaggagaggccacgtggagtgtgtcaactctcttatagcttatgggggcaacattgaccataagatcagccacctgggcactccactctatttggcttgtgaaaaccaacagagagcctgtgtcaagaagcttctggagtcaggagcggacgtgaaccaagggaaaggtcaggattccccacttcatgcagtggccaggacagccagtgaagagctggcctgcctgctcatggattttggagcggacacccaggccaagaatgctgaaggcaaacgtcctgtggagctggtgcctccagagagccccttggcccagctcttcttggagagagaagacggagtcacgctctgtcgcccaggttggagtgcagtggcgcgatctcggctcattgcaacctccgcctcccggaattcagataagatgtgttccccaggccagcagtccttcatgctgcttgtca

SEQ ID NO: 107510 - DNA, 6347 bp, Homo sapiens
  Payload ID: 1100
  Gene Symbol: ANKS1A
  Gene Name: ankyrin repeat and sterile alpha motif domain containing 1A
  Uniprot ID: Q92625
  ENST ID: ENST00000360359
  CDS Start-End: 139-3543
tcgtggggaaaaggcagggagggggtggtgtccccagccggtttggggggtgcgttgcccggagacggaaagtttgggagcccgagcaggctcggctgcagcctcggggagggggtccagcgggtggcggccctggggatggggaaggagcaggagctgctggaggcggcccgcaccgggcacctcccggcggtggagaagctgctgtccgggaagcggctctcctcaggctttgggggcggcggcggcggtggctctgggggcggcggcggcggcagcggcggcggcggcggcggcctcggctcttccagccaccccctctccagtctgctcagcatgtggagagggccaaatgtgaactgtgttgacagcactggctacacacccctgcaccatgctgctttgaatggccataaggatgtggtcgaggttcttctgaggaacgatgcgctgaccaacgtggctgactcaaaaggctgctaccctctgcatttggcagcctggaaaggagatgcccagatagtgcggttgctcatccatcaagggccttcacacaccagagtcaatgaacagaacaatgacaacgagacagccctgcattgtgcagcgcagtatggccacacagaggtggtgaaggtgctcttagaggagctgacggaccccaccatgcgcaacaacaaattcgagacccctttggacctggcagcactgtacgggcgactggaggtggtgaaaatgctccttaatgcacaccccaacctcctgagctgcaacactaagaagcacacccctctgcacttggcagcaaggaatggccacaaagccgtggtccaggtcctcctcgatgctggcatggacagcaactaccagacggagatgggcagtgctttgcatgaggctgctttgtttggcaagaccgatgtggtgcaaatcctgctggctgcaggaactgacgtcaacataaaagataaccatggactgactgccctagacactgttcgggaactgccttctcaaaagagccagcaaatagcagcattaattgaagatcacatgactggaaaaagaagtacaaaagaagtagataaaacccccccaccccagccacctctcatctccagtatggactccatatcacagaagtctcagggtgacgtggagaaagcagtgactgaactgattatagattttgatgcaaatgctgaagaagagggtccctacgaagctctgtataatgccatctcctgccattcgttggacagcatggccagcgggcgatcatctgaccaagactccacgaacaaggaggctgaggcagcaggagtgaaacctgctggagtgaggcctagggaacgtccaccacctccagcaaagccaccgcccgatgaagaggaagaagaccacatagataagaagtattttcccttgacagcttctgaggttctgtccatgagacctaggattcatgggagtgcagcccgggaagaagacgaacacccttatgaactgttgttaacagcagagacaaagaaagtggtgttggtggatggaaaaacaaaagaccacaggcggagcagcagcagccggagccaggactctgcggaggggcaggacgggcaggtcccagagcagttctcaggcctcctccacggctcctccccggtgtgcgaggtggggcaggaccctttccagctgctctgtaccgctggccagagccatccagacgggtccccccagcagggcgcctgccacaaggccagcatgcagctggaggagacgggtgtgcatgctcctggagcctcccagcccagtgccctggaccagagcaagagagtgggctacctcacaggcctgcccaccaccaacagccgctcgcaccctgaaactttgactcacacagcatctccgcaccctggtggtgctgaggaaggagaccggagtggggccaggagccgagcgcctcccactagcaaacccaaagctgaactcaaactcagccgcagcttgtccaagtctgactctgatctcctgacctgctcacccacagaggacgctaccatggggagtcggagtgagtccttatccaactgcagcattgggaagaaaaggctagagaagtcaccctccttcgcctcggagtgggatgagattgagaaaatcatgagttctattggagaagggattgacttttctcaggaacggcagaagatctcaggtttacggacgctggagcagagtgtcggggagtggctggagtcgattgggctgcagcagtatgagagcaagttgcttctgaatggctttgacgatgtccacttcctggggtctaatgtgatggaagagcaggacctgcgggacatcggcatcagcgacccacagcaccggcggaagctgctccaggcggcacgctccctacccaaggtgaaggctctgggttatgacgggaacagcccccctagcgtgccctcctggctggactccctggggctgcaggactacgtccattccttcttgtcaagtggttacagctccattgacaccgtgaagaacctctgggagctagagctcgtcaatgtcctgaaggtccagctgctcggccatcgcaagcgcatcatcgcctccctcgcagacagaccgtacgaggagccgccccagaagccccccagattctcccagctgaggtgccaagatttgctctcccagacgtcatccccactgagtcagaatgattcctgcactgggcggtcggcagatctgctgctgcctccaggggacacaggcaggaggcgccatgacagtctccatgaccctgcggcaccctcccgagcggagcgcttcaggatccaggaggagcaccgtgaggccaagctgaccctgcggcccccgagcctggcagccccctacgccccagtgcagagttggcaacaccagccagagaaactcatcttcgagtcctgtggttatgaagccaattatctgggctccatgctgatcaaagatctgcgagggacagaatccacgcaagacgcctgtgccaagatgcggaaatctacggagcacatgaagaagatccccaccatcatcctgtccatcacatacaaaggtgtcaagttcatcgatgcctccaacaagaacgtcattgcagagcacgagatccggaacatttcctgtgcggcccaggacccggaggacctctgtacctttgcctacatcaccaaggacctgcagaccagccaccactattgccatgtgttcagcaccgtggatgtgaacctgacctacgagatcatcctgacgctggggcaggccttcgaagtggcctatcagttggccctgcaggcccagaagtccagggcgacgggcgcctctgcagctgagatgattgaaacaaaatcttccaaaccggtgcctaagcctcgggtcggcgtgaggaaatccgcactggaaccacctgatatggaccaagatgcccaatcccatgccagtgtctcctgggttgtggaccccaaaccagactctaagcggagcctcagcaccaactgagccactgaggaaccacactgtgctgcggaaacatagacgtgggggcataggctcccactgccaccaccgccatcgcctcacctgcagctctgaagacccaggcctcacctccgcctgcaggacctcctcttggccacttggcctgggcctgccaccaccacgtcctgcagaacgagccctgccttggctgtggagaagcactccaggccgctagcagatgggactggcattccagagggtcaagaagtgacttgttcagaacacattgtttttaacagaaaaaaaatctttttataaaatgaacttttaacacttggctcaaacctctaggtcatactgccaatctttagacaaatggccatggggcagaggacaggggagctgaggttggttcagaggccagcctgcatagcctctgtcctcaggacggaacttgggtgcagctcagtgggtcggaagagaaggcggtggcctgtgggtgaggggaacggagcaggctcaggcagaattgagtacggtgcgtctgcttttcaaacccaaccatatcagctgctgctctttatgaactgcccaacttcctgtccctttcaggggctagacacaggcttctcgtaagaacacagccttagaggcacctgagcaactcaaaggtttccggtccatttctggggttcccgatgggaaggttcagtggccaaatgaagataagtgtgcagtttctagtgctgggaagtcttagccagcaccagagcgccaggcctctccctggcctcttacctgtcagtgatcggagcactgccctgggctggccggcgccgtactgcctgcgttgtgtcagagaataggaaaagcagctttgtttggggcattaatgcttggagtggggtcagctaaggttgctacttgccaatttgtgatttgtctaatcagcctgtgtgattggggctcattttgattctctgaattatcggtttgacggttacacttggctgctgggcccatccctggcccccggtgtggaaaaggctaaataaggtgacagtgcatcgatgctcccccgcgtggcctttggggcaggctggcatcccggtgcgcctctgcttcttaagctttcctgctgctcgctttgtttttaaaagtaacttgggttgcattcttccctctggactagagtagaaatgcaggggaaactgctgtggatttgagaggcaaagttggctcagctgtgtgcccagttcctcctgtgggcactttagcaggctccgagctttcctggcataggtcaatcaggtcccaggatgaataatccaggcttcagcaacactcctctttcccagccagcaaaggctgtgaatttgaattctttgttggtatgtatgtgcagggagtactgttaggcacattcttaacccatgtggttggccagaaatcagaagtggggctgtgtctctgactggctagaggccaggccttgtgggtttctatctgctaagcacccagcaggttggggcctgggactcagctctctctgcggtagaggcaggccctcctccacttcttggtactaaacgaagatctcgacaccttgcagttttacttcatttcctgcccctttcagggcctgtgaggatgcccatgagctaccgctgtacagttctcggccccggctttcttccaagagttgaccaggaaccctaaagcatccagagtagactgcgctgccactgcgcacatgctggtgcccgtcttcctcctaaggggccaggccacatccaagtgggcctctgtcgggggcggggcggtaggtccgaaagaaaccgcagacactacgatgcactcctcaagctgtcttttgtgcttagatcatccataggtgtttcttctgcttgaagctgctatatcatctttatttattcagggtattttcatattggaagccttggctagtctgctctagctctgggttctgtttagagattggtttatttctgaatattcaagaaaggaaaatgactgggcctttctttcttttcttctcctctgggatgggtagtctccctttcctagaaaggttattataactttaaggacaggcttcaagtgggaaggcccctacttttgcacttctccaagtgcaggtcacaccaggggcagaccctgtcgctgcgtttctgaactgtgaaggagcccattcgggtgggagacttcagatgggctcagtacctgtcccagccacaggcttcttgtccacctcttctcccctgcccaccagctgctcagcgcataagaccttcccgacaggctctgcgtgtgcagctctctgcgtccctcctgggccctccagcgtcagacactaatgggagttcccgagatgctcgggtttgagcagggagcaggcagagctgcagtcagagacattagaaaaccagtctgaattgggtctgtctttgagatgcccaggccagcagaaagcagctcagaagtattgttgctcatggtgtggcaatggactgaactgtaatgaaaatgttatttaatctttgtctctgtattttgatacttgaatgactttcccttttgttttactgtatataaaattgttaatctgtctgattttgtctgaattataaacactttgaggtaccaaacataaccaatctgtgcaacaacatagactgacctcagtacccaagagagtgtaaatatttctgggcttccagctttggttttgttattttcataactgtacacaacttagaacagactgaattaataaatgagaagcgacatgaacgcagccttaa

SEQ ID NO: 107511 - DNA, 1675 bp, Homo sapiens
  Payload ID: 1101
  Gene Symbol: ANKS1B
  Gene Name: ankyrin repeat and sterile alpha motif domain containing 1B
  ENST ID: ENST00000333732
  CDS Start-End: 467-1336
gggcgcgcgcgcgggcccggggagctcgcggggagagcccggcgctcggcgcagcgcggcgcggccaagctccgcgcctctcccgcccttcctcggcgcgctcgccctcgcctcgccgctcgcattcgctgggggcgcccagaaagatgcacagaggcaacggctaggggagcggaggttcaagccacatgtctgcgtcctcgggggccagagcccgccagccctcgcggatcccggctcgcggccagcccgagcggctcgggttttaaaaatcaatttgattggccacaggaaacgtattttggcatctctgggagacaggctgcacgacgatcccccacagaagccccctcggtccatcaccctcagggaacccagtggtaatcacactcctcctcagttgtctccatcacttagccaaagcacttacaccactggtggctccctagacgttcctcacattatcatgcagggcgatgcaaggaggagaagaaatgaaaactactttgatgatattccccgatcaaaactggagaggcagatggctcagtcgtctgtctgtgaaatatggacgaatcagaacgcaggatttcctttctcagcgatccatcaggttcataatacaggagactggggagaaccttccattaccttgcgacctccgaatgaagccacagcctctaccccggtacagtactggcagcatcacccagaaaagcttatcttccagtcgtgtgattacaaagctttttatttaggttctatgctgataaaagagcttagggggacagaatcaacccaagatgcttgtgcaaaaatgcgggctaactgtcagaagtctacagagcaaatgaagaaggtccctactattattctttctgtctcatataaaggagtcaaatttattgatgcaacaaataagaacataattgctgagcatgaaattcgtaatatctcctgtgctgcccaggacccagaagacctctcaacatttgcctatatcacaaaagatttgaagtctaatcaccactactgtcatgtgtttactgcctttgatgtgaatttagcctatgaaatcatcctaaccctgggacaggcattcgaagtcgcttaccagctagcactacaagcaagaaaagggggacactcctccacacttccagaaagctttgaaaacaaaccctccaaacccatccccaagccccgcgttagcattcgcaagtccgtgatcgacccatctgagcaaaagactctggccaatctaccgtggattgtggagccgggccaagaagccaagaggggcattaataccaagtatgaaaccacgattttctgatactcgccgtcctcctgtcctcgcggtgccttgctcgccaagcggtcccggagcaggctttccttcgcgcctccgcgtccacccagcccaggaggaagactgctctgagcgtgcggccttgttacgggcgaaaggccactggccattcctggggaagttctttctgcaccagtgatggaaaacgcaagactttccagtcgcaacccctgagaggcgtgagttgagatgggttttccctgatgctcccgactcccctccccaccacctcccaaggtatttctgatgactccgccccagtacttgctttgcttcatttggggaaaataataccttttcttt

SEQ ID NO: 107512 - DNA, 996 bp, Homo sapiens
  Payload ID: 1101
  Gene Symbol: ANKS1B
  Gene Name: ankyrin repeat and sterile alpha motif domain containing 1B
  ENST ID: ENST00000329257
  CDS Start-End: 1-996
agcatctggcgaggccccaatgtgaactgcacagacagttcgggttacactgctttacaccacgcagccttaaatggacataaggacatagttctcaaactacttcagtatgaggcatcaacaaatgtagcagacaacaaagggtattttcctattcacctggctgcctggaaaggagatgtggaaattgtgaagattcttattcatcatggaccatcacattccagggtcaatgaacagaacaatgaaaatgaaactgccctacactgtgcagctcaatatggacactcagaagtagttgctgttctcctagaagagctcactgacccgacaattagaaatagcaagctggaaacacctttggacttggcggcactctacggacggcttagagtggtaaaaatgatcatcagtgcacatcctaacttaatgagctgcaacactcgcaagcacacgccacttcaccttgctgcgcgcaatggccacaaagcagtcgtgcaggtgctgctggaggcaggaatggatgtgagctgtcaaacagaaaaggggagtgcacttcatgaagcagctttgtttggaaaggtggatgttgtacgagttctgttagaaacaggaattgatgccaacataaaggatagcttaggtagaactgtcttggacattctgaaagaacatccatctcagaaatctctccagattgcaacactcttacaagagtatttagaaggcgtgggaagatctacagtcctcgaagagcctgtacaggaagatgcaacacaagaaacacacatttcatctcctgttgagtctccttcccaaaagaccaaaagtgaaaccgtcactggagaattatcaaaactcttggatgaaataaaactctgtcaagaaaaggattattcgtttgaagacttgtgccacacaatatcagaccactacttagataatttgagcaagatttcagaggaagaacttgggaaaaatggaagccagagtgta

SEQ ID NO: 107513 - DNA, 2115 bp, Homo sapiens
  Payload ID: 1101
  Gene Symbol: ANKS1B
  Gene Name: ankyrin repeat and sterile alpha motif domain containing 1B
  Uniprot ID: Q7Z6G8
  ENST ID: ENST00000341752
  CDS Start-End: 475-1239
gcagtggggggcgcgcgcgcgggcccggggagctcgcggggagagcccggcgctcggcgcagcgcggcgcggccaagctccgcgcctctcccgcccttcctcggcgcgctcgccctcgcctcgccgctcgcattcgctgggggcgcccagaaagatgcacagaggcaacggctaggggagcggaggttcaagccacatgtctgcgtcctcgggggccagagcccgccagccctcgcggatcccggctcgcggccagcccgagcggctcgggttttaaaaatcaatttgattggccacaggaaacgtattttggcatctctgggagacaggctgcacgacgatcccccacagaagccccctcggtccatcaccctcagggaacccagtggtaatcacactcctcctcagttgtctccatcacttagccaaagcacttacaccactggtggctccctagacgttcctcacattatcatgcagggcgatgcaaggaggagaagaaatgaaaactactttgatgatattccccgatcaaaactggagaggcagatggctcagacaggagactggggagaaccttccattaccttgcgacctccgaatgaagccacagcctctaccccggtacagtactggcagcatcacccagaaaagcttatcttccagtcgtgtgattacaaagctttttatttaggttctatgctgataaaagagcttagggggacagaatcaacccaagatgcttgtgcaaaaatgcgggctaactgtcagaagtctacagagcaaatgaagaaggtccctactattattctttctgtctcatataaaggagtcaaatttattgatgcaacaaataagaacataattgctgagcatgaaattcgtaatatctcctgtgctgcccaggacccagaagacctctcaacatttgcctatatcacaaaagatttgaagtctaatcaccactactgtcatgtgtttactgcctttgatgtgaatttagcctatgaaatcatcctaaccctgggacaggcattcgaagtcgcttaccagctagcactacaagcaagaaaagggggacactcctccacacttccagaaagctttgaaaacaaaccctccaaacccatccccaagccccgcgttagcattcgcaagtccgtggatcttcttcatgccagccataccgggcaggaaccatcagagagacacactgaggaggcactcagaaaattttgatagaattgaatttacatatagctgataaagcctaaatagaaaggttgatgtatttagcttgaatccttcactttagtggtctaatcaacagataaatgacaagcaaagaatgaaacaatccaaaaatgtttttcaaaacaattttgtgaattttatttttacaaaaattttttaaattcatattttaaaatgtataccaaggcaaaaaaatcatataagctatatcataaatacaagagtttcaaaacatacaagagacatataatgtaaaaaaaaattatatatatgaagtccaatgtaatttataatacaaaaaaatacagcaagggaaaatgctttagaaatgctcatctgcaaactacaaaacaaaatcctcctcttgaccgactgcatgaactgccatgaaatttgcagctccatcatactaggtatctcttctttcttcatgttaccttgtctttcttcccatttttcttttaagacagggtcttgctatgtcacccaggctggactcaaactccagggctcaaggaatcctcctgtcttagcctcccaaggagctgggattacaggcacgtgccaccgcacctggctcctaatttctttttaagacaagggccattcaaggctttttaaaacctgatgtgtgttgttatactttataacagtcagtggcttttaattccaaaaggtaatactttatactctgcctacatgagatgagcccctaacagtgtgtacaaataaaattatgatttgggtattctaaggagacataccatttacagaaatttcttttgataaaattaaggtttcacttttcacatttgcttaaatcacagtaagcctgtaaactagctccttgacccaccattt

SEQ ID NO: 107514 - DNA, 2973 bp, Homo sapiens
  Payload ID: 1101
  Gene Symbol: ANKS1B
  Gene Name: ankyrin repeat and sterile alpha motif domain containing 1B
  Uniprot ID: Q7Z6G8
  ENST ID: ENST00000549025
  CDS Start-End: 135-1208
gggtaatgaaggggagcgagcgagggggagcaaggagcatggagctgcatactgatgagtgacccagatgccctgtccaaacagtgggacaatggttggaaagcattgggctacctcagtacgagaaccacctgatggctaatggatttgacaatgtgcagtttatgggaagcaatgttatggaagatcaggatttgttggaaattggaatccttaattctgggcacagacaaagaattctacaggcaatccagctccttccaaagatgagacccattgggcatgatggctaccatcccacctctgtagctgagtggctggattccattgaactgggcgactacaccaaagcctttctaattaatggctacacttcgatggacctgttgaaaaaaatctgggaggttgaacttattaatcagtcgtctgtctgtgaaatatggacgaatcagaacgcaggatttcctttctcagcgatccatcaggttcataatacaggagactggggagaaccttccattaccttgcgacctccgaatgaagccacagcctctaccccggtacagtactggcagcatcacccagaaaagcttatcttccagtcgtgtgattacaaagctttttatttaggttctatgctgataaaagagcttagggggacagaatcaacccaagatgcttgtgcaaaaatgcgggctaactgtcagaagtctacagagcaaatgaagaaggtccctactattattctttctgtctcatataaaggagtcaaatttattgatgcaacaaataagaacataattgctgagcatgaaattcgtaatatctcctgtgctgcccaggacccagaagacctctcaacatttgcctatatcacaaaagatttgaagtctaatcaccactactgtcatgtgtttactgcctttgatgtgaatttagcctatgaaatcatcctaaccctgggacaggcattcgaagtcgcttaccagctagcactacaagcaagaaaagggggacactcctccacacttccagaaagctttgaaaacaaaccctccaaacccatccccaagccccgcgttagcattcgcaagtccgtgatcgacccatctgagcaaaagactctggccaatctaccgtggattgtggagccgggccaagaagccaagaggggcattaataccaagtatgaaaccacgattttctgatactcgccgtcctcctgtcctcgcggtgccttgctcgccaagcggtcccggagcaggctttccttcgcgcctccgcgtccacccagcccaggaggaagactgctctgagcgtgcggccttgttacgggcgaaaggccactggccattcctggggaagttctttctgcaccagtgatggaaaacgcaagactttccagtcgcaacccctgagaggcgtgagttgagatgggttttccctgatgctcccgactcccctccccaccacctcccaaggtatttctgatgactccgccccagtacttgctttgcttcatttggggaaaataataccttttctttaaaaaaaaaaaaaaaaaaaaaaaagtaaaggggatctctaatactgcctaaaagtatgctttcactgtcagcagttttaaaggtgaaatcagagcagcactacccctcccacctccaaagcatctgtaaaatcattctatcattgagtatcgtttaatgcaaaaggacaaaaacaactcccgtgatatgattgccaggagattctgtttccccatttctatatttgtggattttatatgtaatcacctatgtcagagaaagaaaacctttcaaccaaatgattggttcaaaaggaaagaatgattcaaagcagaggaatttattatgcacagcaaaatgtgtcttgtattaaatatttttattaaaagaatgtttcattaatgcattgataagaaaactaggttagttgcgagggatgtttctggtttcatttcaaataattaaatttctactgctactaccaagaggactggctcagtggtggcaaaatactggtgatgctccctagagcaggaggcccggaagtgctgacgcagccatcagcctgccaagattgttttttaatcttcacagtgttttaaagaacatgttaaaaaaaaaaaaatctagtgctcctgctgtcaagatttctgtcatggaaaccttgtttgagaaaggtgttaataaaattctattgcaaaaatttctttttctagaaaaaataaatacaaaaaaaaaaaagaagaaattccaaagtaataaaacttttcttgagacaaacaaaaaaaaagtttgcttactatttgattaaataaaatttacttacatttctttaaggtattttaattttttaatgtctctgtggagtatttgtatgataccataatgtatatttatgtagaatcaaattatataaacagtaccaatatcattatagaaaaaaataacattttaatgtatattgttctaacaatcatattgtgaatcattttgaagttcattatagcgatattgataaattgtggaattgtcttaatgtttttttattaactgacattattttaaacctaactgagatgatcagttacattcatcagttggtgagttttgaagaataactacattttatttcaaactaacaaatgtatacggttttagttcagtgttgaagaattttaatacaatattaaattacttgaactgaacagttccttgtatatattttgcctattcactgttgatatgtatgtagcaaaatgagagttaaataacactaaaatatggtaccaggaggcaattgtataggagcaaagttaataggagctttgctgaaacagaagcatatgtgtaaataagcttgggcttccagttataaattttgtaatttttgtcattatttatatcctataaaaaaagcacacaaaaataaaacagaagttgtacagca

SEQ ID NO: 107515 - DNA, 1383 bp, Homo sapiens
  Payload ID: 1101
  Gene Symbol: ANKS1B
  Gene Name: ankyrin repeat and sterile alpha motif domain containing 1B
  Uniprot ID: Q7Z6G8
  ENST ID: ENST00000546960
  CDS Start-End: 1-1383
atgatgtggcaatgccacctctcagcccaggactaccgctattaccccgtggacggctactccctgcttaaacgcttccctcttcatcctcttacaggacccagatgccctgtccaaacagtgggacaatggttggaaagcattgggctacctcagtacgagaaccacctgatggctaatggatttgacaatgtgcagtttatgggaagcaatgttatggaagatcaggatttgttggaaattggaatccttaattctgggcacagacaaagaattctacaggcaatccagctccttccaaagatgagacccattgggcatgatggctaccatcccacctctgtagctgagtggctggattccattgaactgggcgactacaccaaagcctttctaattaatggctacacttcgatggacctgttgaaaaaaatctgggaggttgaacttattaatgttttaaaaatcaatttgattggccacaggaaacgtattttggcatctctgggagacaggctgcacgacgatcccccacagaagccccctcggtccatcaccctcagggaacccagtggtaatcacactcctcctcagttgtctccatcacttagccaaagcacttacaccactggtggctccctagacgttcctcacattatcatgcagggcgatgcaaggaggagaagaaatgaaaactactttgatgatattccccgatcaaaactggagaggcagatggctcagacaggagactggggagaaccttccattaccttgcgacctccgaatgaagccacagcctctaccccggtacagtactggcagcatcacccagaaaagcttatcttccagtcgtgtgattacaaagctttttatttaggttctatgctgataaaagagcttagggggacagaatcaacccaagatgcttgtgcaaaaatgcgggctaactgtcagaagtctacagagcaaatgaagaaggtccctactattattctttctgtctcatataaaggagtcaaatttattgatgcaacaaataagaacataattgctgagcatgaaattcgtaatatctcctgtgctgcccaggacccagaagacctctcaacatttgcctatatcacaaaagatttgaagtctaatcaccactactgtcatgtgtttactgcctttgatgtgaatttagcctatgaaatcatcctaaccctgggacaggcattcgaagtcgcttaccagctagcactacaagcaagaaaagggggacactcctccacacttccagaaagctttgaaaacaaaccctccaaacccatccccaagccccgcgttagcattcgcaagtccgtgcctttctgttttaaagcagatcgacccatctga

SEQ ID NO: 107516 - DNA, 3372 bp, Homo sapiens
  Payload ID: 1101
  Gene Symbol: ANKS1B
  Gene Name: ankyrin repeat and sterile alpha motif domain containing 1B
  Uniprot ID: Q7Z6G8
  ENST ID: ENST00000550693
  CDS Start-End: 255-1607
ctccaacaatcacatagaacgcagaccagcccaagctgacagcttgatatgccttcttctgctgcctggttttgggggctgtatgacgtactggtcggtagtaaagattaatatgtaagaaatgtggagctaggatcaagtcatactccacagcctgcctggcaaactatgttttacttctgactttgctctctcgctgagaacattaatctgtcaagctggcgggctcctttgatagcaactttcccaggggcatgatgtggcaatgccacctctcagcccaggactaccgctattaccccgtggacggctactccctgcttaaacgcttccctcttcatcctcttacaggacccagatgccctgtccaaacagtgggacaatggttggaaagcattgggctacctcagtacgagaaccacctgatggctaatggatttgacaatgtgcagtttatgggaagcaatgttatggaagatcaggatttgttggaaattggaatccttaattctgggcacagacaaagaattctacaggcaatccagctccttccaaagatgagacccattgggcatgatggctaccatcccacctctgtagctgagtggctggattccattgaactgggcgactacaccaaagcctttctaattaatggctacacttcgatggacctgttgaaaaaaatctgggaggttgaacttattaatgttttaaaaatcaatttgattggccacaggaaacgtattttggcatctctgggagacaggctgcacgacgatcccccacagaagccccctcggtccatcaccctcaggtcgtctgtctgtgaaatatggacgaatcagaacgcaggatttcctttctcagcgatccatcaggttcataatacaggagactggggagaaccttccattaccttgcgacctccgaatgaagccacagcctctaccccggtacagtactggcagcatcacccagaaaagcttatcttccagtcgtgtgattacaaagctttttatttaggttctatgctgataaaagagcttagggggacagaatcaacccaagatgcttgtgcaaaaatgcgggctaactgtcagaagtctacagagcaaatgaagaaggtccctactattattctttctgtctcatataaaggagtcaaatttattgatgcaacaaataagaacataattgctgagcatgaaattcgtaatatctcctgtgctgcccaggacccagaagacctctcaacatttgcctatatcacaaaagatttgaagtctaatcaccactactgtcatgtgtttactgcctttgatgtgaatttagcctatgaaatcatcctaaccctgggacaggcattcgaagtcgcttaccagctagcactacaagcaagaaaagggggacactcctccacacttccagaaagctttgaaaacaaaccctccaaacccatccccaagccccgcgttagcattcgcaagtccgtgcagatcgacccatctgagcaaaagactctggccaatctaccgtggattgtggagccgggccaagaagccaagaggggcattaataccaagtatgaaaccacgattttctgatactcgccgtcctcctgtcctcgcggtgccttgctcgccaagcggtcccggagcaggctttccttcgcgcctccgcgtccacccagcccaggaggaagactgctctgagcgtgcggccttgttacgggcgaaaggccactggccattcctggggaagttctttctgcaccagtgatggaaaacgcaagactttccagtcgcaacccctgagaggcgtgagttgagatgggttttccctgatgctcccgactcccctccccaccacctcccaaggtatttctgatgactccgccccagtacttgctttgcttcatttggggaaaataataccttttctttaaaaaaaaaaaaaaaaaaaaaaaagtaaaggggatctctaatactgcctaaaagtatgctttcactgtcagcagttttaaaggtgaaatcagagcagcactacccctcccacctccaaagcatctgtaaaatcattctatcattgagtatcgtttaatgcaaaaggacaaaaacaactcccgtgatatgattgccaggagattctgtttccccatttctatatttgtggattttatatgtaatcacctatgtcagagaaagaaaacctttcaaccaaatgattggttcaaaaggaaagaatgattcaaagcagaggaatttattatgcacagcaaaatgtgtcttgtattaaatatttttattaaaagaatgtttcattaatgcattgataagaaaactaggttagttgcgagggatgtttctggtttcatttcaaataattaaatttctactgctactaccaagaggactggctcagtggtggcaaaatactggtgatgctccctagagcaggaggcccggaagtgctgacgcagccatcagcctgccaagattgttttttaatcttcacagtgttttaaagaacatgttaaaaaaaaaaaaatctagtgctcctgctgtcaagatttctgtcatggaaaccttgtttgagaaaggtgttaataaaattctattgcaaaaatttctttttctagaaaaaataaatacaaaaaaaaaaaagaagaaattccaaagtaataaaacttttcttgagacaaacaaaaaaaaagtttgcttactatttgattaaataaaatttacttacatttctttaaggtattttaattttttaatgtctctgtggagtatttgtatgataccataatgtatatttatgtagaatcaaattatataaacagtaccaatatcattatagaaaaaaataacattttaatgtatattgttctaacaatcatattgtgaatcattttgaagttcattatagcgatattgataaattgtggaattgtcttaatgtttttttattaactgacattattttaaacctaactgagatgatcagttacattcatcagttggtgagttttgaagaataactacattttatttcaaactaacaaatgtatacggttttagttcagtgttgaagaattttaatacaatattaaattacttgaactgaacagttccttgtatatattttgcctattcactgttgatatgtatgtagcaaaatgagagttaaataacactaaaatatggtaccaggaggcaattgtataggagcaaagttaataggagctttgctgaaacagaagcatatgtgtaaataagcttgggcttccagttataaattttgtaatttttgtcattatttatatcctataaaaaaagcacacaaaaataaaacagaagttgtacagca

SEQ ID NO: 107517 - DNA, 3328 bp, Homo sapiens
  Payload ID: 1101
  Gene Symbol: ANKS1B
  Gene Name: ankyrin repeat and sterile alpha motif domain containing 1B
  Uniprot ID: Q7Z6G8
  ENST ID: ENST00000549493
  CDS Start-End: 273-1805
attgctcattgtggagtactccaacaatcacatagaacgcagaccagcccaagctgacagcttgatatgccttcttctgctgcctggttttgggggctgtatgacgtactggtcggtagtaaagattaatatgtaagaaatgtggagctaggatcaagtcatactccacagcctgcctggcaaactatgttttacttctgactttgctctctcgctgagaacattaatctgtcaagctggcgggctcctttgatagcaactttcccaggggcatgatgtggcaatgccacctctcagcccaggactaccgctattaccccgtggacggctactccctgcttaaacgcttccctcttcatcctcttacaggacccagatgccctgtccaaacagtgggacaatggttggaaagcattgggctacctcagtacgagaaccacctgatggctaatggatttgacaatgtgcagtttatgggaagcaatgttatggaagatcaggatttgttggaaattggaatccttaattctgggcacagacaaagaattctacaggcaatccagctccttccaaagatgagacccattgggcatgatggctaccatcccacctctgtagctgagtggctggattccattgaactgggcgactacaccaaagcctttctaattaatggctacacttcgatggacctgttgaaaaaaatctgggaggttgaacttattaatgttttaaaaatcaatttgattggccacaggaaacgtattttggcatctctgggagacaggctgcacgacgatcccccacagaagccccctcggtccatcaccctcagggaacccagtggtaatcacactcctcctcagttgtctccatcacttagccaaagcacttacaccactggtggctccctagacgttcctcacattatcatgcagggcgatgcaaggaggagaagaaatgaaaactactttgatgatattccccgatcaaaactggagaggcagatggctcagtcgtctgtctgtgaaatatggacgaatcagaacgcaggatttcctttctcagcgatccatcaggttcataatacaggagactggggagaaccttccattaccttgcgacctccgaatgaagccacagcctctaccccggtacagtactggcagcatcacccagaaaagcttatcttccagtcgtgtgattacaaagctttttatttaggttctatgctgataaaagagcttagggggacagaatcaacccaagatgcttgtgcaaaaatgcgggctaactgtcagaagtctacagagcaaatgaagaaggtccctactattattctttctgtctcatataaaggagtcaaatttattgatgcaacaaataagaacataattgctgagcatgaaattcgtaatatctcctgtgctgcccaggacccagaagacctctcaacatttgcctatatcacaaaagatttgaagtctaatcaccactactgtcatgtgtttactgcctttgatgtgaatttagcctatgaaatcatcctaaccctgggacaggcattcgaagtcgcttaccagctagcactacaagcaagaaaagggggacactcctccacacttccagaaagctttgaaaacaaaccctccaaacccatccccaagccccgcgttagcattcgcaagtccgtgcagatcgacccatctgagcaaaagactctggccaatctaccgtggattgtggagccgggccaagaagccaagaggggcattaataccaagtatgaaaccacgattttctgatactcgccgtcctcctgtcctcgcggtgccttgctcgccaagcggtcccggagcaggctttccttcgcgcctccgcgtccacccagcccaggaggaagactgctctgagcgtgcggccttgttacgggcgaaaggccactggccattcctggggaagttctttctgcaccagtgatggaaaacgcaagactttccagtcgcaacccctgagaggcgtgagttgagatgggttttccctgatgctcccgactcccctccccaccacctcccaaggtatttctgatgactccgccccagtacttgctttgcttcatttggggaaaataataccttttctttaaaaaaaaaaaaaaaaaaaaaaaagtaaaggggatctctaatactgcctaaaagtatgctttcactgtcagcagttttaaaggtgaaatcagagcagcactacccctcccacctccaaagcatctgtaaaatcattctatcattgagtatcgtttaatgcaaaaggacaaaaacaactcccgtgatatgattgccaggagattctgtttccccatttctatatttgtggattttatatgtaatcacctatgtcagagaaagaaaacctttcaaccaaatgattggttcaaaaggaaagaatgattcaaagcagaggaatttattatgcacagcaaaatgtgtcttgtattaaatatttttattaaaagaatgtttcattaatgcattgataagaaaactaggttagttgcgagggatgtttctggtttcatttcaaataattaaatttctactgctactaccaagaggactggctcagtggtggcaaaatactggtgatgctccctagagcaggaggcccggaagtgctgacgcagccatcagcctgccaagattgttttttaatcttcacagtgttttaaagaacatgttaaaaaaaaaaaaatctagtgctcctgctgtcaagatttctgtcatggaaaccttgtttgagaaaggtgttaataaaattctattgcaaaaatttctttttctagaaaaaataaatacaaaaaaaaaaaagaagaaattccaaagtaataaaacttttcttgagacaaacaaaaaaaaagtttgcttactatttgattaaataaaatttacttacatttctttaaggtattttaattttttaatgtctctgtggagtatttgtatgataccataatgtatatttatgtagaatcaaattatataaacagtaccaatatcattatagaaaaaaataacattttaatgtatattgttctaacaatcatattgtgaatcattttgaagttcattatagcgatattgataaattgtggaattgtcttaatgtttttttattaactgacattattttaaacctaactgagatgatcagttacattcatcagttggtgagttttgaagaataactacattttatttcaaactaacaaatgtatacggttttagttcagtgttgaagaattttaatacaatattaaattacttgaactgaa

SEQ ID NO: 107518 - DNA, 1281 bp, Homo sapiens
  Payload ID: 1101
  Gene Symbol: ANKS1B
  Gene Name: ankyrin repeat and sterile alpha motif domain containing 1B
  Uniprot ID: Q7Z6G8
  ENST ID: ENST00000546568
  CDS Start-End: 1-1281
atgatgtggcaatgccacctctcagcccaggactaccgctattaccccgtggacggctactccctgcttaaacgcttccctcttcatcctcttacaggacccagatgccctgtccaaacagtgggacaatggttggaaagcattgggctacctcagtacgagaaccacctgatggctaatggatttgacaatgtgcagtttatgggaagcaatgttatggaagatcaggatttgttggaaattggaatccttaattctgggcacagacaaagaattctacaggcaatccagctccttccaaagatgagacccattgggcatgatggctaccatcccacctctgtagctgagtggctggattccattgaactgggcgactacaccaaagcctttctaattaatggctacacttcgatggacctgttgaaaaaaatctgggaggttgaacttattaatgttttaaaaatcaatttgattggccacaggaaacgtattttggcatctctgggagacaggctgcacgacgatcccccacagaagccccctcggtccatcaccctcaggacaggagactggggagaaccttccattaccttgcgacctccgaatgaagccacagcctctaccccggtacagtactggcagcatcacccagaaaagcttatcttccagtcgtgtgattacaaagctttttatttaggttctatgctgataaaagagcttagggggacagaatcaacccaagatgcttgtgcaaaaatgcgggctaactgtcagaagtctacagagcaaatgaagaaggtccctactattattctttctgtctcatataaaggagtcaaatttattgatgcaacaaataagaacataattgctgagcatgaaattcgtaatatctcctgtgctgcccaggacccagaagacctctcaacatttgcctatatcacaaaagatttgaagtctaatcaccactactgtcatgtgtttactgcctttgatgtgaatttagcctatgaaatcatcctaaccctgggacaggcattcgaagtcgcttaccagctagcactacaagcaagaaaagggggacactcctccacacttccagaaagctttgaaaacaaaccctccaaacccatccccaagccccgcgttagcattcgcaagtccgtgcagatcgacccatctgagcaaaagactctggccaatctaccgtggattgtggagccgggccaagaagccaagaggggcattaataccaagtatgaaaccacgattttctga

SEQ ID NO: 107519 - DNA, 2595 bp, Homo sapiens
  Payload ID: 1101
  Gene Symbol: ANKS1B
  Gene Name: ankyrin repeat and sterile alpha motif domain containing 1B
  Uniprot ID: Q7Z6G8
  ENST ID: ENST00000547010
  CDS Start-End: 301-2595
ggcaaggactctgtgggggagtcggtgagagactatggggaaggaccaggagctgctggaagctgctcgcactggaaatgtggctctggtggagaaactcctgtctggcaggaaaggagggatcctgggcggtggatccggacccctgcccctgtctaatctgctaagagaacctcatctacaatcaatttgtcaccaggagaagtggaagaagaggatgatgatgaaaatacgtgtgggccatcaggactttgggaagcattaactccgtgtaatggatgtaggaaccttggcttccccatgcttgcccaggagtcctatccaaagaagagaaattacactatggaaattgtaccatctgcttctctggatacatttccttcagaaaatgagaactttctgtgtgatctcatggacacagctgttacaaagaaaccttgctccttagaaattgcaagggcaccttccccaagaactgataatgcctctgaggtagcagttactactccaggaactagtaaccatagaaacagctcaacaggcccaacacctgattgttcacctccatcccctgatactgccctcaaaaatattgtaaaagtcattcgaccccagcctaaacagcgaacatccattgtgtcttctctggattttcaccgaatgaatcacaaccaagaatattttgaaatcaacacatctacagggtgcacaagctttactgccagtcctcctgctagtccacccacctcttctgtgggaaccacagaagtcaagaatgagggaactaaccatacagatgacctctcccgacaggatgacaatgatcccccaaaagaatatgatcctgggcaatttgcaggcctgctccatggatcctctccagcctgtgagtcccctgaaaatccatttcatctctatgggaaaagagaacaatgtgaaaaaggacaagatgaagtcagtttggcaaacagtcctttgcctttcaagcagtctccaatagaaaataactcagaacctttggtaaagaaaattaaacccaaagtggtcagtagaacaatttttcacaaaaaaagcaaccaactcgaaaaccataccattgttggcacaagatcaaccaggagtggatctcggaatggggaccagtgggttatgaacgcagggggatttgtggagagagcctgtactctggggagaataaggtcattgcctaaagccttgatcgacatgcatttgtcaaaaagtgtctctaaatctgattctgatctcattgcctatccttccaatgagaaaacatcaagagttaactggagtgaatcttccactgctgaacacagttctaaagggaattctgaaagaacaccatccttcacatcggaatgggaagaaattgacaaaataatgagttccatagatgttggaatcaacaacgaacttaaagagatgaatggacccagatgccctgtccaaacagtgggacaatggttggaaagcattgggctacctcagtacgagaaccacctgatggctaatggatttgacaatgtgcagtttatgggaagcaatgttatggaagatcaggatttgttggaaattggaatccttaattctgggcacagacaaagaattctacaggcaatccagctccttccaaagatgagacccattgggcatgatggctaccatcccacctctgtagctgagtggctggattccattgaactgggcgactacaccaaagcctttctaattaatggctacacttcgatggacctgttgaaaaaaatctgggaggttgaacttattaatgttttaaaaatcaatttgattggccacaggaaacgtattttggcatctctgggagacaggctgcacgacgatcccccacagaagccccctcggtccatcaccctcaggacaggagactggggagaaccttccattaccttgcgacctccgaatgaagccacagcctctaccccggtacagtactggcagcatcacccagaaaagcttatcttccagtcgtgtgattacaaagctttttatttaggttctatgctgataaaagagcttagggggacagaatcaacccaagatgcttgtgcaaaaatgcgggctaactgtcagaagtctacagagcaaatgaagaaggtccctactattattctttctgtctcatataaaggagtcaaatttattgatgcaacaaataagaacataattgctgagcatgaaattcgtaatatctcctgtgctgcccaggacccagaagacctctcaacatttgcctatatcacaaaagatttgaagtctaatcaccactactgtcatgtgtttactgcctttgatgtgaatttagcctatgaaatcatcctaaccctgggacaggcattcgaagtcgcttaccagctagcactacaagcaagaaaagggggacactcctccacacttccagaaagctttgaaaacaaaccctccaaacccatccccaagccccgcgttagcattcgcaagtccgtggatcttcttcatgccagccataccgggcaggaaccatcagagagacacactgaggaggcactcagaaaattttga

SEQ ID NO: 107520 - DNA, 1937 bp, Homo sapiens
  Payload ID: 1101
  Gene Symbol: ANKS1B
  Gene Name: ankyrin repeat and sterile alpha motif domain containing 1B
  ENST ID: ENST00000550778
  CDS Start-End: 1-1598
tgcatttgtcaaaaagtgtctctaaatctgattctgatctcattgcctatccttccaatgagaaaacatcaagagttaactggagtgaatcttccactgctgaacacagttctaaagggaattctgaaagaacaccatccttcacatcggaatgggaagaaattgacaaaataatgagttccatagatgttggaatcaacaacgaacttaaagagatgaatggtgagaccacaagacccagatgccctgtccaaacagtgggacaatggttggaaagcattgggctacctcagtacgagaaccacctgatggctaatggatttgacaatgtgcagtttatgggaagcaatgttatggaagatcaggatttgttggaaattggaatccttaattctgggcacagacaaagaattctacaggcaatccagctccttccaaagatgagacccattgggcatgatggctaccatcccacctctgtagctgagtggctggattccattgaactgggcgactacaccaaagcctttctaattaatggctacacttcgatggacctgttgaaaaaaatctgggaggttgaacttattaatgttttaaaaatcaatttgattggccacaggaaacgtattttggcatctctgggagacaggctgcacgacgatcccccacagaagccccctcggtccatcaccctcagggaacccagtggtaatcacactcctcctcagttgtctccatcacttagccaaagcacttacaccactggtggctccctagacgttcctcacattatcatgcagggcgatgcaaggaggagaagaaatgaaaactactttgatgatattccccgatcaaaactggagaggcagatggctcagacaggagactggggagaaccttccattaccttgcgacctccgaatgaagccacagcctctaccccggtacagtactggcagcatcacccagaaaagcttatcttccagtcgtgtgattacaaagctttttatttaggttctatgctgataaaagagcttagggggacagaatcaacccaagatgcttgtgcaaaaatgcgggctaactgtcagaagtctacagagcaaatgaagaaggtccctactattattctttctgtctcatataaaggagtcaaatttattgatgcaacaaataagaacataattgctgagcatgaaattcgtaatatctcctgtgctgcccaggacccagaagacctctcaacatttgcctatatcacaaaagatttgaagtctaatcaccactactgtcatgtgtttactgcctttgatgtgaatttagcctatgaaatcatcctaaccctgggacaggcattcgaagtcgcttaccagctagcactacaagcaagaaaagggggacactcctccacacttccagaaagctttgaaaacaaaccctccaaacccatccccaagccccgcgttagcattcgcaagtccgtgcagatcgacccatctgagcaaaagactctggccaatctaccgtggattgtggagccgggccaagaagccaagaggggcattaataccaagtatgaaaccacgattttctgatactcgccgtcctcctgtcctcgcggtgccttgctcgccaagcggtcccggagcaggctttccttcgcgcctccgcgtccacccagcccaggaggaagactgctctgagcgtgcggccttgttacgggcgaaaggccactggccattcctggggaagttctttctgcaccagtgatggaaaacgcaagactttccagtcgcaacccctgagaggcgtgagttgagatgggttttccctgatgctcccgactcccctccccaccacctcccaaggtatttctgatgactccgccccagtacttgctttgcttcatttggggaaaataataccttttcttt

SEQ ID NO: 107521 - DNA, 2268 bp, Homo sapiens
  Payload ID: 1101
  Gene Symbol: ANKS1B
  Gene Name: ankyrin repeat and sterile alpha motif domain containing 1B
  Uniprot ID: Q7Z6G8
  ENST ID: ENST00000549558
  CDS Start-End: 255-1499
ctccaacaatcacatagaacgcagaccagcccaagctgacagcttgatatgccttcttctgctgcctggttttgggggctgtatgacgtactggtcggtagtaaagattaatatgtaagaaatgtggagctaggatcaagtcatactccacagcctgcctggcaaactatgttttacttctgactttgctctctcgctgagaacattaatctgtcaagctggcgggctcctttgatagcaactttcccaggggcatgatgtggcaatgccacctctcagcccaggactaccgctattaccccgtggacggctactccctgcttaaacgcttccctcttcatcctcttacaggacccagatgccctgtccaaacagtgggacaatggttggaaagcattgggctacctcagtacgagaaccacctgatggctaatggatttgacaatgtgcagtttatgggaagcaatgttatggaagatcaggatttgttggaaattggaatccttaattctgggcacagacaaagaattctacaggcaatccagctccttccaaagatgagacccattgggcatgatggctaccatcccacctctgtagctgagtggctggattccattgaactgggcgactacaccaaagcctttctaattaatggctacacttcgatggacctgttgaaaaaaatctgggaggttgaacttattaatgttttaaaaatcaatttgattggccacaggaaacgtattttggcatctctgggagacaggctgcacgacgatcccccacagaagccccctcggtccatcaccctcaggacaggagactggggagaaccttccattaccttgcgacctccgaatgaagccacagcctctaccccggtacagtactggcagcatcacccagaaaagcttatcttccagtcgtgtgattacaaagctttttatttaggttctatgctgataaaagagcttagggggacagaatcaacccaagatgcttgtgcaaaaatgcgggctaactgtcagaagtctacagagcaaatgaagaaggtccctactattattctttctgtctcatataaaggagtcaaatttattgatgcaacaaataagaacataattgctgagcatgaaattcgtaatatctcctgtgctgcccaggacccagaagacctctcaacatttgcctatatcacaaaagatttgaagtctaatcaccactactgtcatgtgtttactgcctttgatgtgaatttagcctatgaaatcatcctaaccctgggacaggcattcgaagtcgcttaccagctagcactacaagcaagaaaagggggacactcctccacacttccagaaagctttgaaaacaaaccctccaaacccatccccaagccccgcgttagcattcgcaagtccgtggatcttcttcatgccagccataccgggcaggaaccatcagagagacacactgaggaggcactcagaaaattttgatagaattgaatttacatatagctgataaagcctaaatagaaaggttgatgtatttagcttgaatccttcactttagtggtctaatcaacagataaatgacaagcaaagaatgaaacaatccaaaaatgtttttcaaaacaattttgtgaattttatttttacaaaaattttttaaattcatattttaaaatgtataccaaggcaaaaaaatcatataagctatatcataaatacaagagtttcaaaacatacaagagacatataatgtaaaaaaaaattatatatatgaagtccaatgtaatttataatacaaaaaaatacagcaagggaaaatgctttagaaatgctcatctgcaaactacaaaacaaaatcctcctcttgaccgactgcatgaactgccatgaaatttgcagctccatcatactaggtatctcttctttcttcatgttaccttgtctttcttcccatttttcttttaagacagggtcttgctatgtcacccaggctggactcaaactccagggctcaaggaatcctcctgtcttagcctcccaaggagctgggattacaggcacgtgccaccgcacctggctcctaatttctttttaagacaagggccattcaaggctttttaaaacctgatgtgtgttgttatactttataacagtcagtggcttttaattccaaaaggtaatactttatactctgcctacatgagatgagcccctaacagtgtgtacaaataaaattatgatttgggtattctaa

SEQ ID NO: 107522 - DNA, 3885 bp, Homo sapiens
  Payload ID: 1101
  Gene Symbol: ANKS1B
  Gene Name: ankyrin repeat and sterile alpha motif domain containing 1B
  Uniprot ID: Q7Z6G8
  ENST ID: ENST00000547776
  CDS Start-End: 1-3747
atggggaaggaccaggagctgctggaagctgctcgcactggaaatgtggctctggtggagaaactcctgtctggcaggaaaggagggatcctgggcggtggatccggacccctgcccctgtctaatctgctaagcatctggcgaggccccaatgtgaactgcacagacagttcgggttacactgctttacaccacgcagccttaaatggacataaggacatagttctcaaactacttcagtatgaggcatcaacaaatgtagcagacaacaaagggtattttcctattcacctggctgcctggaaaggagatgtggaaattgtgaagattcttattcatcatggaccatcacattccagggtcaatgaacagaacaatgaaaatgaaactgccctacactgtgcagctcaatatggacactcagaagtagttgctgttctcctagaagagctcactgacccgacaattagaaatagcaagctggaaacacctttggacttggcggcactctacggacggcttagagtggtaaaaatgatcatcagtgcacatcctaacttaatgagctgcaacactcgcaagcacacgccacttcaccttgctgcgcgcaatggccacaaagcagtcgtgcaggtgctgctggaggcaggaatggatgtgagctgtcaaacagaaaaggggagtgcacttcatgaagcagctttgtttggaaaggtggatgttgtacgagttctgttagaaacaggaattgatgccaacataaaggatagcttaggtagaactgtcttggacattctgaaagaacatccatctcagaaatctctccagattgcaacactcttacaagagtatttagaaggcgtgggaagatctacagtcctcgaagagcctgtacaggaagatgcaacacaagaaacacacatttcatctcctgttgagtctccttcccaaaagaccaaaagtgaaaccgtcactggagaattatcaaaactcttggatgaaataaaactctgtcaagaaaaggattattcgtttgaagacttgtgccacacaatatcagaccactacttagataatttgagcaagatttcagaggaagaacttgggaaaaatggaagccagagtgtaagaacctcatctacaatcaatttgtcaccaggagaagtggaagaagaggatgatgatgaaaatacgtgtgggccatcaggactttgggaagcattaactccgtgtaatggatgtaggaaccttggcttccccatgcttgcccaggagtcctatccaaagaagagaaattacactatggaaattgtaccatctgcttctctggatacatttccttcagaaaatgagaactttctgtgtgatctcatggacacagctgttacaaagaaaccttgctccttagaaattgcaagggcaccttccccaagaactgataatgcctctgaggtagcagttactactccaggaactagtaaccatagaaacagctcaacaggcccaacacctgattgttcacctccatcccctgatactgccctcaaaaatattgtaaaagtcattcgaccccagcctaaacagcgaacatccattgtgtcttctctggattttcaccgaatgaatcacaaccaagaatattttgaaatcaacacatctacagggtgcacaagctttactgccagtcctcctgctagtccacccacctcttctgtgggaaccacagaagtcaagaatgagggaactaaccatacagatgacctctcccgacaggatgacaatgatcccccaaaagaatatgatcctgggcaatttgcaggcctgctccatggatcctctccagcctgtgagtcccctgaaaatccatttcatctctatgggaaaagagaacaatgtgaaaaaggacaagatgaagtcagtttggcaaacagtcctttgcctttcaagcagtctccaatagaaaataactcagaacctttggtaaagaaaattaaacccaaagtggtcagtagaacaatttttcacaaaaaaagcaaccaactcgaaaaccataccattgttggcacaagatcaaccaggagtggatctcggaatggggaccagtgggttatgaacgcagggggatttgtggagagagcctgtactctggggagaataaggtcattgcctaaagccttgatcgacatgcatttgtcaaaaagtgtctctaaatctgattctgatctcattgcctatccttccaatgagaaaacatcaagagttaactggagtgaatcttccactgctgaacacagttctaaagggaattctgaaagaacaccatccttcacatcggaatgggaagaaattgacaaaataatgagttccatagatgttggaatcaacaacgaacttaaagagatgaatggtgagaccacaagacccagatgccctgtccaaacagtgggacaatggttggaaagcattgggctacctcagtacgagaaccacctgatggctaatggatttgacaatgtgcagtttatgggaagcaatgttatggaagatcaggatttgttggaaattggaatccttaattctgggcacagacaaagaattctacaggcaatccagctccttccaaagatgagacccattgggcatgatggctaccatcccacctctgtagctgagtggctggattccattgaactgggcgactacaccaaagcctttctaattaatggctacacttcgatggacctgttgaaaaaaatctgggaggttgaacttattaatgttttaaaaatcaatttgattggccacaggaaacgtattttggcatctctgggagacaggctgcacgacgatcccccacagaagccccctcggtccatcaccctcagggaacccagtggtaatcacactcctcctcagttgtctccatcacttagccaaagcacttacaccactggtggctccctagacgttcctcacattatcatgcagggcgatgcaaggaggagaagaaatgaaaactactttgatgatattccccgatcaaaactggagaggcagatggctcagacaggagactggggagaaccttccattaccttgcgacctccgaatgaagccacagcctctaccccggtacagtactggcagcatcacccagaaaagcttatcttccagtcgtgtgattacaaagctttttatttaggttctatgctgataaaagagcttagggggacagaatcaacccaagatgcttgtgcaaaaatgcgggctaactgtcagaagtctacagagcaaatgaagaaggtccctactattattctttctgtctcatataaaggagtcaaatttattgatgcaacaaataagaacataattgctgagcatgaaattcgtaatatctcctgtgctgcccaggacccagaagacctctcaacatttgcctatatcacaaaagatttgaagtctaatcaccactactgtcatgtgtttactgcctttgatgtgaatttagcctatgaaatcatcctaaccctgggacaggcattcgaagtcgcttaccagctagcactacaagcaagaaaagggggacactcctccacacttccagaaagctttgaaaacaaaccctccaaacccatccccaagccccgcgttagcattcgcaagtccgtggatcttcttcatgccagccataccgggcaggaaccatcagagagacacactgaggaggcactcagaaaattttgatagaattgaatttacatatagctgataaagcctaaatagaaaggttgatgtatttagcttgaatccttcactttagtggtctaatcaacagataaatgacaagcaaagaatgaaacaatccaaaaatgtttttcaaaa

SEQ ID NO: 107523 - DNA, 2105 bp, Homo sapiens
  Payload ID: 1101
  Gene Symbol: ANKS1B
  Gene Name: ankyrin repeat and sterile alpha motif domain containing 1B
  ENST ID: ENST00000549866
  CDS Start-End: 418-2105
ctgcgctcccgctccagctaggactctctctgccgcctcctcctcctcctccgacctcagtcctcaccaccctcctcccgctcctcaaaagcacccccgagtccccaccccctcacgccgcacccgcgggaacgaggccttgggaattcaggggagtggctgtgggggcgcgtcgcggctcccagctcggccagcccctctttcaagacatggtctgatccccattgtaaaagctgcgccccgaagaggaggagagagtcgtgctccctgcctggggctgcagggagctctccgtgctgaagctcttgcattattttagggtggggcgaagagggccctggattttggggagtgggggtgggtggggaggaggacccgaggggggcaaggactctgtgggggagtcggtgagagactatggggaaggaccaggagctgctggaagctgctcgcactggaaatgtggctctggtggagaaactcctgtctggcaggaaaggagggatcctgggcggtggatccggacccctgcccctgtctaatctgctaagcatctggcgaggccccaatgtgaactgcacagacagttcgggttacactgctttacaccacgcagccttaaatggacataaggacatagttctcaaactacttcagtatgaggcatcaacaaatgtagcagacaacaaagggtattttcctattcacctggctgcctggaaaggagatgtggaaattgtgaagattcttattcatcatggaccatcacattccagggtcaatgaacagaacaatgaaaatgaaactgccctacactgtgcagctcaatatggacactcagaagtagttgctgttctcctagaagagctcactgacccgacaattagaaatagcaagctggaaacacctttggacttggcggcactctacggacggcttagagtggtaaaaatgatcatcagtgcacatcctaacttaatgagctgcaacactcgcaagcacacgccacttcaccttgctgcgcgcaatggccacaaagcagtcgtgcaggtgctgctggaggcaggaatggatgtgagctgtcaaacagaaaaggggagtgcacttcatgaagcagctttgtttggaaaggtggatgttgtacgagttctgttagaaacagagtatttagaaggcgtgggaagatctacagtcctcgaagagcctgtacaggaagatgcaacacaagaaacacacatttcatctcctgttgagtctccttcccaaaagaccaaaagtgaaaccgtcactggagaattatcaaaactcttggatgaaataaaactctgtcaagaaaaggattattcgtttgaagacttgtgccacacaatatcagaccactacttagataatttgagcaagatttcagaggaagaacttgggaaaaatggaagccagagtgtaagaacctcatctacaatcaatttgtcaccaggagaagtggaagaagaggatgatgatgaaaatacgtgtgggccatcaggactttgggaagcattaactccgtgtaatggatgtaggaaccttggcttccccatgcttgcccaggagtcctatccaaagaagagaaattacactatggaaattgtaccatctgcttctctggatacatttccttcagaaaatgagaactttctgtgtgatctcatggacacagctgttacaaagaaaccttgctccttagaaattgcaagggcaccttccccaagaactgataatgcctctgaggtagcagttactactccaggaactagtaaccatagaaacagctcaacaggcccaacacctgattgttcacctccatcccctgatactgccctcaaaaatattgtaaaagtcattcgaccccagcctaaacagcgaacatccattgtgtcttctctggattttcaccgaatgaatcacaaccaagaatattttgaaatcaacacatctacagggtgcacaagctttactgccagtcctcctgctagtccacccacctcttctgtgggaaccacagaagtcaagaatgagggaactaaccatacagatgacctctcccgacaggatgacaatgatccccc

SEQ ID NO: 107524 - DNA, 1690 bp, Homo sapiens
  Payload ID: 1101
  Gene Symbol: ANKS1B
  Gene Name: ankyrin repeat and sterile alpha motif domain containing 1B
  Uniprot ID: Q7Z6G8
  ENST ID: ENST00000547446
  CDS Start-End: 118-1302
gtaacgtataaccagtatgaagattcaattcagatttaagcactttggtttgcttttgaatcttgctattttctgcatttgttttgactgctctcatcattcaagattgacgcttggatgggacccagatgccctgtccaaacagtgggacaatggttggaaagcattgggctacctcagtacgagaaccacctgatggctaatggatttgacaatgtgcagtttatgggaagcaatgttatggaagatcaggatttgttggaaattggaatccttaattctgggcacagacaaagaattctacaggcaatccagctccttccaaagatgagacccattgggcatgatggctaccatcccacctctgtagctgagtggctggattccattgaactgggcgactacaccaaagcctttctaattaatggctacacttcgatggacctgttgaaaaaaatctgggaggttgaacttattaatgttttaaaaatcaatttgattggccacaggaaacgtattttggcatctctgggagacaggctgcacgacgatcccccacagaagccccctcggtccatcaccctcaggacaggagactggggagaaccttccattaccttgcgacctccgaatgaagccacagcctctaccccggtacagtactggcagcatcacccagaaaagcttatcttccagtcgtgtgattacaaagctttttatttaggttctatgctgataaaagagcttagggggacagaatcaacccaagatgcttgtgcaaaaatgcgggctaactgtcagaagtctacagagcaaatgaagaaggtccctactattattctttctgtctcatataaaggagtcaaatttattgatgcaacaaataagaacataattgctgagcatgaaattcgtaatatctcctgtgctgcccaggacccagaagacctctcaacatttgcctatatcacaaaagatttgaagtctaatcaccactactgtcatgtgtttactgcctttgatgtgaatttagcctatgaaatcatcctaaccctgggacaggcattcgaagtcgcttaccagctagcactacaagcaagaaaagggggacactcctccacacttccagaaagctttgaaaacaaaccctccaaacccatccccaagccccgcgttagcattcgcaagtccgtgatcgacccatctgagcaaaagactctggccaatctaccgtggattgtggagccgggccaagaagccaagaggggcattaataccaagtatgaaaccacgattttctgatactcgccgtcctcctgtcctcgcggtgccttgctcgccaagcggtcccggagcaggctttccttcgcgcctccgcgtccacccagcccaggaggaagactgctctgagcgtgcggccttgttacgggcgaaaggccactggccattcctggggaagttctttctgcaccagtgatggaaaacgcaagactttccagtcgcaacccctgagaggcgtgagttgagatgggttttccctgatgctcccgactcccctccccaccacctcccaaggtatttctgatgactccgccccagtacttgctttgcttcatttggggaaaataataccttttctttaaaaaaaaaaaaaaaaaaaaaaaagtaaaggggatctctaatactgcct

SEQ ID NO: 107525 - DNA, 838 bp, Homo sapiens
  Payload ID: 1101
  Gene Symbol: ANKS1B
  Gene Name: ankyrin repeat and sterile alpha motif domain containing 1B
  ENST ID: ENST00000555119
  CDS Start-End: 1-157
ctcctccacacttccagaaagctttgaaaacaaaccctccaaacccatccccaagccccgcgttagcattcgcaagtccgtggatcttcttcatgccagccataccgggcaggaaccatcagagagacacactgaggaggcactcagaaaattttgatagaattgaatttacatatagctgataaagcctaaatagaaaggttgatgtatttagcttgaatccttcactttagtggtctaatcaacagataaatgacaagcaaagaatgaaacaatccaaaaatgtttttcaaaacaattttgtgaattttatttttacaaaaattttttaaattcatattttaaaatgtataccaaggcaaaaaaatcatataagctatatcataaatacaagagtttcaaaacatacaagagacatataatgtaaaaaaaaattatatatatgaagtccaatgtaatttataatacaaaaaaatacagcaagggaaaatgctttagaaatgctcatctgcaaactacaaaacaaaatcctcctcttgaccgactgcatgaactgccatgaaatttgcagctccatcatactagtggttgaaaaatgaaacaccgcctcataactgggaaaggagcactttcatccaaagacgcgaactcagagcaaaatgaacatttccaaagcagccctgccacttcagctgacacacatttatgtgactggtagagagaaggttggttacttagtcctcaagaagaagaatcttaatttccctggaaagcccatctgataacacctctgttcctgcaaactgtatactctcctagtcttctgcactatatacct

SEQ ID NO: 107526 - DNA, 1297 bp, Homo sapiens
  Payload ID: 1101
  Gene Symbol: ANKS1B
  Gene Name: ankyrin repeat and sterile alpha motif domain containing 1B
  ENST ID: ENST00000547362
  CDS Start-End: 210-533
ttcaggttttaaaaatcaatttgattggccacaggaaacgtattttggcatctctgggagacaggctgcacgacgatcccccacagaagccccctcggtccatcaccctcagggaacccagtggtaatcacactcctcctcagttgtctccatcacttagccaaagcacttacaccactggtggctccctagacgttcctcacattatcatgcagggcgatgcaaggaggagaagaaatgaaaactactttgatgatattccccgatcaaaactggagaggcagatggctcagacaggagactggggagaaccttccattaccttgcgacctccgaatgaagccacagcctctaccccggtacagtactggcagcatcacccagaaaagcttatcttccagtcgtgtgattacaaagctttttatttaggttctatgctgataaaagagcttagggggacagaatcaacccaagatgcttgtgcaaaaatgcggctttctaattttaatttcagaagtctacagagcaaatgaagaaggtccctactattattctttctgtctcatataaaggagtcaaatttattgatgcaacaaataagaacataattgctgagcatgaaattcgtaatatctcctgtgctgcccaggacccagaagacctctcaacatttgcctatatcacaaaagatttgaagtctaatcaccactactgtcatgtgtttactgcctttgatgtgaatttagcctatgaaatcatcctaaccctgggacaggcattcgaagtcgcttaccagctagcactacaagcaagaaaagggggacactcctccacacttccagaaagctttgaaaacaaaccctccaaacccatccccaagccccgcgttagcattcgcaagtccgtgcagatcgacccatctgagcaaaagactctggccaatctaccgtggattgtggagccgggccaagaagccaagaggggcattaataccaagtatgaaaccacgattttctgatactcgccgtcctcctgtcctcgcggtgccttgctcgccaagcggtcccggagcaggctttccttcgcgcctccgcgtccacccagcccaggaggaagactgctctgagcgtgcggccttgttacgggcgaaaggccactggccattcctggggaagttctttctgcaccagtgatggaaaacgcaagactttccagtcgcaacccctgagaggcgtgagttgagatgggttttccctgatgctcccgactcccctccccaccacctcccaaggtattt

SEQ ID NO: 107527 - DNA, 694 bp, Homo sapiens
  Payload ID: 1101
  Gene Symbol: ANKS1B
  Gene Name: ankyrin repeat and sterile alpha motif domain containing 1B
  ENST ID: ENST00000549797
  CDS Start-End: 410-694
gggagagcccggcgctcggcgcagcgcggcgcggccaagctccgcgcctctcccgcccttcctcggcgcgctcgccctcgcctcgccgctcgcattcgctgggggcgcccagaaagatgcacagaggcaacggctaggggagcggaggttcaagccacatgtctgcgtcctcgggggccagagcccgccagccctcgcggatcccggctcgcggccagcccgagcggctcgggttttaaaaatcaatttgattggccacaggaaacgtattttggcatctctgggagacaggctgcacgacgatcccccacagaagccccctcggtccatcaccctcaggggcgatgcaaggaggagaagaaatgaaaactactttgatgatattccccgatcaaaactggagaggcagatggctcagcagtcgtctgtctgtgaaatatggacgaatcagaacgcaggatttcctttctcagcgatccatcaggttcataatacaggagactggggagaaccttccattaccttgcgacctccgaatgaagccacagcctctaccccggtacagtactggcagcatcacccagaaaagcttatcttccagtcgtgtgattacaaagctttttatttaggttctatgctgataaaagagcttagggggacagaatcaacccaagatgcttgtgcaaaaatgcgg

SEQ ID NO: 107528 - DNA, 569 bp, Homo sapiens
  Payload ID: 1101
  Gene Symbol: ANKS1B
  Gene Name: ankyrin repeat and sterile alpha motif domain containing 1B
  ENST ID: ENST00000552407
  CDS Start-End: 281-569
agtgctaggcgccctgcagcccccgcgcgccgcgcctgggcccgcatcgctctcgcagtgagggtccgcccgagcggttttaaaaatcaatttgattggccacaggaaacgtattttggcatctctgggagacaggctgcacgacgatcccccacagaagccccctcggtccatcaccctcagggaacccagtggtaatcacactcctcctcagttgtctccatcacttagccaaagcacttacaccactggtggctccctagacgttcctcacattatcatgcagggcgatgcaaggaggagaagaaatgaaaactactttgatgatattccccgatcaaaactggagaggcagatggctcagacaggagactggggagaaccttccattaccttgcgacctccgaatgaagccacagcctctaccccggtacagtactggcagcatcacccagaaaagcttatcttccagtcgtgtgattacaaagctttttatttaggttctatgctgataaaagagcttagggggacagaatcaacccaagatgcttgtgcaaaaatgcgggtaa

SEQ ID NO: 107529 - DNA, 489 bp, Homo sapiens
  Payload ID: 1101
  Gene Symbol: ANKS1B
  Gene Name: ankyrin repeat and sterile alpha motif domain containing 1B
  ENST ID: ENST00000552748
  CDS Start-End: 373-489
gagatatccatagtaaccgaggatgcgaggggcgcccagcagcagcgagtgcctgggagccaggaggaggcccccgcgcgccggcaacccccagtgctaggcgccctgcagcccccgcgcgccgcgcctgggcccgcatcgctctcgcagtgagggtccgcccgagcggttttaaaaatcaatttgattggccacaggaaacgtattttggcatctctgggagacaggctgcacgacgatcccccacagaagccccctcggtccatcaccctcagggaacccagtggtaatcacactcctcctcagttgtctccatcacttagccaaagcacttacaccactggtggctccctagacgttcctcacattatcatgcagggcgatgcaaggaggagaagaaatgaaaactactttgatgatattccccgatcaaaactggagaggcagatggctcagacaggagactggggagaaccttccattaccttg

SEQ ID NO: 107530 - DNA, 460 bp, Homo sapiens
  Payload ID: 1101
  Gene Symbol: ANKS1B
  Gene Name: ankyrin repeat and sterile alpha motif domain containing 1B
  ENST ID: ENST00000551613
  CDS Start-End: 401-460
agtgctaggcgccctgcagcccccgcgcgccgcgcctgggcccgcatcgctctcgcagtgagggtccgcccgagcggttttaaaaatcaatttgattggccacaggaaacgtattttggcatctctgggagacaggctgcacgacgatcccccacagaagccccctcggtccatcaccctcaggcagtcgtctgtctgtgaaatatggacgaatcagaacgcaggatttcctttctcagcgatccatcaggttcataatacaggagactggggagaaccttccattaccttgcgacctccgaatgaagccacagcctctaccccggtacagtactggcagcatcacccagaaaagcttatcttccagtcgtgtgattacaaagctttttatttaggttctatgctgataaaagagcttagggggacagaatcaacccaagatgcttgtgcaaaaatgcgg

SEQ ID NO: 107531 - DNA, 418 bp, Homo sapiens
  Payload ID: 1101
  Gene Symbol: ANKS1B
  Gene Name: ankyrin repeat and sterile alpha motif domain containing 1B
  ENST ID: ENST00000548447
  CDS Start-End: 336-418
agcagcagcgagtgcctgggagccaggaggaggcccccgcgcgccggcaacccccagtgctaggcgccctgcagcccccgcgcgccgcgcctgggcccgcatcgctctcgcagtgagggtccgcccgagcggttttaaaaatcaatttgattggccacaggaaacgtattttggcatctctgggagacaggctgcacgacgatcccccacagaagccccctcggtccatcaccctcagggaacccagtggtaatcacactcctcctcagttgtctccatcacttagccaaagcacttacaccactggtggctccctagacgttcctcacattatcatgcagggcgatgcaaggaggagaagaaatgaaaactactttgatgatattccccgatcaaaactggagaggcagatggctca

SEQ ID NO: 107532 - DNA, 779 bp, Homo sapiens
  Payload ID: 1101
  Gene Symbol: ANKS1B
  Gene Name: ankyrin repeat and sterile alpha motif domain containing 1B
  ENST ID: ENST00000546364
  CDS Start-End: 327-779
tatccatagtaaccgaggatgcgaggggcgcccagcagcagcgagtgcctgggagccaggaggagcccccgcgcgccgcgcctgggcccgcatcgctctcgcagtgagggtccgcccgagcggttttaaaaatcaatttgattggccacaggaaacgtattttggcatctctgggagacaggctgcacgacgatcccccacagaagccccctcggtccatcaccctcagggaacccagtggtaatcacactcctcctcagttgtctccatcacttagccaaagcacttacaccactggtggctccctagacgttcctcacattatcatgcagggcgatgcaaggaggagaagaaatgaaaactactttgatgatattccccgatcaaaactggagaggcagatggctcagtcgtctgtctgtgaaatatggacgaatcagaacgcaggatttcctttctcagcgatccatcaggttcataatacaggagactggggagaaccttccattaccttgcgacctccgaatgaagccacagcctctaccccggtacagtactggcagcatcacccagaaaagcttatcttccagtcgtgtgattacaaagctttttatttaggttctatgctgataaaagagcttagggggacagaatcaacccaagatgcttgtgcaaaaatgcggggaaaagaaaagtctacagagcaaatgaagaaggtccctactattattctttctgtctcatataaaggagtcaaatttattgatgcaacaaataag

SEQ ID NO: 107533 - DNA, 574 bp, Homo sapiens
  Payload ID: 1101
  Gene Symbol: ANKS1B
  Gene Name: ankyrin repeat and sterile alpha motif domain containing 1B
  ENST ID: ENST00000551560
  CDS Start-End: 383-574
agtcgcggtgctgcttatgtgcgccgggcacgttggatcagtagattagagacacgggaactttggaattgcttgatgattcttagacacttataaggatacttgctctgtggactcctgcatctggaaagggaaaactacaggaaatagtgttggaatggcaacatgaggaatttaggttttaaaaatcaatttgattggccacaggaaacgtattttggcatctctgggagacaggctgcacgacgatcccccacagaagccccctcggtccatcaccctcagggaacccagtggtaatcacactcctcctcagttgtctccatcacttagccaaagcacttacaccactggtggctccctagacgttcctcacattatcatgcagggcgatgcaaggaggagaagaaatgaaaactactttgatgatattccccgatcaaaactggagaggcagatggctcagtcgtctgtctgtgaaatatggacgaatcagaacgcaggatttcctttctcagcgatccatcaggttcataatacaggagactggggagaaccttccattaccttgcga

SEQ ID NO: 107534 - DNA, 2662 bp, Homo sapiens
  Payload ID: 1102
  Gene Symbol: ANKS3
  Gene Name: ankyrin repeat and sterile alpha motif domain containing 3
  Uniprot ID: Q6ZW76
  ENST ID: ENST00000304283
  CDS Start-End: 296-2266
agcacaggtgggttccgcggcggcccggccccagcacttgccggcacctgcagcccgcctagacccggcgctcgggcgtcccgcgctgcacttgctcgccgcgtgactggaggaccgagcccccacattttctttatgtggttgtggtgggggcacagtaatgccctgtgcgccgtagcgttcctgtggggatgtggccggggggcgtcgggaagcgtcactgctgccaggtgcagtggctcacgcctatatttccaggactttgagaggctgaggcgggcggatcacctgagtgatgtccgagctcagcgatgaagccagcgagccggaactcctgaaccgcagcttgtccatgtggcacgggctcgggacacaggtcagcggggaggagctggatgtccccctggatcttcacacagctgcttccattggccagtatgaagtggtgaaggagtgtgtgcagcggagagagttagatttgaataagaagaatggtggtggctggaccccgctgatgtatgcctcctacattggccacgacacaatcgtgcacctgctgcttgaggcgggggtgagtgtgaatgtgccgaccccagaagggcagactccactgatgctggcctccagctgtggcaacgagagcatcgcctactttcttctccagcaaggtgcagagctagaaatgaaagacatccagggctggacagccctcttccactgtaccagcgccgggcaccagcacatggtcaggttcctcttggacagtggagccaatgccaacgtgagggagccgatatgtggatttactcccttgatggaagcagctgctgctggccatgagataatcgtgcagtattttctgaatcacggagtcaaggtggacgcgagagaccacagtggagccacagcccggatgctggccaagcagtacggacacatgaagatcgtggccttgatggacacttactcgccctctctgcccaagagcctctatcggagcccagaaaagtacgaagatctgagctcttctgacgagtcctgccctgctcctcagagacagaggccttgccggaagaagggtgtcagcatccacgagggaccgcgagccctggccaggatcacaggcattggcctgggcggcagagccccacggcctcgctatgagcaggctcctccccgtggctatgtcaccttcaacagcagtggcgagaaccccctggaagaagagggcctctgctgccgggatgtcacctcccccatcaatgagcgggatgtggagagcagcagcagcagcagcagtcgggaggaacatgctttctgtgccaacctggggcccgtccagagcagcagcagcagcgagggcctggccagagcccaggggctcagcagcgaagcttctgtggagagcaacgaggactcggatcatgcctgtaaaagctcagctcgcaaacaagctaaaagttacatgaagaccaagaatcctgacagccagtggcctccccgcgctgcaactgacagggaaggctttctcgctgagtccagcccccagactcagagggccccctactcaggaccccaggaccttgccgcactgctggagcagatcgggtgtctgaagtacctgcaggtgtttgaggagcaggacgtggacctccgcatctttctgaccctcactgagagcgacctgaaggaaattggcatcacgctgtttgggcccaagaggaagatgacgtccgccattgcccgctggcacagcagtgcccgcccacccggggatgccctggagctggcctacgccgaccggctggaggctgagatgcaggagctcgccatccagctgcacaagcgctgcgaggaggtagaggccacgcggggccaggtgtgtcaggagcaggagctgcgcgccgtggtggagagctgcctgctggagcaggaccgcgcccgcgaggacctccaggcccggctgcgggagacgtgggccctggcccgggatgctgccctcgtcctggaccagctgcgagcctgtcaagctgagctgtcatctcgagtgaggcaggaccagccccctggtgcagccactctgggcctagccgtccccccagctgactccaagggctggcaagcgtccctgcaggccatgagcctccccgagctctcgggagccctggaggaccgtgtccgtgagatggggcaagcactgtgcttagtgacccagagcctggagaagctgcaggtgctgaacgggaagaagtggcgggagacctagcctgcgggccgaatctgacgttgggtgattggtccaccctgaagctgtgtgccagggagtgaggaggacagtgagcaggtagctgccatgtgcagcccaggcccagtgggggccagaggatcaggccccgggagcagccggcagacagaggcaagacgggggctgcggccctggctcggcagctcgggccagcactgaggcgggacgagggcctcacccagaacctcgtggtgaggcccagagttcatgggctgccctggcccataccaggcagggccctggggggaaagtgtatccatatacacgcacaggtgccaactgaggtgggaccttaggaatgaggactggggcacctggaaaatgccattttttggaaaataaaatttaagaacagct

SEQ ID NO: 107535 - DNA, 2272 bp, Homo sapiens
  Payload ID: 1102
  Gene Symbol: ANKS3
  Gene Name: ankyrin repeat and sterile alpha motif domain containing 3
  ENST ID: ENST00000450067
  CDS Start-End: 225-1874
ctgaccggaaggtccgggtgcgggacgtgtgcattccacggcgcccgggagctgtcccggtgccgacccgcgagcttcccggcgtgctccgcgccctcccgcaactacttccggggcgggtgccgggggcggtgccccggcgagggagcgtggcggcgagctgtttggggggggttggcgacggcagcccgagggcggcgcaaggcctgaggcccagcacagtgatgtccgagctcagcgatgaagccagcgagccggaactcctgaaccgcagcttgtccatgtggcacgggctcgggacacaggtcagcggggaggagctggatgtccccctggatcttcacacagctgcttccattggccagtatgaagtggtgaaggagtgtgtgcagcgggagccgatatgtggatttactcccttgatggaagcagctgctgctggccatgagataatcgtgcagtattttctgaatcacggagtcaaggtggacgcgagagaccacagtggagccacagcccggatgctggccaagcagtacggacacatgaagatcgtggccttgatggacacttactcgccctctctgcccaagagcctctatcggagcccagaaaagtacgaagatctgagctcttctgacgagtcctgccctgctcctcagagacagaggccttgccggaagaagggtgtcagcatccacgagggaccgcgagccctggccaggatcacaggcattggcctgggcggcagagccccacggcctcgctatgagcaggctcctccccgtggctatgtcaccttcaacagcagtggcgagaaccccctggaagaagagggcctctgctgccgggatgtcacctcccccatcaatgagcgggatgtggagagcagcagcagcagcagcagtcgggaggaacatgctttctgtgccaacctggggcccgtccagagcagcagcagcagcgagggcctggccagagcccaggggctcagcagcgaagcttctgtggagagcaacgaggactcggatcatgcctgtaaaagctcagctcgcaaacaagctaaaagttacatgaagaccaagaatcctgacagccagtggcctccccgcgctgcaactgacagggaaggctttctcgctgagtccagcccccagactcagagggccccctactcaggaccccaggaccttgccgcactgctggagcagatcgggtgtctgaagtacctgcaggtgtttgaggagcaggacgtggacctccgcatctttctgaccctcactgagagcgacctgaaggaaattggcatcacgctgtttgggcccaagaggaagatgacgtccgccattgcccgctggcacagcagtgcccgcccacccggggatgccctggagctggcctacgccgaccggctggaggctgagatgcaggagctcgccatccagctgcacaagcgctgcgaggaggtagaggccacgcggggccaggtgtgtcaggagcaggagctgcgcgccgtggtggagagctgcctgctggagcaggaccgcgcccgcgaggacctccaggcccggctgcgggagacgtgggccctggcccgggatgctgccctcgtcctggaccagctgcgagcctgtcaagctgagctgtcatctcgagtgaggcaggaccagccccctggtgcagccactctgggcctagccgtccccccagctgactccaagggctggcaagcgtccctgcaggccatgagcctccccgagctctcgggagccctggaggaccgtgtccgtgagatggggcaagcactgtgcttagtgacccagagcctggagaagctgcaggtgctgaacgggaagaagtggcgggagacctagcctgcgggccgaatctgacgttgggtgattggtccaccctgaagctgtgtgccagggagtgaggaggacagtgagcaggtagctgccatgtgcagcccaggcccagtgggggccagaggatcaggccccgggagcagccggcagacagaggcaagacgggggctgcggccctggctcggcagctcgggccagcactgaggcgggacgagggcctcacccagaacctcgtggtgaggcccagagttcatgggctgccctggcccataccaggcagggccctggggggaaagtgtatccatatacacgcacaggtgccaactgaggtgggaccttaggaatgaggactggggcacctggaaaatgccattttttggaaaataaaatttaagaacagctag

SEQ ID NO: 107536 - DNA, 2265 bp, Homo sapiens
  Payload ID: 1102
  Gene Symbol: ANKS3
  Gene Name: ankyrin repeat and sterile alpha motif domain containing 3
  ENST ID: ENST00000446014
  CDS Start-End: 286-1869
gctagtgcagtggtgtagcaggggcaggaccagcctgtttcatgccctggaacaaccagccaggaaagatctaacccttgggccttcctcctcagtgatgtccgagctcagcgatgaagccagcgagccggaactcctgaaccgcagcttgtccatgtggcacgggctcgggacacaggtcagcggggaggagctggatgtccccctggatcttcacacagctgcttccattggccagtatgaagtggtgaaggagtgtgtgcagcgcaaggtgcagagctagaaatgaaagacatccagggctggacagccctcttccactgtaccagcgccgggcaccagcacatggtcaggttcctcttggacagtggagccaatgccaacgtgagggagccgatatgtggatttactcccttgatggaagcagctgctgctggccatgagataatcgtgcagtattttctgaatcacggagtcaaggtggacgcgagagaccacagtggagccacagcccggatgctggccaagcagtacggacacatgaagatcgtggccttgatggacacttactcgccctctctgcccaagagcctctatcggagcccagaaaagtacgaagatctgagctcttctgacgagtcctgccctgctcctcagagacagaggccttgccggaagaagggtgtcagcatccacgagggaccgcgagccctggccaggatcacaggcattggcctgggcggcagagccccacggcctcgctatgagcaggctcctccccgtggctatgtcaccttcaacagcagtggcgagaaccccctggaagaagagggcctctgctgccgggatgtcacctcccccatcaatgagcgggatgtggagagcagcagcagcagcagcagtcgggaggaacatgctttctgtgccaacctggggcccgtccagagcagcagcagcagcgagggcctggccagagcccaggggctcagcagcgaagcttctgtggagagcaacgaggactcggatcatgcctgtaaaagctcagctcgcaaacaagctaaaagttacatgaagaccaagaatcctgacagccagtggcctccccgcgctgcaactgacagggaaggctttctcgctgagtccagcccccagactcagagggccccctactcaggaccccaggaccttgccgcactgctggagcagatcgggtgtctgaagtacctgcaggtgtttgaggagcaggacgtggacctccgcatctttctgaccctcactgagagcgacctgaaggaaattggcatcacgctgtttgggcccaagaggaagatgacgtccgccattgcccgctggcacagcagtgcccgcccacccggggatgccctggagctggcctacgccgaccggctggaggctgagatgcaggagctcgccatccagctgcacaagcgctgcgaggaggtagaggccacgcggggccaggtgtgtcaggagcaggagctgcgcgccgtggtggagagctgcctgctggagcaggaccgcgcccgcgaggacctccaggcccggctgcgggagacgtgggccctggcccgggatgctgccctcgtcctggaccagctgcgagcctgtcaagctgagctgtcatctcgagtgaggcaggaccagccccctggtgcagccactctgggcctagccgtccccccagctgactccaagggctggcaagcgtccctgcaggccatgagcctccccgagctctcgggagccctggaggaccgtgtccgtgagatggggcaagcactgtgcttagtgacccagagcctggagaagctgcaggtgctgaacgggaagaagtggcgggagacctagcctgcgggccgaatctgacgttgggtgattggtccaccctgaagctgtgtgccagggagtgaggaggacagtgagcaggtagctgccatgtgcagcccaggcccagtgggggccagaggatcaggccccgggagcagccggcagacagaggcaagacgggggctgcggccctggctcggcagctcgggccagcactgaggcgggacgagggcctcacccagaacctcgtggtgaggcccagagttcatgggctgccctggcccataccaggcagggccctggggggaaagtgtatccatatacacgcacaggtgccaactgaggtgggaccttaggaatgaggactggggcacctggaaaatgccattttttggaaaataaaatttaagaacagct

SEQ ID NO: 107537 - DNA, 2302 bp, Homo sapiens
  Payload ID: 1102
  Gene Symbol: ANKS3
  Gene Name: ankyrin repeat and sterile alpha motif domain containing 3
  ENST ID: ENST00000592077
  CDS Start-End: 135-320
agctgtttggggggggttggcgacggcagcccgagggcggcgcaaggcctgaggcccagcacaggccaggtgcagtggctcacgcctatatttccaggactttgagaggctgaggcgggcggatcacctgagtgatgtccgagctcagcgatgaagccagcgagccggaactcctgaaccgcagcttgtccatgtggcacgggctcgggacacaggtcagcggggaggagctggatgtccccctggatcttcacacagctgcttccattggccagtatgaagtggtgaaggagtgtgtgcagcgcaaggtgcagagctagaaatgaaagacatccagggctggacagccctcttccactgtaccagcgccgggcaccagcacatggtcaggttcctcttggacagtggagccaatgccaacgtgagggagccgatatgtggatttactcccttgatggaagcagctgctgctggccatgagataatcgtgcagtattttctgaatcacggagtcaaggtggacgcgagagaccacagtggagccacagcccggatgctggccaagcagtacggacacatgaagatcgtggccttgatggacacttactcgccctctctgcccaagagcctctatcggagcccagaaaagtacgaagatctgagctcttctgacgagtcctgccctgctcctcagagacagaggccttgccggaagaagggtgtcagcatccacgagggaccgcgagccctggccaggatcacaggcattggcctgggcggcagagccccacggcctcgctatgagcaggctcctccccgtggctatgtcaccttcaacagcagtggcgagaaccccctggaagaagagggcctctgctgccgggatgtcacctcccccatcaatgagcgggatgtggagagcagcagcagcagcagcagtcgggaggaacatgctttctgtgccaacctggggcccgtccagagcagcagcagcagcgagggcctggccagagcccaggggctcagcagcgaagcttctgtggagagcaacgaggactcggatcatgcctgtaaaagctcagctcgcaaacaagctaaaagttacatgaagaccaagaatcctgacagccagtggcctccccgcgctgcaactgacagggaaggctttctcgctgagtccagcccccagactcagagggccccctactcaggaccccaggaccttgccgcactgctggagcagatcgggtgtctgaagtacctgcaggtgtttgaggagcaggacgtggacctccgcatctttctgaccctcactgagagcgacctgaaggaaattggcatcacgctgtttgggcccaagaggaagatgacgtccgccattgcccgctggcacagcagtgcccgcccacccggggatgccctggagctggcctacgccgaccggctggaggctgagatgcaggagctcgccatccagctgcacaagcgctgcgaggaggtagaggccacgcggggccaggtgtgtcaggagcaggagctgcgcgccgtggtggagagctgcctgctggagcaggaccgcgcccgcgaggacctccaggcccggctgcgggagacgtgggccctggcccgggatgctgccctcgtcctggaccagctgcgagcctgtcaagctgagctgtcatctcgagtgaggcaggaccagccccctggtgcagccactctgggcctagccgtccccccagctgactccaagggctggcaagcgtccctgcaggccatgagcctccccgagctctcgggagccctggaggaccgtgtccgtgagatggggcaagcactgtgcttagtgacccagagcctggagaagctgcaggtgctgaacgggaagaagtggcgggagacctagcctgcgggccgaatctgacgttgggtgattggtccaccctgaagctgtgtgccagggagtgaggaggacagtgagcaggtagctgccatgtgcagcccaggcccagtgggggccagaggatcaggccccgggagcagccggcagacagaggcaagacgggggctgcggccctggctcggcagctcgggccagcactgaggcgggacgagggcctcacccagaacctcgtggtgaggcccagagttcatgggctgccctggcccataccaggcagggccctggggggaaagtgtatccatatacacgcacaggtgccaactgaggtgggaccttaggaatgaggactggggcacctggaaaatgccattttttggaaaataaaatttaagaacagct

SEQ ID NO: 107538 - DNA, 1946 bp, Homo sapiens
  Payload ID: 1102
  Gene Symbol: ANKS3
  Gene Name: ankyrin repeat and sterile alpha motif domain containing 3
  Uniprot ID: Q6ZW76
  ENST ID: ENST00000585773
  CDS Start-End: 144-1895
gcggtgccccggcgagggagcgtggcggcgagctgtttggggggggttggcgacggcagcccgagggcggcgcaaggcctgaggcccagcacaggagagagttagatttgaataagaagaatggtggtggctggaccccgctgatgtatgcctcctacattggccacgacacaatcgtgcacctgctgcttgaggcgggggtgagtgtgaatgtgccgaccccagaagggcagactccactgatgctggcctccagctgtggcaacgagagcatcgcctactttcttctccagcaaggtgcagagctagaaatgaaagacatccagggctggacagccctcttccactgtaccagcgccgggcaccagcacatggtcaggttcctcttggacagtggagccaatgccaacgtgagggagccgatatgtggatttactcccttgatggaagcagctgctgctggccatgagataatcgtgcagtattttctgaatcacggagtcaaggtggacgcgagagaccacagtggagccacagcccggatgctggccaagcagtacggacacatgaagatcgtggccttgatggacacttactcgccctctctgcccaagagcctctatcggagcccagaaaagtacgaagatctgagctcttctgacgagtcctgccctgctcctcagagacagaggccttgccggaagaagggtgtcagcatccacgagggaccgcgagccctggccaggatcacaggcattggcctgggcggcagagccccacggcctcgctatgagcaggctcctccccgtggctatgtcaccttcaacagcagtggcgagaaccccctggaagaagagggcctctgctgccgggatgtcacctcccccatcaatgagcgggatgtggagagcagcagcagcagcagcagtcgggaggaacatgctttctgtgccaacctggggcccgtccagagcagcagcagcagcgagggcctggccagagcccaggggctcagcagcgaagcttctgtggagagcaacgaggactcggatcatgcctgtaaaagctcagctcgcaaacaagctaaaagttacatgaagaccaagaatcctgacagccagtggcctccccgcgctgcaactgacagggaaggctttctcgctgagtccagcccccagactcagagggccccctactcaggaccccaggaccttgccgcactgctggagcagatcgggtgtctgaagtacctgcaggtgtttgaggagcaggacgtggacctccgcatctttctgaccctcactgagagcgacctgaaggaaattggcatcacgctgtttgggcccaagaggaagatgacgtccgccattgcccgctggcacagcagtgcccgcccacccggggatgccctggagctggcctacgccgaccggctggaggctgagatgcaggagctcgccatccagctgcacaagcgctgcgaggaggtagaggccacgcggggccaggtgtgtcaggagcaggagctgcgcgccgtggtggagagctgcctgctggagcaggaccgcgcccgcgaggacctccaggcccggctgcgggagacgtgggccctggcccgggatgctgccctcgtcctggaccagctgcgagcctgtcaagctgagctgtcatctcgagtgaggcaggaccagccccctggtgcagccactctgggcctagccgtccccccagctgactccaagggctggcaagcgtccctgcaggccatgagcctccccgagctctcgggagccctggaggaccgtgtccgtgagatggggcaagcactgtgcttagtgacccagagcctggagaagctgcaggtgctgaacgggaagaagtggcgggagacctagcctgcgggccgaatctgacgttgggtgattggtccaccctgaagctgtgtg

SEQ ID NO: 107539 - DNA, 916 bp, Homo sapiens
  Payload ID: 1102
  Gene Symbol: ANKS3
  Gene Name: ankyrin repeat and sterile alpha motif domain containing 3
  ENST ID: ENST00000592068
  CDS Start-End: 40-684
agcccgagggcggcgcaaggcctgaggcccagcacagtgatgtccgagctcagcgatgaagccagcgagccggaactcctgaaccgcagcttgtccatgtggcacgggctcgggacacaggtcagcggggaggagctggatgtccccctggatcttcacacagctgcttccattggccagtatgaagtggtgaaggagtgtgtgcagcgggagccgatatgtggatttactcccttgatggaagcagctgctgctggccatgagataatcgtgcagtattttctgaatcacggagtcaaggtggacgcgagagaccacagtggagccacagcccggatgctggccaagcagtacggacacatgaagatcgtggccttgatggacacttactcgccctctctgcccaagagcctctatcggagcccagaaaagtacgaagatctgagctcttctgacgagtcctgccctgctcctcagagacagaggccttgccggaagaagggtgtcagcatccacgagggaccgcgagccctggccaggatcacaggcattggcctgggcggcagagccccacggcctcgctatggctcctccccgtggctatgtcaccttcaacagcagtggcgagaaccccctggaagaagagggcctctgctgccgggatgtcacctcccccatcaatgagcgggatgtggagagcagcagcagcagcagcagtcgggaggaacatgctttctgtgccaacctggggcccgtccagagcagcagcagcagcgagggcctggccagagcccaggggctcagcagcgaagcttctgtggagagcaacgaggactcggatcatgcctgtaaaagctcagctcgcaaacaagctaaaagttacatgaagaccaagaatcctgacagccagtggcct

SEQ ID NO: 107540 - DNA, 566 bp, Homo sapiens
  Payload ID: 1102
  Gene Symbol: ANKS3
  Gene Name: ankyrin repeat and sterile alpha motif domain containing 3
  ENST ID: ENST00000587005
  CDS Start-End: 40-420
agcccgagggcggcgcaaggcctgaggcccagcacagtgatgtccgagctcagcgatgaagccagcgagccggaactcctgaaccgcagcttgtccatgtggcacgggctcgggacacaggtcagcggggaggagctggatgtccccctggatcttcacacagctgcttccattggccagtatgaagtggtgaaggagtgtgtgcagcggagagagttagatttgaataagaagaatggtggtggctggaccccgctgatgtatgcctcctacattggccacgacacaatcgtgcacctgctgcttgaggcgggggtgagtgtgaatgtgccgaccccagaagggcagactccactgatgctggcctccagctgtggcaacgagagcatcgcctactttcttctccaggtgcagagctagaaatgaaagacatccagggctggacagccctcttccactgtaccagcgccgggcaccagcacatggtcaggttcctcttggacagtggagccaatgccaacgtgagggagccgatatgtggatttactcccttgatggaagcagct

SEQ ID NO: 107541 - DNA, 672 bp, Homo sapiens
  Payload ID: 1102
  Gene Symbol: ANKS3
  Gene Name: ankyrin repeat and sterile alpha motif domain containing 3
  ENST ID: ENST00000586166
  CDS Start-End: 155-672
gggcgggtgccgggggcggtgccccggcgagggagcgtggcggcgagctgtttggggggggttggcgacggcagcccgagggcggcgcaaggcctgaggcccagcacagggagtcaaggtggacgcgagagaccacagtggagccacagcccggatgctggccaagcagtacggacacatgaagatcgtggccttgatggacacttactcgccctctctgcccaagagcctctatcggagcccagaaaagtacgaagatctgagctcttctgacgagtcctgccctgctcctcagagacagaggccttgccggaagaagggtgtcagcatccacgagggaccgcgagccctggccaggatcacaggcattggcctgggcggcagagccccacggcctcgctatgagcaggctcctccccgtggctatgtcaccttcaacagcagtggcgagaaccccctggaagaagagggcctctgctgccgggatgtcacctcccccatcaatgagcgggatgtggagagcagcagcagcagcagcagtcgggaggaacatgctttctgtgccaacctggggcccgtccagagcagcagcagcagcgagggcctggccagagcccaggggctcagcagcgaagcttctgtggagagcaacgaggactcggatcatgcctg

SEQ ID NO: 107542 - DNA, 868 bp, Homo sapiens
  Payload ID: 1102
  Gene Symbol: ANKS3
  Gene Name: ankyrin repeat and sterile alpha motif domain containing 3
  ENST ID: ENST00000586159
  CDS Start-End: 226-411
gctgaccggaaggtccgggtgcgggacgtgtgcattccacggcgcccgggagctgtcccggtgccgacccgcgagcttcccggcgtgctccgcgccctcccgcaactacttccggggcgggtgccgggggcggtgccccggcgagggagcgtggcggcgagctgtttggggggggttggcgacggcagcccgagggcggcgcaaggcctgaggcccagcacagtgatgtccgagctcagcgatgaagccagcgagccggaactcctgaaccgcagcttgtccatgtggcacgggctcgggacacaggtcagcggggaggagctggatgtccccctggatcttcacacagctgcttccattggccagtatgaagtggtgaaggagtgtgtgcagcgcaaggtgcagagctagaaatgaaagacatccagggctggacagccctcttccactgtaccagcgccgggcaccagcacatggtcaggttcctcttggacagtggagccaatgccaacgtgagggagccgatatgtggatttactcccttgatggaagcagctgctgctggccatgagataatcgtgcagtattttctgaatcacggagtcaaggtggacgcgagagaccacagtggagccacagcccggatgctggccaagcagtacggacacatgaagatcgtggccttgatggacacttactcgccctctctgcccaagagcctctatcggagcccagaaaagtacgaagatctgagctcttctgacgagtcctgccctgctcctcagagacagaggccttgccggaagaagggtgtcagcatccacgagggaccgcgagccctggccaggatcacaggcattggcctggg

SEQ ID NO: 107543 - DNA, 566 bp, Homo sapiens
  Payload ID: 1102
  Gene Symbol: ANKS3
  Gene Name: ankyrin repeat and sterile alpha motif domain containing 3
  ENST ID: ENST00000592190
  CDS Start-End: 76-566
gtggcggcgagctgtttggggggggttggcgacggcagcccgagggcggcgcaaggcctgaggcccagcacagtgatgtccgagctcagcgatgaagccagcgagccggaactcctgaaccgcagcttgtccatgtggcacgggctcgggacacaggtcagcggggaggagctggatgtccccctggatcttcacacagctgcttccattggccagtatgaagtggtgaaggagtgtgtgcagcggagagagttagatttgaataagaagaatggtggtggctggaccccgctgatgtatgcctcctacattggccacgacacaatcgtgcacctgctgcttgaggcgggggtgagtgtgaatgtgccgaccccagaagggcagactccactgatgctggcctccagctgtggcaacgagagcatcgcctactttcttctccagcaaggtgcagagctagaaatgaaagacatccagggctggacagccctcttccactgtaccagcgccgggcaccagcacatggtcaggttcctcttggacagtggagccaatgccaacgtgag

SEQ ID NO: 107544 - DNA, 2198 bp, Homo sapiens
  Payload ID: 1102
  Gene Symbol: ANKS3
  Gene Name: ankyrin repeat and sterile alpha motif domain containing 3
  ENST ID: ENST00000590730
  CDS Start-End: 102-344
cgggggcggtgccccggcgagggagcgtggcggcgagctgtttggggggggttggcgacggcagcccgagggcggcgcaaggcctgaggcccagcacagtgatgtccgagctcagcgatgaagccagcgagccggaactcctgaaccgcagcttgtccatgtggcacgggctcgggacacaggtcagcggggaggagctggatgtccccctggatcttcacacagctgcttccattggccagtatgaagtggtgaaggagtgtgtgcagcgggagtcaaggtggacgcgagagaccacagtggagccacagcccggatgctggccaagcagtacggacacatgaagatcgtggccttgatggacacttactcgccctctctgcccaagagcctctatcggagcccagaaaagtacgaagatctgagctcttctgacgagtcctgccctgctcctcagagacagaggccttgccggaagaagggtgtcagcatccacgagggaccgcgagccctggccaggatcacaggcattggcctgggcggcagagccccacggcctcgctatgagcaggctcctccccgtggctatgtcaccttcaacagcagtggcgagaaccccctggaagaagagggcctctgctgccgggatgtcacctcccccatcaatgagcgggatgtggagagcagcagcagcagcagcagtcgggaggaacatgctttctgtgccaacctggggcccgtccagagcagcagcagcagcgagggcctggccagagcccaggggctcagcagcgaagcttctgtggagagcaacgaggactcggatcatgcctgtaaaagctcagctcgcaaacaagctaaaagttacatgaagaccaagaatcctgacagccagtggcctccccgcgctgcaactgacagggaaggctttctcgctgagtccagcccccagactcagagggccccctactcaggaccccaggtaagaccgcttgtgaaactggaggttacactcagagacggcactttttgtgacttaggaggcatgtgttgtgtatatgacgtgccaggcgctgctaggagaacagaatggcggtggcatccccatggcctgttaggctccacaggctcacagccggctccatggctggcagccccgctgcagcgcttctactctgttcctctccacggaaaggacctgtctccctgctttccatactggagttggcctccctgagcctggggagaagaaaagcacacttgacctcagagctgcctgcaggagtctgacaagatgtggttgaagcagagacaggaactacacacagtgtgtgcttggtgatggttacagctgccaccatcctcctcctttctgtggtccctctgaccacacattaccttagggatcagaggtgtgactcacagctcagctgtctcacctgtgtctgctgagttctcctaccctgtgtgggcagaagaggcacggagaggagaggcagagggaagctctggttggttatttggtttgtttgttcgagacggagtctcgcactgtcatctgggctggagtgcagtggcgcgatctcggctcactgcaacctcctcctcctgggttcaagcgattctcctgcctcagcctcccaagtagctgggattacaggcacccgccaccatgcccatctaattttttgtatttttagtagagacgggatttcactatgttggccaggctggtctcaaattcctgacatcgtgatccgcccgcctcgacctcccaaagtgctgggattacaggcgtgagccaccacacctggcctggtgccatgcccggcctggctggttatttgttaaagcactggctttgctgttcagtagagccttggatttgccggcttctccctgcagcccctggctcagtgagcaggcacacgtctcggtcccttcaacatacgttgagtggagtctggtcagggtagtgtcctaagtatgtttctttcagaaaatagcttgaagaaaatgtcagagtaacatttgtttgtccattaaaagcaataaactctcaaaagtaggatttctggagttgaaaagtaaatgaaatgaaaatatcactagacgagctcacagcagaattgagcaggcagaagagtcagacaacttgtgaacacaggtcacctgagatcatctcgcttgaggaacag

SEQ ID NO: 107545 - DNA, 1146 bp, Homo sapiens
  Payload ID: 1102
  Gene Symbol: ANKS3
  Gene Name: ankyrin repeat and sterile alpha motif domain containing 3
  ENST ID: ENST00000592421
  CDS Start-End: 193-1146
attccacggcgcccgggagctgtcccggtgccgacccgcgagcttcccggcgtgctccgcgccctcccgcaactacttccggggcgggtgccgggggcggtgccccggcgagggagcgtggcggcgagctgtttggggggggttggcgacggcagcccgagggcggcgcaaggcctgaggcccagcacagtgatgtccgagctcagcgatgaagccagcgagccggaactcctgaaccgcagcttgtccatgtggcacgggctcgggacacaggtcagcggggaggagctggatgtccccctggatcttcacacagctgcttccattggccagtatgaagtggtgaaggagtgtgtgcagcgggagccgatatgtggatttactcccttgatggaagcagctgctgctggccatgagataatcgtgcagtattttctgaatcacggagtcaaggtggacgcgagagaccacagtggagccacagcccggatgctggccaagcagtacggacacatgaagatcgtggccttgatggacacttactcgccctctctgcccaagagcctctatcggagcccagaaaagtacgaagatctgagctcttctgacgagtcctgccctgctcctcagagacagaggccttgccggaagaagggtgtcagcatccacgagggaccgcgagccctggccaggatcacaggcattggcctgggcggcagagccccacggcctcgctatgagcaggctcctccccgtggctatgtcaccttcaacagcagtggcgagaaccccctggaagaagagggcctctgctgccgggatgtcacctcccccatcaatgagcgggatgtggagagcagcagcagcagcagcagtcgggaggaacatgctttctgtgccaacctggggcccgtccagagcagcagcagcagcgagggcctggccagagcccaggggctcagcagcgaagcttctgtggagagcaacgaggactcggatcatgcctgtaaaagctcagctcgcaaacaagctaaaagttacatgaagaccaagaatcctgacagccagtggcctccccgcgctgcaactgacagggaaggctttctcgctgagtccagcccccagactcagagggccccctactca

SEQ ID NO: 107546 - DNA, 561 bp, Homo sapiens
  Payload ID: 1102
  Gene Symbol: ANKS3
  Gene Name: ankyrin repeat and sterile alpha motif domain containing 3
  ENST ID: ENST00000589065
  CDS Start-End: 163-561
ggtgccccggcgagggagcgtggcggcgagctgtttggggggggttggcgacggcagcccgagggcggcgcaaggcctgaggcccagcacaggccaggtgcagtggctcacgcctatatttccaggactttgagaggctgaggcgggcggatcacctgagtgatgtccgagctcagcgatgaagccagcgagccggaactcctgaaccgcagcttgtccatgtggcacgggctcgggacacaggtcagcggggaggagctggatgtccccctggatcttcacacagctgcttccattggccagtatgaagtggtgaaggagtgtgtgcagcgggagccgatatgtggatttactcccttgatggaagcagctgctgctggccatgagataatcgtgcagtattttctgaatcacggagtcaaggtggacgcgagagaccacagtggagccacagcccggatgctggccaagcagtacggacacatgaagatcgtggccttgatggacacttactcgccctctctgcccaagagcctctatcggagcccagaaaagtacgaa

SEQ ID NO: 107547 - DNA, 867 bp, Homo sapiens
  Payload ID: 1102
  Gene Symbol: ANKS3
  Gene Name: ankyrin repeat and sterile alpha motif domain containing 3
  ENST ID: ENST00000588513
  CDS Start-End: 1-867
tctgacgagtcctgccctgctcctcagagacagaggccttgccggaagaagggtgtcagcatccacgagggaccgcgagccctggccaggatcacaggcattggcctgggcggcagagccccacggcctcgctatgagcaggctcctccccgtggctatgtcaccttcaacagcagtggcgagaaccccctggaagaagagggcctctgctgccgggatgtcacctcccccatcaatgagcgggatgtggagagcagcagcagcagcagcagtcggggaccttgccgcactgctggagcagatcgggtgtctgaagtacctgcaggtgtttgaggagcaggacgtggacctccgcatctttctgaccctcactgagagcgacctgaaggaaattggcatcacgctgtttgggcccaagaggaagatgacgtccgccattgcccgctggcacagcagtgcccgcccacccggggatgccctggagctggcctacgccgaccggctggaggctgagatgcaggagctcgccatccagctgcacaagcgctgcgaggaggtagaggccacgcggggccaggtgtgtcaggagcaggagctgcgcgccgtggtggagagctgcctgctggagcaggaccgcgcccgcgaggacctccaggcccggctgcgggagacgtgggccctggcccgggatgctgccctcgtcctggaccagctgcgagcctgtcaagctgagctgtcatctcgagtgaggcaggaccagccccctggtgcagccactctgggcctagccgtccccccagctgactccaagggctggcaagcgtccctgcaggccatgagcctccccgagctctcgggagccctgga

SEQ ID NO: 107548 - DNA, 540 bp, Homo sapiens
  Payload ID: 1102
  Gene Symbol: ANKS3
  Gene Name: ankyrin repeat and sterile alpha motif domain containing 3
  ENST ID: ENST00000591281
  CDS Start-End: 52-237
gttggcgacggcagcccgagggcggcgcaaggcctgaggcccagcacagtgatgtccgagctcagcgatgaagccagcgagccggaactcctgaaccgcagcttgtccatgtggcacgggctcgggacacaggtcagcggggaggagctggatgtccccctggatcttcacacagctgcttccattggccagtatgaagtggtgaaggagtgtgtgcagcgcaaggtgcagagctagaaatgaaagacatccagggctggacagccctcttccactgtaccagcgccgggcaccagcacatggtcaggttcctcttggacagtggagccaatgccaacgtgagggagccgatatgtggatttactcccttgatggaagcagctgctgctggccatgagataatcgtgcagtattttctgaatcacatggagtcgccctctgtcgcccaggctggagtgcagcagcttactgcaatctctgcctcccgtgttgaagcgattctcctgcctcagcctcccgagtagctgggattacaggtgt

SEQ ID NO: 107549 - DNA, 2291 bp, Homo sapiens
  Payload ID: 1102
  Gene Symbol: ANKS3
  Gene Name: ankyrin repeat and sterile alpha motif domain containing 3
  ENST ID: ENST00000590193
  CDS Start-End: 47-469
cgacggcagcccgagggcggcgcaaggcctgaggcccagcacagtgatgtccgagctcagcgatgaagccagcgagccggaactcctgaaccgcagcttgtccatgtggcacgggctcgggacacaggtcagcggggaggagctggatgtccccctggatcttcacacagctgcttccattggccagtatgaagtggtgaaggagtgtgtgcagcggagagagttagatttgaataagaagaatggtggtggctggaccccgctgatgtatgcctcctacattggccacgacacaatcgtgcacctgctgcttgaggcgggggtgagtgtgaatgtgccgaccccagaagggcagactccactgatgctggcctccagctgtggcaacgagagcatcgcctactttcttctccagggagccgatatgtggatttactcccttgatggaagcagctgctgctggccatgagataatcgtgcagtattttctgaatcacggagtcaaggtggacgcgagagaccacagtggagccacagcccggatgctggccaagcagtacggacacatgaagatcgtggccttgatggacacttactcgccctctctgcccaagagcctctatcggagcccagaaaagtacgaagatctgagctcttctgacgagtcctgccctgctcctcagagacagaggccttgccggaagaagggtgtcagcatccacgagggaccgcgagccctggccaggatcacaggcattggcctgggcggcagagccccacggcctcgctatgagcaggctcctccccgtggctatgtcaccttcaacagcagtggcgagaaccccctggaagaagagggcctctgctgccgggatgtcacctcccccatcaatgagcgggatgtggagagcagcagcagcagcagcagtcgggaggaacatgctttctgtgccaacctggggcccgtccagagcagcagcagcagcgagggcctggccagagcccaggggctcagcagcgaagcttctgtggagagcaacgaggactcggatcatgcctgtaaaagctcagctcgcaaacaagctaaaagttacatgaagaccaagaatcctgacagccagtggcctccccgcgctgcaactgacagggaaggctttctcgctgagtccagcccccagactcagagggccccctactcaggaccccaggaccttgccgcactgctggagcagatcgggtgtctgaagtacctgcaggtgtttgaggagcaggacgtggacctccgcatctttctgaccctcactgagagcgacctgaaggaaattggcatcacgctgtttgggcccaagaggaagatgacgtccgccattgcccgctggcacagcagtgcccgcccacccggggatgccctggagctggcctacgccgaccggctggaggctgagatgcaggagctcgccatccagctgcacaagcgctgcgaggaggtagaggccacgcggggccaggtgtgtcaggagcaggagctgcgcgccgtggtggagagctgcctgctggagcaggaccgcgcccgcgaggacctccaggcccggctgcgggagacgtgggccctggcccgggatgctgccctcgtcctggaccagctgcgagcctgtcaagctgagctgtcatctcgagtgaggcaggaccagccccctggtgcagccactctgggcctagccgtccccccagctgactccaagggctggcaagcgtccctgcaggccatgagcctccccgagctctcgggagccctggaggaccgtgtccgtgagatggggcaagcactgtgcttagtgacccagagcctggagaagctgcaggtgctgaacgggaagaagtggcgggagacctagcctgcgggccgaatctgacgttgggtgattggtccaccctgaagctgtgtgccagggagtgaggaggacagtgagcaggtagctgccatgtgcagcccaggcccagtgggggccagaggatcaggccccgggagcagccggcagacagaggcaagacgggggctgcggccctggctcggcagctcgggccagcactgaggcgggacgagggcctcacccagaacctcgtggtgaggcccagagttcatgggctgccctggcccataccaggcagggccctggggggaaagtgtatccatatacacgcacaggtgccaactgaggtgggaccttaggaatgaggactggggcacctggaaaatgccattttttggaaaataaaatttaagaacagct

SEQ ID NO: 107550 - DNA, 1128 bp, Homo sapiens
  Payload ID: 1102
  Gene Symbol: ANKS3
  Gene Name: ankyrin repeat and sterile alpha motif domain containing 3
  ENST ID: ENST00000592698
  CDS Start-End: 803-1128
ggcgggtgccgggggcggtgccccggcgagggagcgtggcggcgagctgtttggggggggttggcgacggcagcccgagggcggcgcaaggcctgaggcccagcacagtgatgtccgagctcagcgatgaagccagcgagccggaactcctgaaccgcagcttgtccatgtggcacgggctcgggacacaggtcagcggggaggagctggatgtccccctggatcttcacacagctgcttccattggccagtatgaagtggtgaaggagtgtgtgcagcggagagagttagatttgaataagaagaatggtggtggctggaccccgctgatgtatgcctcctacattggccacgacacaatcgtgcacctgctgcttgaggcgggggtgagtgtgaatgtgccgaccccagaagggcagactccactgatgctggcctccagctgtggcaacgagagcatcgcctactttcttctccagcatggccgcctggagggcgcccgccccacgcagaggagatgaggccgtaacgcacgttctgtgttctcttgaagcaaggtgcagagctagaaatgaaagacatccagggctggacagccctcttccactgtaccagcgccgggcaccagcacatggtcaggttcctcttggacagtggagccaatgccaacgtgagggagccgatatgtggatttactcccttgatggaagcagctgctgctggccatgagataatcgtgcagtattttctgaatcacggagtcaaggtggacgcgagagaccacagtggagccacagcccggatgctggccaagcagtacggacacatgaagatcgtggccttgatggacacttactcgccctctctgcccaagagcctctatcggagcccagaaaagtacgaagatctgagctcttctgacgagtcctgccctgctcctcagagacagaggccttgccggaagaagggtgtcagcatccacgagggaccgcgagccctggccaggatcacaggcattggcctgggcggcagagccccacggcctcgctatgagcaggctcctccccgtggctatgtcaccttcaacagcagtggcgagaaccccctggaagaagagggcctctgctg

SEQ ID NO: 107551 - DNA, 968 bp, Homo sapiens
  Payload ID: 1102
  Gene Symbol: ANKS3
  Gene Name: ankyrin repeat and sterile alpha motif domain containing 3
  ENST ID: ENST00000586605
  CDS Start-End: 204-968
ggagctgtcccggtgccgacccgcgagcttcccggcgtgctccgcgccctcccgcaactacttccggggcgggtgccgggggcggtgccccggcgagggagcgtggcggcgagctgtttggggggggttggcgacggcagcccgagggcggcgcaaggcctgaggcccagcacagggagccgatatgtggatttactcccttgatggaagcagctgctgctggccatgagataatcgtgcagtattttctgaatcacggagtcaaggtggacgcgagagaccacagtggagccacagcccggatgctggccaagcagtacggacacatgaagatcgtggccttgatggacacttactcgccctctctgcccaagagcctctatcggagcccagaaaagtacgaagatctgagctcttctgacgagtcctgccctgctcctcagagacagaggccttgccggaagaagggtgtcagcatccacgagggaccgcgagccctggccaggatcacaggcattggcctgggcggcagagccccacggcctcgctatgagcaggctcctccccgtggctatgtcaccttcaacagcagtggcgagaaccccctggaagaagagggcctctgctgccgggatgtcacctcccccatcaatgagcgggatgtggagagcagcagcagcagcagcagtcgggaggaacatgctttctgtgccaacctggggcccgtccagagcagcagcagcagcgagggcctggccagagcccaggggctcagcagcgaagcttctgtggagagcaacgaggactcggatcatgcctgtaaaagctcagctcgcaaacaagctaaaagttacatgaagaccaagaatcctgacagccagtggcctccccgcgctgcaactgacagggaaggctttctcgctgagtccagcccccagactcagagggccccctactcaggaccccag

SEQ ID NO: 107552 - DNA, 723 bp, Homo sapiens
  Payload ID: 1102
  Gene Symbol: ANKS3
  Gene Name: ankyrin repeat and sterile alpha motif domain containing 3
  ENST ID: ENST00000590147
  CDS Start-End: 226-723
cacaggtgggttccgcggcggcccggccccagcacttgccggcacctgcagcccgcctagacccggcgctcgggcgtcccgcgctgcacttgctcgccgcgtgactggaggaccgagcccccacattttctttatgtggttgtggtgggggcacagtaatgccctgtgcgccgtagcgttcctgtggggatgtggccggggggcgtcgggaagcgtcactgcttgatgtccgagctcagcgatgaagccagcgagccggaactcctgaaccgcagcttgtccatgtggcacgggctcgggacacaggtcagcggggaggagctggatgtccccctggatcttcacacagctgcttccattggccagtatgaagtggtgaaggagtgtgtgcagcggagagagttagatttgaataagaagaatggtggtggctggaccccgctgatgtatgcctcctacattggccacgacacaatcgtgcacctgctgcttgaggcgggggtgagtgtgaatgtgccgaccccagaagggcagactccactgatgctggcctccagctgtggcaacgagagcatcgcctactttcttctccagcaaggtgcagagctagaaatgaaagacatccagggctggacagccctcttccactgtaccagcgccgggcaccagcacatggtcaggttcctcttggacagtggagccaatgccaacgtgagggagccg

SEQ ID NO: 107553 - DNA, 580 bp, Homo sapiens
  Payload ID: 1102
  Gene Symbol: ANKS3
  Gene Name: ankyrin repeat and sterile alpha motif domain containing 3
  ENST ID: ENST00000592711
  CDS Start-End: 193-537
acttgccggcacctgcagcccgcctagacccggcgctcgggcgtcccgcgctgcacttgctcgccgcgtgactggaggaccgagcccccacattttctttatgtggttgtggtgggggcacagtaatgccctgtgcgccgtagcgttcctgtggggatgtggccggggggcgtcgggaagcgtcactgcttgatgtccgagctcagcgatgaagccagcgagccggaactcctgaaccgcagcttgtccatgtggcacgggctcgggacacaggtcagcggggaggagctggatgtccccctggatcttcacacagctgcttccattggccagtatgaagtggtgaaggagtgtgtgcagcgggagccgatatgtggatttactcccttgatggaagcagctgctgctggccatgagataatcgtgcagtattttctgaatcactcgccctctgtcgcccaggctggagtgcagcagcttactgcaatctctgcctcccgtgttgaagcgattctcctgcctcagcctcccgagtagctgggattacagggagtcaaggtggacgcgagagaccacagtg

SEQ ID NO: 107554 - DNA, 2387 bp, Homo sapiens
  Payload ID: 1102
  Gene Symbol: ANKS3
  Gene Name: ankyrin repeat and sterile alpha motif domain containing 3
  Uniprot ID: Q6ZW76
  ENST ID: ENST00000614075
  CDS Start-End: 19-1989
gggccttcctcctcagtgatgtccgagctcagcgatgaagccagcgagccggaactcctgaaccgcagcttgtccatgtggcacgggctcgggacacaggtcagcggggaggagctggatgtccccctggatcttcacacagctgcttccattggccagtatgaagtggtgaaggagtgtgtgcagcggagagagttagatttgaataagaagaatggtggtggctggaccccgctgatgtatgcctcctacattggccacgacacaatcgtgcacctgctgcttgaggcgggggtgagtgtgaatgtgccgaccccagaagggcagactccactgatgctggcctccagctgtggcaacgagagcatcgcctactttcttctccagcaaggtgcagagctagaaatgaaagacatccagggctggacagccctcttccactgtaccagcgccgggcaccagcacatggtcaggttcctcttggacagtggagccaatgccaacgtgagggagccgatatgtggatttactcccttgatggaagcagctgctgctggccatgagataatcgtgcagtattttctgaatcacggagtcaaggtggacgcgagagaccacagtggagccacagcccggatgctggccaagcagtacggacacatgaagatcgtggccttgatggacacttactcgccctctctgcccaagagcctctatcggagcccagaaaagtacgaagatctgagctcttctgacgagtcctgccctgctcctcagagacagaggccttgccggaagaagggtgtcagcatccacgagggaccgcgagccctggccaggatcacaggcattggcctgggcggcagagccccacggcctcgctatgagcaggctcctccccgtggctatgtcaccttcaacagcagtggcgagaaccccctggaagaagagggcctctgctgccgggatgtcacctcccccatcaatgagcgggatgtggagagcagcagcagcagcagcagtcgggaggaacatgctttctgtgccaacctggggcccgtccagagcagcagcagcagcgagggcctggccagagcccaggggctcagcagcgaagcttctgtggagagcaacgaggactcggatcatgcctgtaaaagctcagctcgcaaacaagctaaaagttacatgaagaccaagaatcctgacagccagtggcctccccgcgctgcaactgacagggaaggctttctcgctgagtccagcccccagactcagagggccccctactcaggaccccaggaccttgccgcactgctggagcagatcgggtgtctgaagtacctgcaggtgtttgaggagcaggacgtggacctccgcatctttctgaccctcactgagagcgacctgaaggaaattggcatcacgctgtttgggcccaagaggaagatgacgtccgccattgcccgctggcacagcagtgcccgcccacccggggatgccctggagctggcctacgccgaccggctggaggctgagatgcaggagctcgccatccagctgcacaagcgctgcgaggaggtagaggccacgcggggccaggtgtgtcaggagcaggagctgcgcgccgtggtggagagctgcctgctggagcaggaccgcgcccgcgaggacctccaggcccggctgcgggagacgtgggccctggcccgggatgctgccctcgtcctggaccagctgcgagcctgtcaagctgagctgtcatctcgagtgaggcaggaccagccccctggtgcagccactctgggcctagccgtccccccagctgactccaagggctggcaagcgtccctgcaggccatgagcctccccgagctctcgggagccctggaggaccgtgtccgtgagatggggcaagcactgtgcttagtgacccagagcctggagaagctgcaggtgctgaacgggaagaagtggcgggagacctagcctgcgggccgaatctgacgttgggtgattggtccaccctgaagctgtgtgccagggagtgaggaggacagtgagcaggtagctgccatgtgcagcccaggcccagtgggggccagaggatcaggccccgggagcagccggcagacagaggcaagacgggggctgcggccctggctcggcagctcgggccagcactgaggcgggacgagggcctcacccagaacctcgtggtgaggcccagagttcatgggctgccctggcccataccaggcagggccctggggggaaagtgtatccatatacacgcacaggtgccaactgaggtgggaccttaggaatgaggactggggcacctggaaaatgccattttttggaaaataaaatttaagaacagctag

SEQ ID NO: 107555 - DNA, 4352 bp, Homo sapiens
  Payload ID: 1103
  Gene Symbol: ANKS4B
  Gene Name: ankyrin repeat and sterile alpha motif domain containing 4B
  Uniprot ID: Q8N8V4
  ENST ID: ENST00000311620
  CDS Start-End: 74-1327
ataggaaggttgctccgccaacaccttgctctgcctggagagacatctggccaagttctggtgagcaggaaaaatgtctactcgttaccaccaagctgctagtgatagttacctggaacttctaaaagaggctaccaagcgagatctaaatctttcggatgaagacggcatgactcctactctcttggcagcctaccatgggaacttggaagccctagagataatctgcagtagaggaggggaccctgataggtgtgacatctggggaaacactcctctacattttgcagcctccaatggccatgcccactgcgtctcattcctggtcaactttggtgccaacatctttgccctggataatgacttacagactccactggatgctgctgccagcagggagcagaatgaatgtgttgctctcctggacaaggctgccactgcacagaacatcatgaaccccaagaaggtcaccaggctgaaggagcaggctcagaagaatgccaggaggcagatcaaagagtgtgagaggctccaggagaagcaccaaaataagatggcccacacctacagcaaggaggaatccgggactctctcttcttccaagggtaccttctccagatcatccccttcaaatgcttctgctcctggcacattcgggtcactatctaagggcattaaagacactttcaagatcaagttcaagaagaacaaagatacagcagaacaggtggggaaggaaggcagaagtgggcagaggaacgtgatggaagtgttcagagaggaagaggaagactcgttctcaggggacttcaaagagaagctccagttgtcagcagaggaggacggcagtgtgcaccatgaatccattctcaatcgtccaggtctaggaagtattgtttttagaaggaacaggatatcgagtcctgaagacatctcagatagcaagagagagtttggttttaaactgcccagtgaattgcttcaaagacaaggagcatcagaggctgatgagggtgcagctgatgaagagggagaggaaaacggcctcaaagatgatctgccgtgggatgacgatgaagtggagtgggaggaagatgtggtcgatgccacgcccctggaagtgttcttgctgtctcagcacctggaagaattcctgcctatcttcaagagagagcagattgatctagaagctctgctgctctgctctgatgaggaccttcagagcatacaaatgcagctgggtcccaggaagaaagttctgaatgctatcaacaggaggaagcaggtgcttcaacagcctgggcagctggtcgacaccagcctgtgatggagagttttggcctggagcattggggtgatgctgtggcccgctggcagcactccaggcggcaccccctctttacccaatgccagaccactgggaatggattctagggcatcggaaatgcctacctgagagagagacccaaactttactctgggaggtaggctatgcccatccaaataaatctccatgagaaacttgaggagacttcataacaagaatctggcatttctcttcagttatcttatatgtacatataattgtttttgtggttgttttgttttgttttgttttgttttttggagatgaaggtctcagtctcttacccaggctagggtgcagtggtatgatcatagttcactgtattctcaacctcctgggctcaaatgatctcctcccacctcagcctcccaagtagctgagactacaggttcacaccccccacacctggcttattttgtatgttttagtagaggtggggtcttgccacattgcccaggctggtctcaaactcctggcctcaagcaatcctcccacctcagcctcctaaagcactgggattacaggtgtgaaccaccgtacccagcctatctttttgatacttttgaataaagaaagggtcatatgcatgacaggaaaatgaaagaaacttcctttacttttctatctctggatttaaaattataatctcatcacattatcctgctgcttgctttccgatctgtgtaacctgggaattccaattctttttctctcctgagatctatgactttgcctagtggtagagactagagttctttcctggcctgcggcttgatgcccaacttaaatgcatctaaccctttaacaaatgtgtacatgtttacaagtaatggaaatgcgtctataatactcctgcctgagaatagagacagagtggtggtggggagagtgaagaaagagatagaatacaggtggtacctgttgtggactgaattgcgtcaaattcatatgttggagctctaacccctaatgtgactgtaattggaaataagacctttaaagaagtgattaaggttaaatgaagtcataagaatgcaaccctaatcctgtaggactggtgtcctttttttccctttttttttttttttttgagatggagccttgctctgtcactcatgctggagtgcagtggcgtgatctcagctcactgcaacccccgcctcccaggttcgagcacttttcatgcctcagcctcctgagtagctgggattacaggcgtgcaccacaacgcctggctaagtttttgtatttttagtagaggcggggtttcaccatgttggccaggctggtctcaaactcctgacctcaggtgatccacctgcctcggcctcccagagtgctgggattacaggcatgagccactgcacctggcctaggactggtgtcctaagaagaggaagagacacttaggtggaaggcacacagagaggccacgtgaggacacagtgagaaggtggccgtctgcaagccgaggagggggcctcaggagaaaccaaccctgcaatcaccttgatcttgggctttcagcccccaaaggtgtgagaaaataaacttcggttgataaactgctgttgttgaagccatccagtctgtggcattttgttatggcagtcctagcagaataatactgtcctaagtaagagggttggggaggagaccaagaaaaatacagaaaaaaagtctgtccaactgcaattgatgagttttgtaagggtaaacacctagtgaaacttaaggggaaaaaaaactaagttctttggagggaagatttgattgtcaaaggaaatttcacattttcatgcttattatgtacacatggtttatttactgttgtctgtcaccattgccgcatatctgaatatgtgtaggttccacgatagaaactgacaacacttggctcatgcctgtaatcccagcactttgggaggcccaggcaggcagatcacctgaggtcaggagttcaagaccagcctggccaacatggcggaaacccgtctctactaaaaatacaaaaattagccaggtgtggtggcgtgtgcctgtaatcccagctacttgggaggctgaggcaagagaattgcttgaacccaaaaggtggaggttgcagtgagttgagattgcaccactgcactctagcccaggcggtaagagagactccatctcaaaaaaaaaaaaaaaaaaaaagaaaaaagaaactgacaacactgctgctgacattttttcaatggcaatcccaaattcaaactgaaaccccactgaagagctaagcttcattagatctctacaggctgacttacatcaagtggaatttactgttgattctgggtataatacagaaacagctgtttatcttcagcttgctttctgatgcacatctgtttgggttacttcaagaggcatcatggaggattcaagtttagggaggatacagatgctcaaatctgatgaacaattggcttattcttcctcaatgaatatattcagaaagcttgttagccattgaataaacacgttgcattaggggatgattgtttacaaataccttatcttgtggaataaactgaagttgtgctttccttcattaacgtgcacagaagcagttggcaaatagaaagtgctcaaaaaagtttgtagtctgtgcctgccactattatatttcatcatcatagatgccagaatcccctcttcacctattgcccggaatctgcctaatgagatatttgctccaccccctgctgtaactacatcatagcaagagagccatcactcaggttggtagaaatgaacttgaacattgactctcatccctttttaggagatatttgccactaggggtctcatcaggtacctctatgctcttcttaggggttcttttcttttatgattgacagaattaataggtgagcgttctccaaagttctcagcatcaaggatatagtctcttcgtcacagagtattgttatataataaaaaaaggtttatacca

SEQ ID NO: 107556 - DNA, 7164 bp, Homo sapiens
  Payload ID: 1104
  Gene Symbol: ANKS6
  Gene Name: ankyrin repeat and sterile alpha motif domain containing 6
  Uniprot ID: Q68DC2
  ENST ID: ENST00000353234
  CDS Start-End: 49-2664
gacgcggccggcggggcggacgggagcgggccgcgcgtggcggcggcgatgggcgagggcgggctgcccccggccttccagctgctgctgcgcgcgtgtgaccagggcgacacggagacggcgcggcggctgctggagccgggggcggcggagccagccgagcgcggcgcggagccggaggcgggcgcggagccggcgggggccgaggtggccgggcccggggccgcagcggcgggggcagtcggggctccggtgcccgtggattgctcggacgaggcgggcaacaccgcactgcagttcgccgcggccgggggccacgaaccgctggtgcgcttcctgctgcgccgcggtgcctcggtcaacagccgcaaccactacggctggagcgcgctcatgcaggcggccagatttgggcatgtgagtgtggcacacctcctgttggatcacggggctgatgtcaatgcccagaaccggctgggggccagtgtgctcactgtggcttctcggggcggccacctgggtgtggtgaagctgctcctggaagccggtgcctttgtggaccatcaccacccttcaggcgagcaactggggttgggcggcagcagggatgagcccttggacatcacagccctgatggctgccatccagcacgggcacgaggccgtggtgcgtctactgatggagtggggcgcggaccccaaccacgcagcccggaccgtgggctggagcccgctgatgctggccgcactcactgggcggcttggagtggcccagcagctggtggagaagggcgccaaccctgaccacctcagcgtgctggagaagaccgccttcgaggttgcactggactgcaagcacagggaccttgtagactacctggacccgctgaccaccgtcaggcccaaaacagatgaggagaaaaggcgacctgatattttccatgcattgaaaatgggaaacttccagctggtcaaagagattgccgatgaagaccccagccacgtgaacttggtcaatggggacggggcgacgccactgatgctagcagctgttacggggcagctggctctggtgcagctgctggtggagaggcacgcggatgttgacaagcaggacagcgtgcatggctggacggccctcatgcaggcaacctaccatgggaataaggaaattgtgaaatatctgctaaaccaaggggccgatgtcactcttcgtgcaaaaaatggatacacggcctttgacctggtgatgctgctgaatgatcccgacacggaacttgttcgactgctggcatctgtctgcatgcaggtgaataaagacaaaggccggccgagccaccagcctcccctgccccactcgaaggtccgacagccctggagcatcccagtgctgcccgatgacaagggtggactgaagtcctggtggaaccgaatgtccaatcggttccgaaagctcaaactgatgcagacgctgccccgtgggctgtccagcaaccagcctttgcctttctctgacgagcctgagccagctctggactccacaatgagggctgccccccaggacaagacaagccgctctgcactccctgatgcggcccctgtgaccaaagacaatggtcctgggagcacaagaggagaaaaggaagacacgttattgacaaccatgcttcgaaacggagctcccctcaccagactcccgagtgacaagctgaaagcagtcatccccccattcctacccccttccagttttgagctgtggagctctgatcggtcccggacgcgtcacaacgggaaggcagaccccatgaagactgcgctgccccagagagccagcaggggccaccccgtgggcggcgggggcacagacactacacccgtcaggcctgttaaatttccaagcctccccagaagcccagcctcttctgccaattctggaaacttcaaccactcgcctcattcatcgggcggctccagtggggtaggtgtgagccggcacggtggggagctgcttaaccgctcaggtggcagcatagacaatgtcttgtcccaaatcgctgcccagaggaaaaaagcagccggattattggagcagaaacccagccatcggtcaagccctgtggggccagcaccggggtccagcccgtctgagcttccagcctcccctgcaggtggcagcgctcctgttggcaagaaattggagaccagcaaaaggcctccatctggaacttccactacctccaagagcacctctccaaccctcacgccctccccctcacccaaagggcacactgcagagtcctcagtgtcttcctcgtcatcccatcggcagtccaagagcagtgggggctccagcagtggcaccatcacagatgaggatgaactgactggaatccttaagaaattatcacttgagaaatatcagcccatttttgaggaacaagaggtggacatggaagcgttcctcacactgactgacggtgacttgaaggagctgggaattaagacagatgggtccaggcagcagattctggcagcgatttctgaactgaacgcaggcaagggacgcgagagacaaattttacaggaaaccattcacaactttcactcttcctttgagagcagtgccagcaacaccagggcccctggcaacagcccctgtgcgtgatcctccttcccgcagccaccagcgtgagctctctgaatcccgggaccccttcacgtggccacagccccagccctgcccccgtcacactgctgtgccttagtcatgttgttccctttgctcgggatgcccacttcacgtcgacggcattcattggtagtacttcttgctgcaacaaacttcaacacacagagacagattcccatgtaacagtccagtgggggtgcttctgcttggcaggttggttcacacagtgatgcagggactcagctcctttcatcctgtgctctgccctccccgggagcctcagagtttgcttctggctggcggcaagggaaagggacgatggagaaggcacggctgcttcttacctgccttgctcttaactgacacacatcactcctgctcacgtcctcttggccactggtagtcatgtggccccacctggatgcagaggaggccaggatgtgcagtctccacatagtggcttcccagcaacaacttttgacttagatggggggtatgtattatggtgagaggttagccttcctggcacatcttcccttaaaacttctaacttgcccctcctagtccaagtcacctctcagatgaagtcttttttgaccccctttcagccactgggtcccttagtgctgtgtatgtgactgctgtagcattccactgcacctgctgcatacagcttacattggagatgtgtatgtcaaacgcatttttctttattgcaaagagagtctattatagaaggaaagaagtggaggcctgctgtgtggatcccttcttcttcctagctttcagtttccttatctgcaaagtggaaggtcagaccagatgatgctctggtactccacagtgctcacctgtatcactgcagggctttctgcactgaaagtggaagcagaaggctaatgggtcacattgtgtaaaggtctctggtgctcaaagtttctaggcaaagaagtgaaaatttggaattttgtctacatcctattaatgctgtgttcctcaaaagggaattggcttgtgtagtttcctaccatatcatattttattaaattagaggggccctgacttttaaaacccactggctttctgaagtgttttccagtgaatgactcattcagccagtgcttgttgcatttatgttagctaccaggtgccaagtgtgcagacacaatacagagccttcaggctctcgacaggcaagagaacacctgtaaatagatggtcccgacattgagaggcagcatggtagagtgggcagaccttgtgctctggactcaggttcaaagttcagatgaagctcaatggcctcttagttggagcttagaaccagtatgcccaaagtgctgggtctgcaggaagtacccagtcgatggtaggctgcacagaattctgatctctaccttgagccatgctgagccacaagttggtctccttgggaggtgccatctctcatctgtccctcccccagccatgaaagcccattcccctatgctggctttcagaggctgtcgttaacttactgcccagagcctcgtagttttcttcccctgccctgatggttgggtgtttttcctttaaattctctcagccttacactcacagaagccaactttccacaggactgaagacaaagtgtttcatttagctgttactgatagacacctttacaaaggttactaatgtcccagcctttttaaggagacacactcattcatcccctactatgtgctggcagctttacctttgtcatttcatcctcatggccaccctggaggtggcattgtgtaacctcatcttgcacattcgggaaacggatgcttaggagagggaagcagcttgccagttaaacagcccagaaggagcagatctggggtcagaaccggacctggtgggcttgcaagcctgtgccttttccactaactcctatagactcctggagctagaagcacttgtgattcttgttttaatttactgatggcttcaggggttaacagtaggcctagaattgtttgcctctgaaattcatggcccctgacgttatgtgctttgaggttttgtgcctgctttttgctgtggtcctgtttttttcataacaatatactggtatagcttccactcaggtaagtttgattgaacaatgatacacagctgcaccggggggtcaccttttcacaaatgtagacctccatgaactcattggatgaccctggacagagcggggctattcccattttgcagacaggacagcagaggctccagacaatgcctttcctttctttttcactggactcaagtgtccaaggcttttcatcctaggaagtttgtgtgctggttcacaagaggtccctggcaccctttctggggatgtttggatgcggctggtaggcagggaagagaaagggcaccccagcgggggcatgtgtggaggcagcacggaacatgtaggttatagatcgtcagggaggaggggtcagttgggtgcttgtttttctgatttttggtccttgatcacccccttcccttcccacacgtgtccccagcctgcctgtggctgttccccccacaagaagcacctcccttgcttggcaaccttcaccagcatttcccaaaagtatgctcctgggaaccctagttccacaggataataggtttttcataaagaaacgtagggtgtgtatgtgaaagtggggtgaggttccctggttgagtaggtttggcagacactaaagcgagctacacgatcatctttgctacaggcctctcacaaccttcagcatgccagcatgggtcaggcctcttcacagggccaagaaactcatagcatctcccacattactctcatcacttctccaaggtgcttttgcaagactggaattccttggacaccattggagaagccccgctttttctggaacagcggcaaccaagaggccttgcagccctggaagtgggtcagggcccttggtggtcacctttttctccccagcagctctgcagaggtggcctgcttggcagtgggacatcaggggaccggtcctgctttgagatggcagggtccctgttctgagagctctccagcctgagggcattgagctgaggctccaccctgagctctcctgcagggtggagggcattgtttcccagcacccaggcagtgtcttgctggtgtgtcgtgagtgctggatgtccaagtccctgctggccacggagggctcctgcctctcttcttcagcgccacaaaattacatggaggccagctggttttgtgaggagattgtttattttttaattcttttgtttaccgaacgtttactgagcatctaccctgtgccagccctactcgtacgctctgtctccaaagatgaaaaaggacttctctgccctcaagggaaccccacagtatcttagaggagacaatcatgtcggtgagatggtgtggtgatgaagcctgctgggtatacagctcagggaaagtcatcgatgatggctcaggctcagcctgggcacgccccagaggagagagatggagtggggcctcaaagggcaggtttaggcagaaaagaaaaagggcattccagctggggcatgtgcaaaggcagcacgtaatgtgtaagttctagatcgtcagggaggaagggtcagttgggtgcctgtttttctgtttttagtcctttaaaatgagtagaagcaacctgttaccctggaaagagcactggacatagacctagtgctgcgtgatgttgagcacgtttcttcttccctttgagtcccagtttcccttttggttacagggggatagtagcccccagggatcatgtgaaagtgagaaagcccttttcacactgtggagcggtgcagatgtgggaaacctcaaagatggttgcccattttaaatcctttcatctctcatctctctttcttctctcccttctgccctgacgtagccatggttgggtgggtgaggccagaagaaactgcctccggcaagaggtagcagccgctcaggtggctctgctggcatcggagcccacagaagtgaggagtggccgatggacctgccctccaaatgtgcctgactctgggtcttgctgtcactggatttcctggcatggcagacagaaagaaagatagtttgaccaagtcgtagaagctgatccagcgggtaaaaagggggcagggaactcgtcccttttattcttgcctcagagctgcctgaagacatgggccaggccggaggctggacaactttggataacgctgacctgtacttccaagtaaatgcctcctgaagagcccgggacccttcctgggagaattctgcagccagaatgaaggtgccatcagcaggaggcactgtgaagcaccatcctgtcgctgtccttgtccattcctagcaagttaatcgtgtcttgttaaccagcagttcctgttcaacgtgtaaagagacctgatgttttccctaataaagctgataacaga

SEQ ID NO: 107557 - DNA, 2586 bp, Homo sapiens
  Payload ID: 1104
  Gene Symbol: ANKS6
  Gene Name: ankyrin repeat and sterile alpha motif domain containing 6
  ENST ID: ENST00000375019
  CDS Start-End: 324-2078
attctagaagggcaggttcagtgccaggggctgcggtggggtcagcggagcccgctagtaaagtcaaggcccacgcagctgcggactcagacccgggcccagggccctgaccacagcgtgaagaggggatggcgtggccgctcccacctctgccctgacaggaagtttctggagccccgggacagggcggcgagagggcgccgaagaggcaaaagggaacacgcgggtctgcggcgggcgctcctctgagcgtccctggactcccgaatacgggcactggagatgaggagaaaaggcgacctgatattttccatgcattgaaaatgggaaacttccagctggtcaaagagattgccgatgaagaccccagccacgtgaacttggtcaatggggacggggcgacgccactgatgctagcagctgttacggggcagctggctctggtgcagctgctggtggagaggcacgcggatgttgacaagcaggacagcgtgcatggctggacggccctcatgcaggcaacctaccatgggaataaggaaattgtgaaatatctgctaaaccaaggggccgatgtcactcttcgtgcaaaaaatggatacacggcctttgacctggtgatgctgctgaatgatcccgacacggaacttgttcgactgctggcatctgtctgcatgcaggtgaataaagacaaaggccggccgagccaccagcctcccctgccccactcgaaggtccgacagccctggagcatcccagtgctgcccgatgacaagggtggactgaagtcctggtggaaccgaatgtccaatcggttccgaaagctcaaactgatgcagacgctgccccgtgggctgtccagcaaccagcctttgcctttctctgacgagcctgagccagctctggactccacaatgagggctgccccccaggacaagacaagccgctctgcactccctgatgcggcccctgtgaccaaagacaatggtcctgggagcacaagaggagaaaaggaagacacgttattgacaaccatgcttcgaaacggagctcccctcaccagactcccgagtgacaagctgaaagcagtcatccccccattcctacccccttccagttttgagctgtggagctctgatcggtcccggacgcgtcacaacgggaaggcagaccccatgaagactgcgctgccccagagagccagcaggggccaccccgtgggcggcgggggcacagacactacacccgtcaggcctgttaaatttccaagcctccccagaagcccagcctcttctgccaattctggaaacttcaaccactcgcctcattcatcgggcggctccagtggggtaggtgtgagccggcacggtggggagctgcttaaccgctcaggtggcagcatagacaatgtcttgtcccaaatcgctgcccagaggaaaaaagcagccggattattggagcagaaacccagccatcggtcaagccctgtggggccagcaccggggtccagcccgtctgagcttccagcctcccctgcaggtggcagcgctcctgttggcaagaaattggagaccagcaaaaggcctccatctggaacttccactacctccaagagcacctctccaaccctcacgccctccccctcacccaaagggcacactgcagagtcctcagtgtcttcctcgtcatcccatcggcagtccaagagcagtgggggctccagcagtggcaccatcacagatgaggatgaactgactggaatccttaagaaattatcacttgagaaatatcagcccatttttgaggaacaagaggtggacatggaagcgttcctcacactgactgacggtgacttgaaggagctgggaattaagacagatgggtccaggcagcagattctggcagcgatttctgaactgaacgcaggcaagggacgcgagagacaaattttacaggaaaccattcacaactttcactcttcctttgagagcagtgccagcaacaccagggcccctggcaacagcccctccatggttgggtgggtgaggccagaagaaactgcctccggcaagaggtagcagccgctcaggtggctctgctggcatcggagcccacagaagtgaggagtggccgatggacctgccctccaaatgtgcctgactctgggtcttgctgtcactggatttcctggcatggcagacagaaagaaagatagtttgaccaagtcgtagaagctgatccagcgggtaaaaagggggcagggaactcgtcccttttattcttgcctcagagctgcctgaagacatgggccaggccggaggctggacaactttggataacgctgacctgtacttccaagtaaatgcctcctgaagagcccgggacccttcctgggagaattctgcagccagaatgaaggtgccatcagcaggaggcactgtgaagcaccatcctgtcgctgtccttgtccattcctagcaagttaatcgtgtcttgttaaccagcagttcctgttcaacgtgtaaagagacctgatgttttccctaataaagctgataacagattttgcaggactggcttgcagaa

SEQ ID NO: 107558 - DNA, 2272 bp, Homo sapiens
  Payload ID: 1104
  Gene Symbol: ANKS6
  Gene Name: ankyrin repeat and sterile alpha motif domain containing 6
  ENST ID: ENST00000444472
  CDS Start-End: 1-1024
agacacgttattgacaaccatgcttcgaaacggagctcccctcaccagactcccgagtgacaagctgaaagcagtcatccccccattcctacccccttccagttttgagctgtggagctctgatcggtcccggacgcgtcacaacgggaaggcagaccccatgaagactgcgctgccccagagagccagcaggggccaccccgtgggcggcgggggcacagacactacacccgtcaggcctgttaaatttccaagcctccccagaagcccagcctcttctgccaattctggaaacttcaaccactcgcctcattcatcgggcggctccagtggggtaggtgtgagccggcacggtggggagctgcttaaccgctcaggtggcagcatagacaatgtcttgtcccaaatcgctgcccagaggaaaaaagcagccggattattggagcagaaacccagccatcggtcaagccctgtggggccagcaccggggtccagcccgtctgagcttccagcctcccctgcaggtggcagcgctcctgttggcaagcagaaattggagaccagcaaaaggcctccatctggaacttccactacctccaagagcacctctccaaccctcacgccctccccctcacccaaagggcacactgcagagtcctcagtgtcttcctcgtcatcccatcggcagtccaagagcagtgggggctccagcagtggcaccatcacagatgaggatgaactgactggaatccttaagaaattatcacttgagaaatatcagcccatttttgaggaacaagaggtggacatggaagcgttcctcacactgactgacggtgacttgaaggagctgggaattaagacagatgggtccaggcagcagattctggcagcgatttctgaactgaacgcaggcaagggacgcgagagacaaattttacaggaaaccattcacaactttcactcttcctttgagagcagtgccagcaacaccagggcccctggcaacagcccctgtgcgtgatcctccttcccgcagccaccagcccatggttgggtgggtgaggccagaagaaactgcctccggcaagaggtagcagccgctcaggtggctctgctggcatcggagcccacagaagtgaggagtggccgatggacctgccctccaaatgtgcctgactctgggtcttgctgtcactggatttcctggcatggcagacagaaagaaagatagtttgaccaagtcgtagaagctgatccagcgggtaaaaagggggcagggaactcgtcccttttattcttgcctcagagctgcctgaagacatgggccaggccggaggctggacaactttggataacgctgacctgtacttccaagtaaatgcctcctgaagagcccgggacccttcctgggagaattctgcagccagaatgaaggtgccatcagcaggaggcactgtgaagcaccatcctgtcgctgtccttgtccattcctagcaagttaatcgtgtcttgttaaccagcagttcctgttcaacgtgtaaagagacctgatgttttccctaataaagctgataacagattttgcaggactggcttgcagaaggaatctccctgggtgaggtgggtcctctggcctcagggggctctgctcctccttaacatgcagcctaagagtggatttagaccctgccttaatttcagccccccagctgagaatccagtcccaaaaataacagttgttgttgccaaagcttgggaatgatagaagggaaatccacacagaatcacgggtagtgagctcgagcacaaagcccagttcattgtcctcggctcccctccccggcactgcgcttccttcctaaggctgagaccacctctccctgcccttgagaactccctttgctccaggacccccgccaacttggggccctgcccagcagagtggagccatctcgcatcagcatagggacctcccaggttcccatttcctgctggagccctctccaaggctgagacacagggcatggccatccttgtgtcggagaccctgtctccacctctaggtttggccttcccctatagggccctcactagggccagtgtattcactgccaagagtctagaatgccattttagtttctgcccaagggagtgtctattttcctcaccatagacactttttattattttattgttatgtttgtgcagggacttaattctttgaaagattattgtttgtcggcctgtgtatattaaatgatgtaaagtt

SEQ ID NO: 107559 - DNA, 2471 bp, Homo sapiens
  Payload ID: 1105
  Gene Symbol: ANKUB1
  Gene Name: ankyrin repeat and ubiquitin domain containing 1
  ENST ID: ENST00000446160
  CDS Start-End: 458-2092
ccctgtgctagtgcatcccaatcaaatatctatttttaagggttcttcaatcagctgtacttatgtaaataagaattcaggagtcagttgatggggaccacatcacaaaagtgtaatttatgagtagcatttttgtatcacatgcttgaagcttgtccatacttgcctcaaccattgtcaagtttgctggtttccgtaatataggaataaggtggctattgactactgccttccgcagataaatatttcctccaaagtagctggtgtctgtgttgcctgatactgtggcactgtgggactaggctcttcacattctacaacttacctttgaggctagacagtgacagctgcctctggctatcatttttgtccttaattgtgaaccggaatttttctagccatccaggagaatctttgaaaaagttggatattttttgtttgaaaaggtaattgtacaatgaggattttcatcgcctttgaaggatcttttgaaccgtttgatgtttcagcagatgaaactgtggaggttgtcaagctgatgataaaggattatttccacattcctctctctgaagacaaacaaggcaggcggtatctggagttaatgtatgctggagctgctctaaaggacagttggagtcttgctgatgttggaatatctttctgttcaactctcaaatgctttgttaaggaagaagacaagcctactctatacgtgttcaatgctgtaactcaagacacaatgccagtaatggagagcatttcccttcttgataaaacagtgtctgatctgagaacactggtaactctgagatgtggcctccccgtgagtgtctactgtctccgaaccccaaggggcctggagatgtatgattgcaacaccctcaaggactaccagactgatattggcacaacacttcgcttggatgtctgggatggatggaaggaatttctgatgggttgtctccttggacaaaaacttaaagtccaacgctacttatcaaaagaaggaccagtactcaagtatcagaaaagggtagccctgtacattgctgctttttgtgggtacattgaactcactgaatgggccctgaagcagggtgcgcggccccacgaggcagtcggtgttcacccctatcgagcatggtgccatgaagcccttcatgcagatgtctctaaatgccccattcatgcagccgcagaagcaggccaactgttgattctgaaggcctttgtcaactacagtgtgctgtgcctggaatgcaaaaatgcagcaggacaaactcccctgaccattgtgttcaaacacaagcataaagactgtgtattatatttgctcagtaaaatgtggtccacagtttcttttccaaaaatttcagtcccaatgaggatttatattaaaataaaacaatggatcctcagagctcagagtcacagtcttcataaaagccagttttgtggagcaagggtctttggggcaaaagttggagacactgtgatggtggatggtttcaccaaaccaaaaatgacctccaagagctggcataaggctgggaacagcgactcacaaagcatcgtgctcaagctaccatctctcagcaaacaaactgcaagcagcaaacctgtcaatcctttggcaatttcacagccggacacaagaaaacaagccctcaaatttcatccactggtgaatgcaagttcattctctgaattacaaaaacatcaacaacaaaatcagaaaaaaattactgccacagctaggaaaaaagaaaagctcataaaaaacacatatcttccccaagtccccctccctccagtttcaagagtgggatattcacatccatcgtttttctatgcaacacccagtgctgactttttactgaagtcctccttctcatctttcttagagcacagtgggaagactccatgggagaacgcaatctactgcttagctgtggcaagtgcctttaaagagaaacgatggcttcagcagttagaaatagcaagagtcctggccaaaaagagcatttctaacttgactacccgaggaggtctgacagcgtgtgaaaactctctagaaactgtgctttgaaaagtcatgacaacttcagtttggacaaagacctgatcaaacagaatgtccagttctaatgttaacatttctaataacagttctaatgttatcatctctagtaacagttataatgccacataacttttaataggatatttaacaccatgttttctcagacttcatcacactaagtgaaactttagtgctatttttgcataaagaatatgaggaagaattcagaagaaacttagaatagtagttgtccacagggtaggggagctgagacaatggaaaacaaggaagtgggaatttttacagttcctttgtttgtttttctttttttttcctaaaaaaatgtgttttggttttttaagccatatgaatgtagaacatattt

SEQ ID NO: 107560 - DNA, 2434 bp, Homo sapiens
  Payload ID: 1105
  Gene Symbol: ANKUB1
  Gene Name: ankyrin repeat and ubiquitin domain containing 1
  Uniprot ID: A6NFN9
  ENST ID: ENST00000462519
  CDS Start-End: 401-1909
tacttatgtaaataagaattcaggagtcagttgatggggaccacatcacaaaagtgtaatttatgagtagcatttttgtatcacatgcttgaagcttgtccatacttgcctcaaccattgtcaagtttgctggtttccgtaatataggaataaggtggctattgactactgccttccgcagataaatatttcctccaaagtagctggtgtctgtgttgcctgatactgtggcactgtgggactaggctcttcacattctacaacttacctttgaggctagacagtgacagctgcctctggctatcatttttgtccttaattgtgaaccggaatttttctagccatccaggagaatctttgaaaaagttggatattttttgtttgaaaaggtaattgtacaatgaggattttcatcgcctttgaaggatcttttgaaccgtttgatgtttcagcagatgaaactgtggaggttgtcaagctgatgataaaggattatttccacattcctctctctgaagacaaacaaggcaggcggtatctggagttaatgtatgctggagctgctctaaaggacagttggagtcttgctgatgttggaatatctttctgttcaactctcaaatgctttgttaaggaagaagacaagcctactctatacgtgttcaatgctgtaactcaagacacaatgccagtaatggagagcatttcccttcttgataaaacagtgtctgatctgagaacactggtaactctgagatgtggcctccccgtgagtgtctactgtctccgaaccccaaggggcctggagatgtatgattgcaacaccctcaaggactaccagactgatattggcacaacacttcgcttggatgtctgggatggatggaaggaatttctgatgggttgtctccttggacaaaaacttaaagtccaacgctacttatcaaaagaaggaccagtactcaagtatcagaaaagggtagccctgtacattgctgctttttgtgggtacattgaactcactgaatgggccctgaagcagggtgcgcggccccacgaggcagtcggtgttcacccctatcgagcatggtgccatgaagcccttcatgcagatgtctctaaatgccccattcatgcagccgcagaagcaggccaactgttgattctgaaggcctttgtcaactacagtgtgctgtgcctggaatgcaaaaatgcagcaggacaaactcccctgaccattgtgttcaaacacaagcataaagactgtgtattatatttgctcagtaaaatgtggtccacagtttcttttccaaaaatttcagtcccaatgaggatttatattaaaataaaacaatggatcctcagagctcagagtcacagtcttcataaaagccagttttgtggagcaagggtctttggggcaaaagttggagacactgtgatggtggatggtttcaccaaaccaaaaatgacctccaagagctggcataaggctgggaacagcgactcacaaagcatcgtgctcaagctaccatctctcagcaaacaaactgcaagcagcaaacctgtcaatcctttggcaatttcacagccggacacaagaaaacaagccctcaaatttcatccactggtgaatgcaagttcattctctgaattacaaaaacatcaacaacaaaatcagaaaaaaattactgccacagctaggaaaaaagaaaagctcataaaaaacacatatcttccccaagtccccctccctccagtttcaagagtgggatattcacatccatcgtttttctatgcaacacccagtgctgactttttactgaagtcctccttctcatctttcttagagcacagtgggaagactccatgggagaacgcaatctactgcttagctgtggcaaggtaatgttctccccttaaacatacaaacagcaaagcttttataaggcaggtccaggataaggaatggtccataatgccctactatgccactgaaagtaatacaagttgttccagtgcatcaatacccagcttcaaggacctcatcttagcctcatcactaggacaaaatgaattaatattattggccaatccaatctgtgcagtactttactcctcaaactttcaggagggaaagaaacacagtagaaagaattgtatcaattctcaaggtcccttgctgctgctgctgctgctgctgctgctgctgctgctgctgctgctgctgctgctgctgctgcttttcttttttctttttgtttgagacagggtctcgttctgttgctcaggctggagtgcagtggtgctatcacagctcattgcattcttgaattcctaggctcaagcaattctcccatctcagccttccaagtagctgggactacaggcacatgccactatatctgattgattttttttttctgtagagatg

SEQ ID NO: 107561 - DNA, 2027 bp, Homo sapiens
  Payload ID: 1105
  Gene Symbol: ANKUB1
  Gene Name: ankyrin repeat and ubiquitin domain containing 1
  ENST ID: ENST00000484019
  CDS Start-End: 458-577
ccctgtgctagtgcatcccaatcaaatatctatttttaagggttcttcaatcagctgtacttatgtaaataagaattcaggagtcagttgatggggaccacatcacaaaagtgtaatttatgagtagcatttttgtatcacatgcttgaagcttgtccatacttgcctcaaccattgtcaagtttgctggtttccgtaatataggaataaggtggctattgactactgccttccgcagataaatatttcctccaaagtagctggtgtctgtgttgcctgatactgtggcactgtgggactaggctcttcacattctacaacttacctttgaggctagacagtgacagctgcctctggctatcatttttgtccttaattgtgaaccggaatttttctagccatccaggagaatctttgaaaaagttggatattttttgtttgaaaaggtaattgtacaatgaggattttcatcgcctttgaaggatcttttgaaccgtttgatgtttcagcagatgaaactgtggaggttgtcaagctgatgataaagacaaacaaggcaggcggtatctggagttaatgtatgctggagctgctctaaaggacagttggagtcttgctgatgttggaatatctttctgttcaactctcaaatgctttgttaaggaagaagacaagcctactctatacgtgttcaatgctgtaactcaagacacaatgccagtaatggagagcatttcccttcttgataaaacagtgtctgatctgagaacactggtaactctgagatgtggcctccccgcacaacacttcgcttggatgtctgggatggatggaaggaatttctgatgggttgtctccttggacaaaaacttaaagtccaacgctacttatcaaaagaaggaccagtactcaagtatcagaaaagggtagccctgtacattgctgctttttgtgggtacattgaactcactgaatgggccctgaagcagggtgcgcggccccacgaggcagtcggtgttcacccctatcgagcatggtgccatgaagcccttcatgcagatgtctctaaatgccccattcatgcagccgcagaagcaggccaactgttgattctgaaggcctttgtcaactacagtgtgctgtgcctggaatgcaaaaatgcagcaggacaaactcccctgaccattgtgttcaaacacaagcataaagactgtgtattatatttgctcagtaaaatgtggtccacagtttcttttccaaaaatttcagtcccaatgaggatttatattaaaataaaacaatggatcctcagagctcagagtcacagtcttcataaaagccagttttgtggagcaagggtctttggggcaaaagttggagacactgtgatggtggatggtttcaccaaaccaaaaatgacctccaagagctggcataaggctgggaacagcgactcacaaagcatcgtgctcaagctaccatctctcagcaaacaaactgcaagcagcaaacctgtcaatcctttggcaatttcacagccggacacaagaaaacaagccctcaaatttcatccactggtgaatgcaagttcattctctgaattacaaaaacatcaacaacaaaatcagaaaaaaattactgccacagctaggaaaaaagaaaagctcataaaaaacacatatcttccccaagtccccctccctccagtttcaagagtgggatattcacatccatcgtttttctatgcaacacccagtgctgactttttactgaagtcctccttctcatctttcttagagcacagtgggaagactccatgggagaacgcaatctactgcttagctgtggcaagtgcctttaaagagaaacgatggcttcagcagttagaaatagcaagagtcctggccaaaaagagcatttctaacttgactacccgaggaggtctgacagcgtgtgaaaactctctagaaactgtgctttgaaaagtcatgacaacttcagtttggacaaagacctgatcaaacaga

SEQ ID NO: 107562 - DNA, 2579 bp, Homo sapiens
  Payload ID: 1106
  Gene Symbol: ANKZF1
  Gene Name: ankyrin repeat and zinc finger domain containing 1
  Uniprot ID: Q9H8Y5
  ENST ID: ENST00000323348
  CDS Start-End: 175-2355
agtgtgctctacgtggggcggggctcaggtgcggacgccgccggttgtcctcttcgctgctccgtagtgacggggattgttgtgttgcagaaatccggcaatcgacctgaggacttgcgagccgctcagctcccgggacgtttggagctgctgctaaataatttctgctcagccatgtcgccggctccagatgcagccccggctcctgcgtcgatctccctgtttgacctcagcgcggatgctccggtctttcagggcctgagcctggtgagccacgcgcctggggaggctctggcccgggctccgcgtacttcctgttcaggctcaggggagagagaaagcccagaaagaaagctactccagggtcctatggatatttcagagaagttattttgttcaacttgtgaccagaccttccagaaccaccaagaacagagggaacattataagcttgactggcatcggtttaacctaaagcaacgtctcaaggacaagcctctcctgtctgccctggactttgaaaagcagagctccacaggagatctttccagcatctcgggatcagaagactcagactcagccagtgaggaggacttgcagacactggatcgggagagggctacatttgagaagttgagccgacccccaggcttttaccctcatcgagttcttttccagaatgcccagggccagtttctttatgcctaccgctgtgtcctaggccctcatcaggatcccccagaagaggcagaactgctgctacagaacctgcaaagtagaggtcccagagactgcgtggtgctcatggctgcagctgggcactttgctggtgctatatttcaaggaagagaagtggtgacacacaaaacttttcaccgctatacggttcgggccaagcggggcacagcccaggggcttcgggatgcccgaggtgggccatcacactctgctggagccaacctgaggcgctacaatgaagccacactatataaggatgttcgtgacctgctggcagggccaagctgggctaaggcgctggaggaggctggtacaatactgttgcgtgctccccgctctggccggtctttgttctttggaggcaagggagcacccctgcaaaggggggatccccgactttgggatatccccctcgccacccgcagacccaccttccaagagctacagcgtgtgctccataagctgaccactttgcatgtctatgaagaagaccctcgggaagcagtcagactgcactcacctcagacacactggaaaacagtaagagaggagagaaagaagcctactgaggaagaaataagaaagatctgcagggatgaaaaggaagcgctggggcagaatgaggaatctcccaaacagggttcagggtcggagggagaagatggctttcaggtagagttggagctagtggagttgactgtggggactctggatctttgtgagtctgaagtattgcccaagcggaggaggagaaaaaggaataagaaggagaaaagccgagaccaggaggctggggcacatcggactcttctccagcaaactcaagaagaggagccttccacacagtcatcccaggcagttgctgcccccttgggccctttgctggatgaggccaaagcccctggtcagccagagctctggaatgcactgcttgctgcttgccgagctggagatgttggagtgctaaagctgcagctagctcccagccctgcagaccctagagttctgtctctgctcagtgcccccttgggctccggtggctttactctcctgcatgcagcagctgcagctggaagaggctcagtggttcgtctgctgctggaagcaggtgctgaccccactgtgcaggactctcgggcccggccaccttatactgttgcggctgacaaatcaacacgtaatgagttccgaaggttcatggagaagaatccagatgcctacgattacaacaaggctcaggtgccaggaccattgacaccagaaatggaggcacggcaggctacacggaaaagggagcagaaggcagcccggcggcaacgggaggaacagcagcagaggcagcaggagcaggaggagcgtgaacgagaagagcagcggcgatttgccgccctcagtgaccgagagaagagagctctggctgcagagcgccgactcgctgcccagttgggagcccctacctctccaatccctgactctgcaatcgtcaatactcgacgctgctggagttgtggggcatccctccaaggcctgactccctttcactacctcgacttctctttctgctccacacgttgcctccaggatcatcgccgtcaggcagggaggccctcttcctgatctcttacagctctacctggggccaactcagggacctgagagggcacattcacagcagccctaggttttttcttccccgtgaaaccagagatgatttggaagatgggggtgaaggacactcgggaactagggcaaagacagggctagaggtatgtggagctggtactgtctctggaattttaatcacaataaagtttggcaaggaatgtgtacttgtacttaca

SEQ ID NO: 107563 - DNA, 2486 bp, Homo sapiens
  Payload ID: 1106
  Gene Symbol: ANKZF1
  Gene Name: ankyrin repeat and zinc finger domain containing 1
  Uniprot ID: Q9H8Y5
  ENST ID: ENST00000410034
  CDS Start-End: 102-2282
cccgggacgtttggtgcgtcttctaagggcgtgggcgagtttacgcgggccagttgttgctggtcgcatgggagctgctgctaaataatttctgctcagccatgtcgccggctccagatgcagccccggctcctgcgtcgatctccctgtttgacctcagcgcggatgctccggtctttcagggcctgagcctggtgagccacgcgcctggggaggctctggcccgggctccgcgtacttcctgttcaggctcaggggagagagaaagcccagaaagaaagctactccagggtcctatggatatttcagagaagttattttgttcaacttgtgaccagaccttccagaaccaccaagaacagagggaacattataagcttgactggcatcggtttaacctaaagcaacgtctcaaggacaagcctctcctgtctgccctggactttgaaaagcagagctccacaggagatctttccagcatctcgggatcagaagactcagactcagccagtgaggaggacttgcagacactggatcgggagagggctacatttgagaagttgagccgacccccaggcttttaccctcatcgagttcttttccagaatgcccagggccagtttctttatgcctaccgctgtgtcctaggccctcatcaggatcccccagaagaggcagaactgctgctacagaacctgcaaagtagaggtcccagagactgcgtggtgctcatggctgcagctgggcactttgctggtgctatatttcaaggaagagaagtggtgacacacaaaacttttcaccgctatacggttcgggccaagcggggcacagcccaggggcttcgggatgcccgaggtgggccatcacactctgctggagccaacctgaggcgctacaatgaagccacactatataaggatgttcgtgacctgctggcagggccaagctgggctaaggcgctggaggaggctggtacaatactgttgcgtgctccccgctctggccggtctttgttctttggaggcaagggagcacccctgcaaaggggggatccccgactttgggatatccccctcgccacccgcagacccaccttccaagagctacagcgtgtgctccataagctgaccactttgcatgtctatgaagaagaccctcgggaagcagtcagactgcactcacctcagacacactggaaaacagtaagagaggagagaaagaagcctactgaggaagaaataagaaagatctgcagggatgaaaaggaagcgctggggcagaatgaggaatctcccaaacagggttcagggtcggagggagaagatggctttcaggtagagttggagctagtggagttgactgtggggactctggatctttgtgagtctgaagtattgcccaagcggaggaggagaaaaaggaataagaaggagaaaagccgagaccaggaggctggggcacatcggactcttctccagcaaactcaagaagaggagccttccacacagtcatcccaggcagttgctgcccccttgggccctttgctggatgaggccaaagcccctggtcagccagagctctggaatgcactgcttgctgcttgccgagctggagatgttggagtgctaaagctgcagctagctcccagccctgcagaccctagagttctgtctctgctcagtgcccccttgggctccggtggctttactctcctgcatgcagcagctgcagctggaagaggctcagtggttcgtctgctgctggaagcaggtgctgaccccactgtgcaggactctcgggcccggccaccttatactgttgcggctgacaaatcaacacgtaatgagttccgaaggttcatggagaagaatccagatgcctacgattacaacaaggctcaggtgccaggaccattgacaccagaaatggaggcacggcaggctacacggaaaagggagcagaaggcagcccggcggcaacgggaggaacagcagcagaggcagcaggagcaggaggagcgtgaacgagaagagcagcggcgatttgccgccctcagtgaccgagagaagagagctctggctgcagagcgccgactcgctgcccagttgggagcccctacctctccaatccctgactctgcaatcgtcaatactcgacgctgctggagttgtggggcatccctccaaggcctgactccctttcactacctcgacttctctttctgctccacacgttgcctccaggatcatcgccgtcaggcagggaggccctcttcctgatctcttacagctctacctggggccaactcagggacctgagagggcacattcacagcagccctaggttttttcttccccgtgaaaccagagatgatttggaagatgggggtgaaggacactcgggaactagggcaaagacagggctagaggtatgtggagctggtactgtctctggaattttaatcacaataaagtttggcaagg

SEQ ID NO: 107564 - DNA, 2155 bp, Homo sapiens
  Payload ID: 1106
  Gene Symbol: ANKZF1
  Gene Name: ankyrin repeat and zinc finger domain containing 1
  ENST ID: ENST00000409849
  CDS Start-End: 381-1931
gcggacgccgccggttgtcctcttcgctgctccgtagtgacggggattgttgtgttgcagaaatccggcaatcgacctgaggacttgcgagccgctcagctcccgggacgtttggagatctttccagcatctcgggatcagaagactcagactcagccagtgaggaggacttgcagacactggatcgggagagggctacatttgagaagttgagccgacccccaggcttttaccctcatcgagttcttttccagaatgcccagggccagtttctttatgcctaccgctgtgtcctaggccctcatcaggatcccccagaagaggcagaactgctgctacagaacctgcaaagtagaggtcccagagactgcgtggtgctcatggctgcagctgggcactttgctggtgctatatttcaaggaagagaagtggtgacacacaaaacttttcaccgctatacggttcgggccaagcggggcacagcccaggggcttcgggatgcccgaggtgggccatcacactctgctggagccaacctgaggcgctacaatgaagccacactatataaggatgttcgtgacctgctggcagggccaagctgggctaaggcgctggaggaggctggtacaatactgttgcgtgctccccgctctggccggtctttgttctttggaggcaagggagcacccctgcaaaggggggatccccgactttgggatatccccctcgccacccgcagacccaccttccaagagctacagcgtgtgctccataagctgaccactttgcatgtctatgaagaagaccctcgggaagcagtcagactgcactcacctcagacacactggaaaacagtaagagaggagagaaagaagcctactgaggaagaaataagaaagatctgcagggatgaaaaggaagcgctggggcagaatgaggaatctcccaaacagggttcagggtcggagggagaagatggctttcaggtagagttggagctagtggagttgactgtggggactctggatctttgtgagtctgaagtattgcccaagcggaggaggagaaaaaggaataagaaggagaaaagccgagaccaggaggctggggcacatcggactcttctccagcaaactcaagaagaggagccttccacacagtcatcccaggcagttgctgcccccttgggccctttgctggatgaggccaaagcccctggtcagccagagctctggaatgcactgcttgctgcttgccgagctggagatgttggagtgctaaagctgcagctagctcccagccctgcagaccctagagttctgtctctgctcagtgcccccttgggctccggtggctttactctcctgcatgcagcagctgcagctggaagaggctcagtggttcgtctgctgctggaagcaggtgctgaccccactgtgcaggactctcgggcccggccaccttatactgttgcggctgacaaatcaacacgtaatgagttccgaaggttcatggagaagaatccagatgcctacgattacaacaaggctcaggtgccaggaccattgacaccagaaatggaggcacggcaggctacacggaaaagggagcagaaggcagcccggcggcaacgggaggaacagcagcagaggcagcaggagcaggaggagcgtgaacgagaagagcagcggcgatttgccgccctcagtgaccgagagaagagagctctggctgcagagcgccgactcgctgcccagttgggagcccctacctctccaatccctgactctgcaatcgtcaatactcgacgctgctggagttgtggggcatccctccaaggcctgactccctttcactacctcgacttctctttctgctccacacgttgcctccaggatcatcgccgtcaggcagggaggccctcttcctgatctcttacagctctacctggggccaactcagggacctgagagggcacattcacagcagccctaggttttttcttccccgtgaaaccagagatgatttggaagatgggggtgaaggacactcgggaactagggcaaagacagggctagaggtatgtggagctggtactgtctctggaattttaatcacaataaagtttggcaaggaatgtgtacttgtacttaca

SEQ ID NO: 107565 - DNA, 511 bp, Homo sapiens
  Payload ID: 1106
  Gene Symbol: ANKZF1
  Gene Name: ankyrin repeat and zinc finger domain containing 1
  ENST ID: ENST00000453432
  CDS Start-End: 166-511
aggtgcggacgccgccggttgtcctcttcgctgctccgtagtgacggggattgttgtgttgcagaaatccggcaatcgacctgaggacttgcgagccgctcagctcccgggacgtttggctcaggggagagagaaagcccagaaagaaagctactccagggtcctatggatatttcagagaagttattttgttcaacttgtgaccagaccttccagaaccaccaagaacagagggaacattataagcttgactggcatcggtttaacctaaagcaacgtctcaaggacaagcctctcctgtctgccctggactttgaaaagcagagctccacaggagatctttccagcatctcgggatcagaagactcagactcagccagtgaggaggacttgcagacactggatcgggagagggctacatttgagaagttgagccgacccccaggcttttaccctcatcgagttcttttccagaatgcccagggccagtttctttatgcctaccgctgtg

SEQ ID NO: 107566 - DNA, 571 bp, Homo sapiens
  Payload ID: 1106
  Gene Symbol: ANKZF1
  Gene Name: ankyrin repeat and zinc finger domain containing 1
  ENST ID: ENST00000436226
  CDS Start-End: 300-571
gtaacgaagaaagttcggctaggcaagctcagtgatttttaactctgttggactcgatttgggagccgaatgcctatttcattcttttgtgggctgagactgggggtttgagaaagtggacgggggccaaggtattcatctcacagttggtagcaggatgagagacgagaagtcttgcggtgcaggagaaaccaagtcaggcaggcaggagacgcagcagtaggatctcgtttgcaggagccctgtttcttacacgctttctactccaggagctgctgctaaataatttctgctcagccatgtcgccggctccagatgcagccccggctcctgcgtcgatctccctgtttgacctcagcgcggatgctccggtctttcagggcctgagcctggtgagccacgcgcctggggaggctctggcccgggctccgcgtacttcctgttcaggctcaggggagagagaaagcccagaaagaaagctactccagggtcctatggatatttcagagaagttattttgttcaacttgtgaccagaccttccagaaccaccaagaacagagggaacatta

SEQ ID NO: 107567 - DNA, 537 bp, Homo sapiens
  Payload ID: 1106
  Gene Symbol: ANKZF1
  Gene Name: ankyrin repeat and zinc finger domain containing 1
  ENST ID: ENST00000447157
  CDS Start-End: 116-537
gtttggtgcgtcttctaagggcgtgggcgagtttacgcgggccagttgttgctggtcgcatgggtaacgaagaaagttcggctaggagctgctgctaaataatttctgctcagccatgtcgccggctccagatgcagccccggctcctgcgtcgatctccctgtttgacctcagcgcggatgctccggtctttcagggcctgagcctggtgagccacgcgcctggggaggctctggcccgggctccgcgtacttcctgttcaggctcaggggagagagaaagcccagaaagaaagctactccagggtcctatggatatttcagagaagttattttgttcaacttgtgaccagaccttccagaaccaccaagaacagagggaacattataagcttgactggcatcggtttaacctaaagcaacgtctcaaggacaagcctctcctgtctgccctggactttgaaaagcagagctccacaggagatctttccagcatctcgggatcagaagactcagactcagccagtgaggaggactt

SEQ ID NO: 107568 - DNA, 576 bp, Homo sapiens
  Payload ID: 1106
  Gene Symbol: ANKZF1
  Gene Name: ankyrin repeat and zinc finger domain containing 1
  ENST ID: ENST00000435521
  CDS Start-End: 94-255
gtgttgcagaaatccggcaatcgacctgaggacttgcgagccgctcagctcccgggacgtttggagctgctgctaaataatttctgctcagccatgtcgccggctccagatgcagccccggctcctgcgtcgatctccctgtttgacctcagcgcggatgctccggtctttcagggcctgagcctggtgagccacgcgcctggggaggctctggcccgggctccgcgtacttcctgttcagagggaacattataagcttgactggcatcggtttaacctaaagcaacgtctcaaggacaagcctctcctgtctgccctggactttgaaaagcagagctccacaggagatctttccagcatctcgggatcagaagactcagactcagccagtgaggaggacttgcagacactggatcgggagagggctacatttgagaagttgagccgacccccaggcttttaccctcatcgagttcttttccagaatgcccagggccagtttctttatgcctaccgctgtgtcctaggccctcatcaggatcccccagaagaggcagaactgctgctacagaacct

SEQ ID NO: 107569 - DNA, 552 bp, Homo sapiens
  Payload ID: 1106
  Gene Symbol: ANKZF1
  Gene Name: ankyrin repeat and zinc finger domain containing 1
  ENST ID: ENST00000416565
  CDS Start-End: 374-552
gctcccgggacgtttggtgcgtcttctaagggcgtgggcgagtttacgcgggccagttgttgctggtcgcatgggtaacgaagaaagttcggctaggcaagctcagtgatttttaactctgttggactcgatttgggagccgaatgcctatttcattcttttgtgggctgagactgggggtttgagaaagtggacgggggccaaggtattcatctcacagttggtagcaggatgagagacgagaagtcttgcggtgcaggagaaaccaagtcaggcaggcaggagacgcagcagtaggatctcgtttgcaggagccctgtttcttacacgctttctactccaggagctgctgctaaataatttctgctcagccatgtcgccggctccagatgcagccccggctcctgcgtcgatctccctgtttgacctcagcgcggatgctccggtctttcagggcctgagcctggctcaggggagagagaaagcccagaaagaaagctactccagggtcctatggatatttcagagaagttattttgttcaacttgtgac

SEQ ID NO: 107570 - DNA, 1979 bp, Homo sapiens
  Payload ID: 1107
  Gene Symbol: ANKRD1
  Gene Name: ankyrin repeat domain 1 (cardiac muscle)
  Uniprot ID: Q15327
  ENST ID: ENST00000371697
  CDS Start-End: 250-1209
acatattcagcagggttagcttgtcctcccctccctcttcagcttcccagacactgagtctggaatgaaaattcacctgcctctgagttggctcctaatgggggtgggagtgttacttcggttcccaggttggaagattatctcacccggccccagctatataagctgaccggtgtggaggggcccagcagggccaactccagggattccttccacgacagaaaaacatacaagactccttcagccaacatgatggtactgaaagtagaggaactggtcactggaaagaagaatggcaatggggaggcaggggaattccttcctgaggatttcagagatggagagtatgaagctgctgttactttagagaagcaggaggatctgaagacacttctagcccaccctgtgaccctgggggagcaacagtggaaaagcgagaaacaacgagaggcagagctcaaaaagaaaaaactagaacaaagatcaaagcttgaaaatttagaagaccttgaaataatcattcaactgaagaaaaggaaaaaatacaggaaaactaaagttccagttgtaaaggaaccagaacctgaaatcattacggaacctgtggatgtgcctacgtttctgaaggctgctctggagaataaactgccagtagtagaaaaattcttgtcagacaagaacaatccagatgtttgtgatgagtataaacggacagctcttcatagagcatgcttggaaggacatttggcaattgtggagaagttaatggaagctggagcccagatcgaattccgtgatatgcttgaatccacagccatccactgggcaagccgtggaggaaacctggatgttttaaaattgttgctgaataaaggagcaaaaattagcgcccgagataagttgctcagcacagcgctgcatgtggcggtgaggactggccactatgagtgcgcggagcatcttatcgcctgtgaggcagacctcaacgccaaagacagagaaggagataccccgttgcatgatgcggtgagactgaaccgctataagatgatccgactcctgattatgtatggcgcggatctcaacatcaagaactgtgctgggaagacgccgatggatctggtgctacactggcagaatggaaccaaagcaatattcgacagcctcagagagaactcctacaagacctctcgcatagctacattctgaggcaaacgacagactcttaatcagtaaatgttcactggcattttgaaggcatggcccaagagaagagacactagccataaaatctagtttctatttatcaacgtgttgtgaagatgtacctaatgaagttttgagaaagcacagggttataggtgtttaaatttcctttagtgaaactcttatttatttttatgtattcctgtttatttatttactgccacgctactgatattcagaccttcatgatcatccatctggtgagcagagcttcatttgtatataacactttcagagccttcccacccataggtagttcttaaaccaggtgaaagagcaaagttcaagtgcctacttatgtgtcattcgctcatgtaagagtttttaagagagggctgattatcacagccctcttttctcctgaatttttaatgcagaagtttgaatgaagcaagggaaggcatgtagggacaggaaaggaaacaatggaaggaaagtgattctgtgaaaaggacagtgaagccagctattttacccccaggctggattttttttttttttttttttttttttttttaccgagtacacagagtacccaagtgaagagaacgtcatgagtgtaagtgcaaatcagtggaaggagcggcaaactgggacatgcagaattgaatttgctcaaaaaagatgaaaggaaatgcaaactgtaaatgtataaatgtatattgtattgtatgtacattttatattcataataaaggcaatcaaactctaaa

SEQ ID NO: 107571 - DNA, 2495 bp, Homo sapiens
  Payload ID: 1108
  Gene Symbol: ANKRD10
  Gene Name: ankyrin repeat domain 10
  Uniprot ID: Q9NXR5
  ENST ID: ENST00000267339
  CDS Start-End: 136-1398
gcgcgctccgctcggcagcctgtgggacgcgaccgcggcgctagtctcgttcctttgtgctgcggcggcggcttctcgagtcctccccgacgcgtcctctaggccagcgagccccgcgctctccggtgacggaccatgtcggcggcgggagcgggcgcgggcgtagaggcgggcttctccagcgaggagctgctctcgctccgtttcccgctgcaccgcgcctgccgcgacggggacctggccacgctctgctcgctgctgcagcagacaccccacgcccacctggcctctgaggactccttctatggctggacgcccgtgcactgggccgcgcatttcggcaagttggagtgcttagtgcagttggtgagagcgggagccacactcaacgtctccaccacacggtacgcgcagacgccagcccacattgcagcctttgggggacatcctcagtgcctggtctggctgattcaagcaggagccaacattaacaaaccggattgtgagggtgaaactcccattcacaaggcagctcgctctgggagcctagaatgcatcagtgcccttgtggcgaatggggctcacgtcgacctgagaaatgccagtggcctgacagcagcagacattgcacaaacccagggtttccaagagtgtgcccagtttctcttgaacctccagaattgtcatctgaaccatttctataacaatggcatcttaaatgggggtcatcagaatgtatttcctaatcatattagtgtgggaacaaatcgaaagagatgcttggaagactcagaagactttggagtaaagaaagctagaactgaagctcaaagcttggattctgccgtgccactcacgaatggcgacacagaagacgatgctgacaaaatgcacgttgatagggagtttgctgttgtaacagatatgaaaaacagtagctccgtatcgaatacattgacaaatggatgtgtcatcaatggacatttggacttcccctccacgaccccgctcagtgggatggaaagcaggaatggccagtgcttgacaggaactaacggaattagcagtggattagccccaggacagccgtttccgagtagccagggttctctctgcattagtgggactgaggagccagagaagaccctgagagctaaccctgagttgtgcggttctctgcacctgaacgggagtccaagtagctgcatagccagtaggccttcctgggtggaagacattggggataacctgtactatggacactaccacgggtttggggacactgctgaaagcatcccagaactgaacagtgtggtcgagcattccaagtccgtgaaggtgcaggagcggtacgacagtgccgtgctgggcaccatgcacctgcaccacggctcctagagacgctgacctggctctcggaaacgcaggagtccttcctggtagccagctcagaatacccatgtagcagcaacttgaacgaatgtcacaacttgtacgttttttatatacttcaactttctgaaaaagtaaacttcgacaagttcccagcaactgcttgtttgtgcatgagtagggcttactaagtgcatagatgtttctacagtgaggtgtcctttttataaggtgcacttttggagtttttctgatgccaatctcaacattgtctttttaatactgtcaccagatattgccatttttctttttgttaaaagattatatgatcaagataaattggggtggtaaatcaggtgcctggtaatttatctctttgcacatgggcatcattttaaaaagcttgcttccactcttttctgtagaatttgacggaacacagctatttccctatgcaaggtacagccttacaaagatttctgcagtgatttgtgtgaagaagagaacgtttgtctttttcaatgaagctttgcagatcaccatgtggttgaaggttttagttgtggacacagtggtccctccttaatgatgaagatcactgccttgggcttcatggaaaacaggcccagcctggggctgcgtttggatttattgtttttattccacacttcctacttggtctctggaagttttaccacatgtaacagattcctttatatgtagtggaaatcactatttgtagaaactgtcaggtcaaaatatttaactgactgttgacatgtattttcttttttccttgtttttgttttttggggttttctgctttaagatatataccactatgtatatccagttaactgagagaattttgactctcttaataaaactgcattaagtttttgattttgtagaaattagcttttgtctaggcaactagtggttatactctgcaaatattgtaatgaatttttacttttttgatttttgtaataaaaattggtgcagataaaatgtcaaatgaacaaaccagtgttctaagagtgttactaacattttgttctaaaactgtccttcacaaattgaataaaaaactctcacactca

SEQ ID NO: 107572 - DNA, 1193 bp, Homo sapiens
  Payload ID: 1108
  Gene Symbol: ANKRD10
  Gene Name: ankyrin repeat domain 10
  Uniprot ID: Q9NXR5
  ENST ID: ENST00000310847
  CDS Start-End: 73-735
ggcggcggcttctcgagtcctccccgacgcgtcctctaggccagcgagccccgcgctctccggtgacggaccatgtcggcggcgggagcgggcgcgggcgtagaggcgggcttctccagcgaggagctgctctcgctccgtttcccgctgcaccgcgcctgccgcgacggggacctggccacgctctgctcgctgctgcagcagacaccccacgcccacctggcctctgaggactccttctatggctggacgcccgtgcactgggccgcgcatttcggcaagttggagtgcttagtgcagttggtgagagcgggagccacactcaacgtctccaccacacggtacgcgcagacgccagcccacattgcagcctttgggggacatcctcagtgcctggtctggctgattcaagcaggagccaacattaacaaaccggattgtgagggtgaaactcccattcacaaggcagctcgctctgggagcctagaatgcatcagtgcccttgtggcgaatggggctcacgtcgagtttatttcacagagcagtgtacattcttgtcttccaggggaacttcaacatggagttacttttgatccctcagttttaattcagtgtctaaagcctgagaaatgccagtggcctgacagcagcagacattgcacaaacccagggtttccaagagtgtgcccagtttctcttgaacctccagaattgtcatctgaaccatttctataacaatggcatcttaaatgggggtcatcagaatgtatttcctaatcatattagtgtgggaacaaatcgaaagagatgcttggaagactcagaagactttggagtaaagaaagctagaactgaaggtgagaccgctttgcgggtgggaagagcacacttatttttcctttctgtaatatgttttctttttatggctgagcgcaccttcgagatgagaccttcacttcaggtggtaatgcgcctggtggattgtgcggtgacggtggagatttctcctgtactgccactgcgaagatgggacttaacaaaagggaatgtgagggaaatactgatggcccaagtgtaaatgtctatgtggaactttttgagcacccatgtttacctgccatgaattagattttttaatttgttgtatctgtttgaaatatatctattaaagaaaatctgccactgtgcctgaa

SEQ ID NO: 107573 - DNA, 997 bp, Homo sapiens
  Payload ID: 1108
  Gene Symbol: ANKRD10
  Gene Name: ankyrin repeat domain 10
  ENST ID: ENST00000465753
  CDS Start-End: 104-589
ccgcggcgctagtctcgttcctttgtgctgcggcggcggcttctcgagtcctccccgacgcgtcctctaggccagcgagccccgcgctctccggtgacggaccatgtcggcggcgggagcgggcgcgggcgtagaggcgggcttctccagcgaggagctgctctcgctccgtttcccgctgcaccgcgcctgccgcgacggggacctggccacgctctgctcgctgctgcagcagacaccccacgcccacctggcctctgaggactccttctatggctggacgcccgtgcactgggccgcgcatttcggcaagttggagtgcttagtgcagttggtgagagcgggagccacactcaacgtctccaccacacggtacgcgcagacgccagcccacattgcagcctttgggggacatcctcagtgcctggtctggctgattcaagcaggagccaacattaacaaaccggattgtgagggtgaaactcccattcacaaggcagctcgctctgggagcctagaatgcatcagtgcccttgtggcgaatggggctcacgtcgataatcctagaaagggggagcattccatatagaaactgctgaaactgccacaggtgcttctccgaaaaccttacagttgtggcattgaatgttcagtatcgcttcctttctgcacacgaggcatactgttgagcctgagaaatgccagtggcctgacagcagcagacattgcacaaacccagggtttccaagagtgtgcccagtttctcttgaacctccagaattgtcatctgaaccatttctataacaatggcatcttaaatgggggtcatcagaatgtatttcctaatcatattagtgtgggaacaaatcgaaagagatgcttggaagactcagaagactttggagtaaagaaagctagaactgaaggtgagaccgctttgcgggtgggaagagcacacttatttttcctttctgtaatatgttttctttttatggct

SEQ ID NO: 107574 - DNA, 704 bp, Homo sapiens
  Payload ID: 1108
  Gene Symbol: ANKRD10
  Gene Name: ankyrin repeat domain 10
  ENST ID: ENST00000603993
  CDS Start-End: 1-365
ggggtcatcagaatgtatttcctaatcatattagtgtgggaacaaatcgaaagagatgcttggaagactcagaagactttggagtaaagaaagctagaactgaagctcaaagcttggattctgccgtgccactcacgaatggcgacacagaagacgatgctgacaaaatgcacgttgatagggagtttgctgttgtaacaggtgggagtggacagtttcctgttagctgcaacaacaatccaatggttgaagacaccaaacagcaggagagtggttctgttggaccaaaagaaatagaaatatatactgtgtcagcaatgcagaccccctgtcgttgcaggaatcagtatgcatattatttctaacataagtttttctcagatgttttgcactttgttgtccagtgtctttttaaaaatgttatactataatttgcatatcttgggcaagtttgtagatacaagaagtgttttgggtatattctgtggacatgaaaaatgtaagtgcaatctttattctgatttgaagctattgcttaatgtgccttgcttatttttaatgaggtttgcatttttaattttctgacatatggcctttgggtgaatataccgaacatgctacagttaatattttcaaaccaatataccacaaagaggacgactagcagtaaacactgagaaactagtaaatgtggttctgactca

SEQ ID NO: 107575 - DNA, 9301 bp, Homo sapiens
  Payload ID: 1109
  Gene Symbol: ANKRD11
  Gene Name: ankyrin repeat domain 11
  Uniprot ID: Q6UB99
  ENST ID: ENST00000301030
  CDS Start-End: 462-8453
agaggccgccctgagacggtgcgcgatggaccgagggccccagccggggaggcgccgccgccgagcccgcggccagacgccccatcagtagcgtccgcaccgggagccgcggctctcgcccgagccgtgggcgcgcccgaggggcgggctcgcctcccgccgtccctcgcagctctgccgggcccgagcccgcgccgccgccgccgccgccttgccgctcgggccgcgcggcccgggaaacgcggccgcgggctgcatgggcagcgcccgcgccccgccgctgagccgtcgcggagccgcgcagccctcggagcacgaatatatacagccctgctctgggacacacctccattggatttaaaagacagtcctcgtcagcactgactttcagctatggaatcgcagacggttgatgatgaagcgccggccgtgtaaatgaagatcgggtgaggagcaggacgatgcccaagggtgggtgccctaaagcaccacagcaggaagagcttcccctcagcagcgacatggtggagaagcagactgggaaaaaggataaagataaagtttctctaaccaagaccccaaaactggagcgtggcgatggcgggaaggaggtgagggagcgagccagcaagcggaagctgcccttcaccgcgggcgccaatggggagcagaaggactcggacacagagaagcagggccctgagcggaagaggattaagaaggagcctgtcacccggaaggccgggctgctgtttggcatggggctgtctggaatccgagccggctaccccctctccgagcgccagcaggtggcccttctcatgcagatgacggccgaggagtctgccaacagcccagtggacacaacaccaaagcacccctcccagtctacagtgtgtcagaagggaacgcccaactctgcctcaaaaaccaaagataaagtgaacaagagaaacgagcgtggagagacccgcctgcaccgagccgccatccgcggggacgcccggcgcatcaaagagctcatcagcgagggggcagacgtcaacgtcaaggacttcgcaggctggacggcgctgcacgaggcctgtaaccggggctactacgacgtcgcgaagcagctgctggctgcaggtgcggaggtgaacaccaagggcctagatgacgacacgcctttgcacgacgctgccaacaacgggcactacaaggtggtgaagctgctgctgcggtacggagggaacccgcagcagagcaacaggaaaggcgagacgccgctgaaagtggccaactcccccacgatggtgaacctcctgttaggcaaaggcacttacacttccagcgaggagagctcgacggagagctcagaagaggaagacgcaccatccttcgcaccttccagttcagtcgacggcaacaacacggactccgagttcgaaaaaggcctcaagcacaaggccaagaacccagagccacagaaggccacggcccccgtcaaggacgagtatgagtttgatgaggacgacgagcaggacagggttcctccggtggacgacaagcacctattgaaaaaggactacagaaaagaaacgaaatccaatagttttatctctatacccaaaatggaggttaaaagttacactaaaaataacacgattgcaccaaagaaagcgtcccatcgtatcctgtcagacacgtcggacgaggaggacgcgagtgtcaccgtggggacaggagagaagctgagactctcggcacatacgatattgcctggtagtaagacacgagagccttctaatgccaagcagcagaaggaaaaaaataaagtgaaaaagaagcgaaagaaagaaacaaaaggcagagaggttcgcttcggaaagcggagcgacaagttctgctcctcggagtcggagagcgagtcctcagagagtggggaggatgacagggactctctggggagctctggctgcctcaaggggtccccgctggtgctgaaggacccctccctgttcagctccctctctgcctcctccacctcgtctcacgggagctctgccgcccagaagcagaaccccagccacacagaccagcacaccaagcactggcggacagacaattggaaaaccatttcttccccggcttggtcagaggtcagttctttatcagactccacaaggacgagactgacaagcgagtctgactactcctctgagggctccagtgtggaatcgctgaagccagtgaggaagaggcaggagcacaggaagcgagcctccctgtcggagaagaagagccccttcctgtccagcgcggagggcgctgtccccaaactggacaaggaggggaaagttgtcaaaaaacataaaacaaaacacaaacacaaaaacaaggagaagggacagtgttccatcagccaagagctgaagttgaaaagttttacttacgaatatgaggactccaagcagaagtcagataaggctatactgttagagaatgatctttccactgaaaacaagctaaaagtgttaaagcacgatcgcgaccactttaaaaaagaagagaaacttagcaaaatgaaattagaagaaaaagaatggctctttaaagatgaaaaatcactgaagagaatcaaagacacaaacaaagacatcagcaggtctttccgagaagagaaagaccgttcgaataaagcagaaaaggagagatcgctgaaggaaaagtctccgaaagaagaaaaactgagactgtacaaagaggagagaaagaagaaatcaaaagaccggccctcaaaattagagaagaagaatgatttaaaagaggacaaaatttcaaaagagaaggagaagatttttaaagaagataaagaaaaactcaaaaaagaaaaggtttatagggaagattctgcttttgacgaatattgtaacaaaaatcagtttctggagaatgaagacaccaaatttagcctttctgacgatcagcgagatcggtggttttctgacttgtccgattcatcctttgatttcaaaggggaggacagctgggactcgccagtgacagactacagggacatgaagagcgactctgtggccaagctcatcttggagacggtgaaggaggacagcaaggagaggaggcgggacagccgggcccgggagaagcgagactacagagagcccttcttccgaaagaaggacagggactatttggataaaaactctgagaagaggaaagagcagaccgaaaagcataaaagtgtccctggctacctttcggaaaaggacaagaagaggagagagtccgcagaggccgggcgggacagaaaggacgccctggagagctgcaaggagcgcagggacggcagggccaagcccgaggaggcgcaccgggaggagctgaaggagtgtggctgcgagagtggcttcaaggacaagtccgacggcgactttgggaagggcctggagccgtgggaacggcaccacccagcacgagagaaggagaagaaggatggccccgataaggaaaggaaggagaagacaaaaccagaaagatacaaagagaaatccagtgacaaggacaaaagtgagaaatcaatcctggaaaaatgtcagaaggacaaagaatttgataaatgttttaaagagaaaaaagataccaaggaaaaacataaagacacacatggcaaagacaaagaaaggaaagcgtctctcgaccaagggaaagagaagaaggagaaggctttccctgggatcatctcagaagacttctctgaaaaaaaagatgacaagaaaggcaaagagaaaagctggtacatcgcagacatcttcacagatgagagtgaggacgacagagacagctgcatggggagcgggttcaagatgggagaggccagcgacttgccgaggacggacggcctccaggagaaggaggaaggacgggaggcctatgcctccgacagacacaggaagtcttctgacaagcagcaccctgagaggcagaaggacaaggagcccagagacaggagaaaggaccgaggggctgccgacgcggggagagacaaaaaagagaaagtctttgaaaagcacaaggagaagaaggataaagagtccacagaaaagtacaaggacaggaaggacagagcctcagtggactccacgcaagataagaaaaataaacagaagctccccgagaaggctgaaaagaagcacgctgccgaagacaaggctaaaagcaaacacaaagagaagtcggacaaagaacattccaaggagaggaagtcctcgagaagtgccgacgcggaaaaaagcctgcttgaaaagttggaagaagaggctctccatgagtacagagaagactccaacgataaaatcagcgaggtctcctctgacagcttcacggaccgagggcaggagccggggctgactgccttcctggaggtctctttcacggagccacctggagacgacaagccgagggagagcgcctgcctccctgagaagctgaaagagaaggagaggcacagacactcctcatcttcatccaagaagagccacgaccgagagcgagccaagaaagagaaggccgagaagaaagagaagggcgaagattacaaggagggcggtagcaggaaggactccggccagtacgaaaaggacttcctggaggcggatgcttacggagtttcttacaacatgaaagctgacatagaagatgagctagataaaaccattgaattgttttctaccgaaaagaaagataaaaatgattccgagagagaaccttccaagaaaatagaaaaggaactaaagccttatggatctagtgccatcaacatcctaaaagagaagaagaagagagagaaacacagggagaaatggagagacgagaaggagaggcaccgggacaggcatgcggatgggctgctgcggcatcacagggacgagctcctgcggcatcacagggacgagcagaagcccgccaccagggacaaggacagcccgccccgcgtgctcaaagacaagtccagggacgagggcccgaggctcggcgatgccaaactgaaggagaaattcaaggacggtgcagagaaagaaaagggcgacccagtgaagatgagcaacgggaatgataaggtagcgccatccaaagacccaggcaagaaagacgccaggcccagggagaagctcctgggggacggcgacctgatgatgaccagcttcgagaggatgctgtcccagaaggacctggagatcgaggagcgccacaagcggcacaaggagaggatgaagcaaatggagaagctgaggcaccggtccggagaccccaagctcaaggagaaggcgaagccggcagacgacgggcggaagaagggtctggacattcctgctaagaaaccgccggggctggaccctccatttaaagacaaaaagctcaaagagtcgactcctattccacctgccgcggaaaataagctacacccagcatcaggtgcagactccaaagactggctggcaggccctcacatgaaagaggtcctgcctgcgtcccccaggcctgaccagagccggcccactggcgtgcccacccctacgtcggtgctatcctgccccagctacgaggaggtgatgcacacgcccaggaccccgtcctgcagcgccgatgactacgcggacctcgtgttcgactgcgccgactcgcagcactccacgcccgtgcccaccgctcccaccagcgcctgctccccctcctttttcgacaggttctccgtggcttcaagtgggctttcggaaaacgccagccaggctcctgccaggcctctctccacaaacctttaccgctcggtctctgtcgacattaggaggacccccgaggaagaattcagcgtcggagacaagctcttcaggcagcagagcgttcctgctgcctccagctacgactctcccatgccaccctcgatggaagacagggcgcccctgcccccggttcccgcggagaagtttgcctgcttgtcgccagggtactactccccagactatggcctcccgtcgcccaaagtcgacgctttgcactgcccaccggctgccgttgtcactgtcaccccgtctccagagggcgtcttctcaagtttacaagcaaaaccttccccttcccccagagccgagctgctggttccttccctcgaaggggcccttcccccggacctggacacctccgaggaccagcaggcgacggccgccatcatccccccggagcccagctacctggagccgctggacgagggtcccttcagcgccgtcatcaccgaggagcccgttgagtgggcccacccctccgagcaggcgcttgcctctagcctgatcgggggcacctctgaaaaccctgtgagctggcctgtgggctcggacctcctgctgaagtctccacagagattccccgagtccccaaagcgtttctgccccgcggaccccctccactctgccgccccagggcccttcagcgcctcggaggcgccgtaccccgcccctcccgcctctcctgccccgtacgctctgcccgtcgctgagccggggctggaggacgtcaaggacggagtggacgccgtccccgccgccatctccacctcagaggcggctccctacgcccctccctccgggctggagtccttcttcagcaactgcaagtcacttccggaagccccgctggacgtggcccccgagcccgcctgtgtagccgctgtggctcaggtggaggctctggggcccctggaaaatagcttcctggacggcagccgcggcctgtctcacctcggccaggtggagccggtgccctgggcggacgccttcgccggccccgaggacgacctggacctggggcccttctccctgccggagcttcccctgcagactaaagatgccgcagatggtgaagcggaacccgtggaagaaagtcttgctcctccagaagagatgcctccaggggcccccggggtcataaacggtggggatgtttccaccgtagtggctgaggagccgccggcactgcctcctgaccaggcctccacccggctccctgcagagctcgagcctgagccctcaggggagccaaagctggacgtggctctagaagctgcggtggaggcggagacggtgccggaagagagggcccgtggggatccggactccagcgtggagcccgcgcccgttcccccagaacagcgcccactggggagcggagaccagggggctgaggctgaaggcccccccgccgcgtccctctgtgcccctgacggccccgccccgaacactgtggcacaagctcaggccgcagacggtgccggccccgaggacgacactgaggcctcccgtgccgccgccccagccgaaggccctcctggcggcatccagccggaagccgcagaaccaaaacccacggccgaagccccgaaggccccccgagtggaggagatccctcagcgcatgaccaggaaccgggcgcagatgctcgcgaaccagagcaagcagggcccgcccccctccgagaaggagtgcgcccccacccctgccccggtcaccagggccaaggcccgcggctccgaggacgacgacgcccaggcccagcatccgcgcaaacgccgctttcagcgctccacccagcagctgcagcagcagctgaacacgtccacgcagcagacgcgggaggtgatccagcagacgctggccgccatcgtggacgccatcaagctggatgccatcgagccctaccacagcgacagggccaacccctacttcgaatacctgcagatcaggaagaagatcgaggagaagcgcaagatcctgtgctgtatcacgccgcaggcgccccagtgctacgccgagtacgtcacctacacgggctcctacctcctggacggcaagccgctcagcaagctccacatccccgtgatcgcaccccctccctccctggcggagcccctgaaggagctgttcaggcagcaggaggccgtccggggaaagctgcgtctacagcacagcatcgagcgggagaagctgatcgtatcctgtgagcaggagattctgcgggttcactgccgggcggccaggaccatcgccaaccaggcagtgccattcagcgcctgcacgatgctgctggactccgaggtctacaacatgcccctggagagccagggtgacgagaacaagtcagtgcgcgaccgtttcaacgcccgccagttcatctcctggctccaggacgtggatgacaagtatgaccgcatgaagacttgcctcctcatgcggcagcagcacgaggccgcggccctgaacgccgtgcagaggatggagtggcagctgaaggtgcaggaactggaccccgccgggcacaagtccctgtgcgtgaacgaggtgccctccttctacgtgcccatggtcgacgtcaacgacgactttgtattgttgccggcatgacaccgcgggacggccgcaggacgcaggcgagggccgcacggctgcccaggactgctgctgagccccaggggcggaggagggagcgccctgtccacccgggcggggagagaccccgagagagactgcacttggccacagcgcctccatcccttccagactggtccagacgtcggggaggtgaaacacgtctcttctctaccagctgccgcggcgggggcaaagcccccagagcctcactggccccggcgggatgaggagaccatgccgggcgcgcacacacggcagcttctgtttgaaaacggcgaccttcgggcccttttctccagcaactgcagaggcatttcaggagttggagaacggagtacatttttaaaattttttgttccattctgatcaactaaagaaaattaaggtgtccacctctcacaaacagtgacctgcaggtcggaggggcaggagccccatcccagccgtggttctgttgccgccgagctgcgacggcctcagactgggcttcagacctggtgcggagccaggcggagggacacagagccaggactcccagccgtattgaaatggagtcaaatccgcgtggtttgtatcttctttcctttaatcttgggcattttgtttctctttctgagaacgtaacttgaaacactacagagccaataatcatataaaaagtgtatccgtaaacgctgtacagttttatataccttcacaatgtacttttgctgccttctagataatttattttgcaacacattactgcacagttgtaaataacttatgtactgtaacatcactttcagttatgtgtaaagaaataaataaattaattaaaa

SEQ ID NO: 107576 - DNA, 8342 bp, Homo sapiens
  Payload ID: 1109
  Gene Symbol: ANKRD11
  Gene Name: ankyrin repeat domain 11
  ENST ID: ENST00000330736
  CDS Start-End: 124-417
gtgagagtggatgagttttgagctgcctctgaattcagtgaattgtgtgtcttctcttttgaagcagacggttgatgatgaagcgccggccgtgtaaatgaagatcgggtgaggagcaggacgatgcccaagggtgggtgccctaaagcaccacagcaggaagagcttcccctcagcagcgacatggtggagaagcagactgggaaaaaggataaagataaagtttctctaaccaagaccccaaaactggagcgtggcgatggcgggaaggaggtgagggagcgagccagcaagcggaagctgcccttcaccgcgggcgccaatggggagcagaaggactcggacacagatgcctccagcccagtccctgttgtggtgctgcaaggctggtacgctcctcgaagcaccatggcatgagatggaggttcctagaagcaagaagaaagagaagcagggccctgagcggaagaggattaagaaggagcctgtcacccggaaggccgggctgctgtttggcatggggctgtctggaatccgagccggctaccccctctccgagcgccagcaggtggcccttctcatgcagatgacggccgaggagtctgccaacagcccagtggacacaacaccaaagcacccctcccagtctacagtgtgtcagaagggaacgcccaactctgcctcaaaaaccaaagataaagtgaacaagagaaacgagcgtggagagacccgcctgcaccgagccgccatccgcggggacgcccggcgcatcaaagagctcatcagcgagggggcagacgtcaacgtcaaggacttcgcaggctggacggcgctgcacgaggcctgtaaccggggctactacgacgtcgcgaagcagctgctggctgcaggtgcggaggtgaacaccaagggcctagatgacgacacgcctttgcacgacgctgccaacaacgggcactacaaggtggtgaagctgctgctgcggtacggagggaacccgcagcagagcaacaggaaaggcgagacgccgctgaaagtggccaactcccccacgatggtgaacctcctgttaggcaaaggcacttacacttccagcgaggagagctcgacggagagctcagaagaggaagacgcaccatccttcgcaccttccagttcagtcgacggcaacaacacggactccgagttcgaaaaaggcctcaagcacaaggccaagaacccagagccacagaaggccacggcccccgtcaaggacgagtatgagtttgatgaggacgacgagcaggacagggttcctccggtggacgacaagcacctattgaaaaaggactacagaaaagaaacgaaatccaatagttttatctctatacccaaaatggaggttaaaagttacactaaaaataacacgattgcaccaaagaaagcgtcccatcgtatcctgtcagacacgtcggacgaggaggacgcgagtgtcaccgtggggacaggagagaagctgagactctcggcacatacgatattgcctggtagtaagacacgagagccttctaatgccaagcagcagaaggaaaaaaataaagtgaaaaagaagcgaaagaaagaaacaaaaggcagagaggttcgcttcggaaagcggagcgacaagttctgctcctcggagtcggagagcgagtcctcagagagtggggaggatgacagggactctctggggagctctggctgcctcaaggggtccccgctggtgctgaaggacccctccctgttcagctccctctctgcctcctccacctcgtctcacgggagctctgccgcccagaagcagaaccccagccacacagaccagcacaccaagcactggcggacagacaattggaaaaccatttcttccccggcttggtcagaggtcagttctttatcagactccacaaggacgagactgacaagcgagtctgactactcctctgagggctccagtgtggaatcgctgaagccagtgaggaagaggcaggagcacaggaagcgagcctccctgtcggagaagaagagccccttcctgtccagcgcggagggcgctgtccccaaactggacaaggaggggaaagttgtcaaaaaacataaaacaaaacacaaacacaaaaacaaggagaagggacagtgttccatcagccaagagctgaagttgaaaagttttacttacgaatatgaggactccaagcagaagtcagataaggctatactgttagagaatgatctttccactgaaaacaagctaaaagtgttaaagcacgatcgcgaccactttaaaaaagaagagaaacttagcaaaatgaaattagaagaaaaagaatggctctttaaagatgaaaaatcactgaagagaatcaaagacacaaacaaagacatcagcaggtctttccgagaagagaaagaccgttcgaataaagcagaaaaggagagatcgctgaaggaaaagtctccgaaagaagaaaaactgagactgtacaaagaggagagaaagaagaaatcaaaagaccggccctcaaaattagagaagaagaatgatttaaaagaggacaaaatttcaaaagagaaggagaagatttttaaagaagataaagaaaaactcaaaaaagaaaaggtttatagggaagattctgcttttgacgaatattgtaacaaaaatcagtttctggagaatgaagacaccaaatttagcctttctgacgatcagcgagatcggtggttttctgacttgtccgattcatcctttgatttcaaaggggaggacagctgggactcgccagtgacagactacagggacatgaagagcgactctgtggccaagctcatcttggagacggtgaaggaggacagcaaggagaggaggcgggacagccgggcccgggagaagcgagactacagagagcccttcttccgaaagaaggacagggactatttggataaaaactctgagaagaggaaagagcagaccgaaaagcataaaagtgtccctggctacctttcggaaaaggacaagaagaggagagagtccgcagaggccgggcgggacagaaaggacgccctggagagctgcaaggagcgcagggacggcagggccaagcccgaggaggcgcaccgggaggagctgaaggagtgtggctgcgagagtggcttcaaggacaagtccgacggcgactttgggaagggcctggagccgtgggaacggcaccacccagcacgagagaaggagaagaaggatggccccgataaggaaaggaaggagaagacaaaaccagaaagatacaaagagaaatccagtgacaaggacaaaagtgagaaatcaatcctggaaaaatgtcagaaggacaaagaatttgataaatgttttaaagagaaaaaagataccaaggaaaaacataaagacacacatggcaaagacaaagaaaggaaagcgtctctcgaccaagggaaagagaagaaggagaaggctttccctgggatcatctcagaagacttctctgaaaaaaaagatgacaagaaaggcaaagagaaaagctggtacatcgcagacatcttcacagatgagagtgaggacgacagagacagctgcatggggagcgggttcaagatgggagaggccagcgacttgccgaggacggacggcctccaggagaaggaggaaggacgggaggcctatgcctccgacagacacaggaagtcttctgacaagcagcaccctgagaggcagaaggacaaggagcccagagacaggagaaaggaccgaggggctgccgacgcggggagagacaaaaaagagaaagtctttgaaaagcacaaggagaagaaggataaagagtccacagaaaagtacaaggacaggaaggacagagcctcagtggactccacgcaagataagaaaaataaacagaagctccccgagaaggctgaaaagaagcacgctgccgaagacaaggctaaaagcaaacacaaagagaagtcggacaaagaacattccaaggagaggaagtcctcgagaagtgccgacgcggaaaaaagcctgcttgaaaagttggaagaagaggctctccatgagtacagagaagactccaacgataaaatcagcgaggtctcctctgacagcttcacggaccgagggcaggagccggggctgactgccttcctggaggtctctttcacggagccacctggagacgacaagccgagggagagcgcctgcctccctgagaagctgaaagagaaggagaggcacagacactcctcatcttcatccaagaagagccacgaccgagagcgagccaagaaagagaaggccgagaagaaagagaagggcgaagattacaaggagggcggtagcaggaaggactccggccagtacgaaaaggacttcctggaggcggatgcttacggagtttcttacaacatgaaagctgacatagaagatgagctagataaaaccattgaattgttttctaccgaaaagaaagataaaaatgattccgagagagaaccttccaagaaaatagaaaaggaactaaagccttatggatctagtgccatcaacatcctaaaagagaagaagaagagagagaaacacagggagaaatggagagacgagaaggagaggcaccgggacaggcatgcggatgggctgctgcggcatcacagggacgagctcctgcggcatcacagggacgagcagaagcccgccaccagggacaaggacagcccgccccgcgtgctcaaagacaagtccagggacgagggcccgaggctcggcgatgccaaactgaaggagaaattcaaggacggtgcagagaaagaaaagggcgacccagtgaagatgagcaacgggaatgataaggtagcgccatccaaagacccaggcaagaaagacgccaggcccagggagaagctcctgggggacggcgacctgatgatgaccagcttcgagaggatgctgtcccagaaggacctggagatcgaggagcgccacaagcggcacaaggagaggatgaagcaaatggagaagctgaggcaccggtccggagaccccaagctcaaggagaaggcgaagccggcagacgacgggcggaagaagggtctggacattcctgctaagaaaccgccggggctggaccctccatttaaagacaaaaagctcaaagagtcgactcctattccacctgccgcggaaaataagctacacccagcatcaggtgcagactccaaagactggctggcaggccctcacatgaaagaggtcctgcctgcgtcccccaggcctgaccagagccggcccactggcgtgcccacccctacgtcggtgctatcctgccccagctacgaggaggtgatgcacacgcccaggaccccgtcctgcagcgccgatgactacgcggacctcgtgttcgactgcgccgactcgcagcactccacgcccgtgcccaccgctcccaccagcgcctgctccccctcctttttcgacaggttctccgtggcttcaagtgggctttcggaaaacgccagccaggctcctgccaggcctctctccacaaacctttaccgctcggtctctgtcgacattaggaggacccccgaggaagaattcagcgtcggagacaagctcttcaggcagcagagcgttcctgctgcctccagctacgactctcccatgccaccctcgatggaagacagggcgcccctgcccccggttcccgcggagaagtttgcctgcttgtcgccagggtactactccccagactatggcctcccgtcgcccaaagtcgacgctttgcactgcccaccggctgccgttgtcactgtcaccccgtctccagagggcgtcttctcaagtttacaagcaaaaccttccccttcccccagagccgagctgctggttccttccctcgaaggggcccttcccccggacctggacacctccgaggaccagcaggcgacggccgccatcatccccccggagcccagctacctggagccgctggacgagggtcccttcagcgccgtcatcaccgaggagcccgttgagtgggcccacccctccgagcaggcgcttgcctctagcctgatcgggggcacctctgaaaaccctgtgagctggcctgtgggctcggacctcctgctgaagtctccacagagattccccgagtccccaaagcgtttctgccccgcggaccccctccactctgccgccccagggcccttcagcgcctcggaggcgccgtaccccgcccctcccgcctctcctgccccgtacgctctgcccgtcgctgagccggggctggaggacgtcaaggacggagtggacgccgtccccgccgccatctccacctcagaggcggctccctacgcccctccctccgggctggagtccttcttcagcaactgcaagtcacttccggaagccccgctggacgtggcccccgagcccgcctgtgtagccgctgtggctcaggtggaggctctggggcccctggaaaatagcttcctggacggcagccgcggcctgtctcacctcggccaggtggagccggtgccctgggcggacgccttcgccggccccgaggacgacctggacctggggcccttctccctgccggagcttcccctgcagactaaagatgccgcagatggtgaagcggaacccgtggaagaaagtcttgctcctccagaagagatgcctccaggggcccccggggtcataaacggtggggatgtttccaccgtagtggctgaggagccgccggcactgcctcctgaccaggcctccacccggctccctgcagagctcgagcctgagccctcaggggagccaaagctggacgtggctctagaagctgcggtggaggcggagacggtgccggaagagagggcccgtggggatccggactccagcgtggagcccgcgcccgttcccccagaacagcgcccactggggagcggagaccagggggctgaggctgaaggcccccccgccgcgtccctctgtgcccctgacggccccgccccgaacactgtggcacaagctcaggccgcagacggtgccggccccgaggacgacactgaggcctcccgtgccgccgccccagccgaaggccctcctggcggcatccagccggaagccgcagaaccaaaacccacggccgaagccccgaaggccccccgagtggaggagatccctcagcgcatgaccaggaaccgggcgcagatgctcgcgaaccagagcaagcagggcccgcccccctccgagaaggagtgcgcccccacccctgccccggtcaccagggccaaggcccgcggctccgaggacgacgacgcccaggcccagcatccgcgcaaacgccgctttcagcgctccacccagcagctgcagcagcagctgaacacgtccacgcagcagacgcgggaggtgatccagcagacgctggccgccatcgtggacgccatcaagctggatgccatcgagccctaccacagcgacagggccaacccctacttcgaatacctgcagatcaggaagaagatcgaggagaagcgcaagatcctgtgctgtatcacgccgcaggcgccccagtgctacgccgagtacgtcacctacacgggctcctacctcctggacggcaagccgctcagcaagctccacatccccgtgatcgcaccccctccctccctggcggagcccctgaaggagctgttcaggcagcaggaggccgtccggggaaagctgcgtctacagcacagcatcgagcgggagaagctgatcgtatcctgtgagcaggagattctgcgggttcactgccgggcggccaggaccatcgccaaccaggcagtgccattcagcgcctgcacgatgctgctggactccgaggtctacaacatgcccctggagagccagggtgacgagaacaagtcagtgcgcgaccgtttcaacgcccgccagttcatctcctggctccaggacgtggatgacaagtatgaccgcatgaagacttgcctcctcatgcggcagcagcacgaggccgcggccctgaacgccgtgcagaggatggagtggcagctgaaggtgcaggaactggaccccgccgggcacaagtccctgtgcgtgaacgaggtgccctccttctacgtgcccatggtcgacgtcaacgacgactttgtattgttgccggcatgacaccgcgggacggccgcaggacgcaggcgagggccgcacggctgcccaggactgctgctgagccccaggggcggaggagggagcgccctgtccacccgggcggggagagaccccgagagagactgcactt

SEQ ID NO: 107577 - DNA, 9132 bp, Homo sapiens
  Payload ID: 1109
  Gene Symbol: ANKRD11
  Gene Name: ankyrin repeat domain 11
  Uniprot ID: Q6UB99
  ENST ID: ENST00000378330
  CDS Start-End: 290-8281
ggccgcgggctgcatgggcagcgcccgcgccccgccgctgagccgtcgcggagccgcgcagccctcggagcacgcccgtgcagcctgccaggactcttccagacacgggatttgtcggtgaacaacgcagagctgatgcagacataatatatacagccctgctctgggacacacctccattggatttaaaagacagtcctcgtcagcactgactttcagctatggaatcgcagacggttgatgatgaagcgccggccgtgtaaatgaagatcgggtgaggagcaggacgatgcccaagggtgggtgccctaaagcaccacagcaggaagagcttcccctcagcagcgacatggtggagaagcagactgggaaaaaggataaagataaagtttctctaaccaagaccccaaaactggagcgtggcgatggcgggaaggaggtgagggagcgagccagcaagcggaagctgcccttcaccgcgggcgccaatggggagcagaaggactcggacacagagaagcagggccctgagcggaagaggattaagaaggagcctgtcacccggaaggccgggctgctgtttggcatggggctgtctggaatccgagccggctaccccctctccgagcgccagcaggtggcccttctcatgcagatgacggccgaggagtctgccaacagcccagtggacacaacaccaaagcacccctcccagtctacagtgtgtcagaagggaacgcccaactctgcctcaaaaaccaaagataaagtgaacaagagaaacgagcgtggagagacccgcctgcaccgagccgccatccgcggggacgcccggcgcatcaaagagctcatcagcgagggggcagacgtcaacgtcaaggacttcgcaggctggacggcgctgcacgaggcctgtaaccggggctactacgacgtcgcgaagcagctgctggctgcaggtgcggaggtgaacaccaagggcctagatgacgacacgcctttgcacgacgctgccaacaacgggcactacaaggtggtgaagctgctgctgcggtacggagggaacccgcagcagagcaacaggaaaggcgagacgccgctgaaagtggccaactcccccacgatggtgaacctcctgttaggcaaaggcacttacacttccagcgaggagagctcgacggagagctcagaagaggaagacgcaccatccttcgcaccttccagttcagtcgacggcaacaacacggactccgagttcgaaaaaggcctcaagcacaaggccaagaacccagagccacagaaggccacggcccccgtcaaggacgagtatgagtttgatgaggacgacgagcaggacagggttcctccggtggacgacaagcacctattgaaaaaggactacagaaaagaaacgaaatccaatagttttatctctatacccaaaatggaggttaaaagttacactaaaaataacacgattgcaccaaagaaagcgtcccatcgtatcctgtcagacacgtcggacgaggaggacgcgagtgtcaccgtggggacaggagagaagctgagactctcggcacatacgatattgcctggtagtaagacacgagagccttctaatgccaagcagcagaaggaaaaaaataaagtgaaaaagaagcgaaagaaagaaacaaaaggcagagaggttcgcttcggaaagcggagcgacaagttctgctcctcggagtcggagagcgagtcctcagagagtggggaggatgacagggactctctggggagctctggctgcctcaaggggtccccgctggtgctgaaggacccctccctgttcagctccctctctgcctcctccacctcgtctcacgggagctctgccgcccagaagcagaaccccagccacacagaccagcacaccaagcactggcggacagacaattggaaaaccatttcttccccggcttggtcagaggtcagttctttatcagactccacaaggacgagactgacaagcgagtctgactactcctctgagggctccagtgtggaatcgctgaagccagtgaggaagaggcaggagcacaggaagcgagcctccctgtcggagaagaagagccccttcctgtccagcgcggagggcgctgtccccaaactggacaaggaggggaaagttgtcaaaaaacataaaacaaaacacaaacacaaaaacaaggagaagggacagtgttccatcagccaagagctgaagttgaaaagttttacttacgaatatgaggactccaagcagaagtcagataaggctatactgttagagaatgatctttccactgaaaacaagctaaaagtgttaaagcacgatcgcgaccactttaaaaaagaagagaaacttagcaaaatgaaattagaagaaaaagaatggctctttaaagatgaaaaatcactgaagagaatcaaagacacaaacaaagacatcagcaggtctttccgagaagagaaagaccgttcgaataaagcagaaaaggagagatcgctgaaggaaaagtctccgaaagaagaaaaactgagactgtacaaagaggagagaaagaagaaatcaaaagaccggccctcaaaattagagaagaagaatgatttaaaagaggacaaaatttcaaaagagaaggagaagatttttaaagaagataaagaaaaactcaaaaaagaaaaggtttatagggaagattctgcttttgacgaatattgtaacaaaaatcagtttctggagaatgaagacaccaaatttagcctttctgacgatcagcgagatcggtggttttctgacttgtccgattcatcctttgatttcaaaggggaggacagctgggactcgccagtgacagactacagggacatgaagagcgactctgtggccaagctcatcttggagacggtgaaggaggacagcaaggagaggaggcgggacagccgggcccgggagaagcgagactacagagagcccttcttccgaaagaaggacagggactatttggataaaaactctgagaagaggaaagagcagaccgaaaagcataaaagtgtccctggctacctttcggaaaaggacaagaagaggagagagtccgcagaggccgggcgggacagaaaggacgccctggagagctgcaaggagcgcagggacggcagggccaagcccgaggaggcgcaccgggaggagctgaaggagtgtggctgcgagagtggcttcaaggacaagtccgacggcgactttgggaagggcctggagccgtgggaacggcaccacccagcacgagagaaggagaagaaggatggccccgataaggaaaggaaggagaagacaaaaccagaaagatacaaagagaaatccagtgacaaggacaaaagtgagaaatcaatcctggaaaaatgtcagaaggacaaagaatttgataaatgttttaaagagaaaaaagataccaaggaaaaacataaagacacacatggcaaagacaaagaaaggaaagcgtctctcgaccaagggaaagagaagaaggagaaggctttccctgggatcatctcagaagacttctctgaaaaaaaagatgacaagaaaggcaaagagaaaagctggtacatcgcagacatcttcacagatgagagtgaggacgacagagacagctgcatggggagcgggttcaagatgggagaggccagcgacttgccgaggacggacggcctccaggagaaggaggaaggacgggaggcctatgcctccgacagacacaggaagtcttctgacaagcagcaccctgagaggcagaaggacaaggagcccagagacaggagaaaggaccgaggggctgccgacgcggggagagacaaaaaagagaaagtctttgaaaagcacaaggagaagaaggataaagagtccacagaaaagtacaaggacaggaaggacagagcctcagtggactccacgcaagataagaaaaataaacagaagctccccgagaaggctgaaaagaagcacgctgccgaagacaaggctaaaagcaaacacaaagagaagtcggacaaagaacattccaaggagaggaagtcctcgagaagtgccgacgcggaaaaaagcctgcttgaaaagttggaagaagaggctctccatgagtacagagaagactccaacgataaaatcagcgaggtctcctctgacagcttcacggaccgagggcaggagccggggctgactgccttcctggaggtctctttcacggagccacctggagacgacaagccgagggagagcgcctgcctccctgagaagctgaaagagaaggagaggcacagacactcctcatcttcatccaagaagagccacgaccgagagcgagccaagaaagagaaggccgagaagaaagagaagggcgaagattacaaggagggcggtagcaggaaggactccggccagtacgaaaaggacttcctggaggcggatgcttacggagtttcttacaacatgaaagctgacatagaagatgagctagataaaaccattgaattgttttctaccgaaaagaaagataaaaatgattccgagagagaaccttccaagaaaatagaaaaggaactaaagccttatggatctagtgccatcaacatcctaaaagagaagaagaagagagagaaacacagggagaaatggagagacgagaaggagaggcaccgggacaggcatgcggatgggctgctgcggcatcacagggacgagctcctgcggcatcacagggacgagcagaagcccgccaccagggacaaggacagcccgccccgcgtgctcaaagacaagtccagggacgagggcccgaggctcggcgatgccaaactgaaggagaaattcaaggacggtgcagagaaagaaaagggcgacccagtgaagatgagcaacgggaatgataaggtagcgccatccaaagacccaggcaagaaagacgccaggcccagggagaagctcctgggggacggcgacctgatgatgaccagcttcgagaggatgctgtcccagaaggacctggagatcgaggagcgccacaagcggcacaaggagaggatgaagcaaatggagaagctgaggcaccggtccggagaccccaagctcaaggagaaggcgaagccggcagacgacgggcggaagaagggtctggacattcctgctaagaaaccgccggggctggaccctccatttaaagacaaaaagctcaaagagtcgactcctattccacctgccgcggaaaataagctacacccagcatcaggtgcagactccaaagactggctggcaggccctcacatgaaagaggtcctgcctgcgtcccccaggcctgaccagagccggcccactggcgtgcccacccctacgtcggtgctatcctgccccagctacgaggaggtgatgcacacgcccaggaccccgtcctgcagcgccgatgactacgcggacctcgtgttcgactgcgccgactcgcagcactccacgcccgtgcccaccgctcccaccagcgcctgctccccctcctttttcgacaggttctccgtggcttcaagtgggctttcggaaaacgccagccaggctcctgccaggcctctctccacaaacctttaccgctcggtctctgtcgacattaggaggacccccgaggaagaattcagcgtcggagacaagctcttcaggcagcagagcgttcctgctgcctccagctacgactctcccatgccaccctcgatggaagacagggcgcccctgcccccggttcccgcggagaagtttgcctgcttgtcgccagggtactactccccagactatggcctcccgtcgcccaaagtcgacgctttgcactgcccaccggctgccgttgtcactgtcaccccgtctccagagggcgtcttctcaagtttacaagcaaaaccttccccttcccccagagccgagctgctggttccttccctcgaaggggcccttcccccggacctggacacctccgaggaccagcaggcgacggccgccatcatccccccggagcccagctacctggagccgctggacgagggtcccttcagcgccgtcatcaccgaggagcccgttgagtgggcccacccctccgagcaggcgcttgcctctagcctgatcgggggcacctctgaaaaccctgtgagctggcctgtgggctcggacctcctgctgaagtctccacagagattccccgagtccccaaagcgtttctgccccgcggaccccctccactctgccgccccagggcccttcagcgcctcggaggcgccgtaccccgcccctcccgcctctcctgccccgtacgctctgcccgtcgctgagccggggctggaggacgtcaaggacggagtggacgccgtccccgccgccatctccacctcagaggcggctccctacgcccctccctccgggctggagtccttcttcagcaactgcaagtcacttccggaagccccgctggacgtggcccccgagcccgcctgtgtagccgctgtggctcaggtggaggctctggggcccctggaaaatagcttcctggacggcagccgcggcctgtctcacctcggccaggtggagccggtgccctgggcggacgccttcgccggccccgaggacgacctggacctggggcccttctccctgccggagcttcccctgcagactaaagatgccgcagatggtgaagcggaacccgtggaagaaagtcttgctcctccagaagagatgcctccaggggcccccggggtcataaacggtggggatgtttccaccgtagtggctgaggagccgccggcactgcctcctgaccaggcctccacccggctccctgcagagctcgagcctgagccctcaggggagccaaagctggacgtggctctagaagctgcggtggaggcggagacggtgccggaagagagggcccgtggggatccggactccagcgtggagcccgcgcccgttcccccagaacagcgcccactggggagcggagaccagggggctgaggctgaaggcccccccgccgcgtccctctgtgcccctgacggccccgccccgaacactgtggcacaagctcaggccgcagacggtgccggccccgaggacgacactgaggcctcccgtgccgccgccccagccgaaggccctcctggcggcatccagccggaagccgcagaaccaaaacccacggccgaagccccgaaggccccccgagtggaggagatccctcagcgcatgaccaggaaccgggcgcagatgctcgcgaaccagagcaagcagggcccgcccccctccgagaaggagtgcgcccccacccctgccccggtcaccagggccaaggcccgcggctccgaggacgacgacgcccaggcccagcatccgcgcaaacgccgctttcagcgctccacccagcagctgcagcagcagctgaacacgtccacgcagcagacgcgggaggtgatccagcagacgctggccgccatcgtggacgccatcaagctggatgccatcgagccctaccacagcgacagggccaacccctacttcgaatacctgcagatcaggaagaagatcgaggagaagcgcaagatcctgtgctgtatcacgccgcaggcgccccagtgctacgccgagtacgtcacctacacgggctcctacctcctggacggcaagccgctcagcaagctccacatccccgtgatcgcaccccctccctccctggcggagcccctgaaggagctgttcaggcagcaggaggccgtccggggaaagctgcgtctacagcacagcatcgagcgggagaagctgatcgtatcctgtgagcaggagattctgcgggttcactgccgggcggccaggaccatcgccaaccaggcagtgccattcagcgcctgcacgatgctgctggactccgaggtctacaacatgcccctggagagccagggtgacgagaacaagtcagtgcgcgaccgtttcaacgcccgccagttcatctcctggctccaggacgtggatgacaagtatgaccgcatgaagacttgcctcctcatgcggcagcagcacgaggccgcggccctgaacgccgtgcagaggatggagtggcagctgaaggtgcaggaactggaccccgccgggcacaagtccctgtgcgtgaacgaggtgccctccttctacgtgcccatggtcgacgtcaacgacgactttgtattgttgccggcatgacaccgcgggacggccgcaggacgcaggcgagggccgcacggctgcccaggactgctgctgagccccaggggcggaggagggagcgccctgtccacccgggcggggagagaccccgagagagactgcacttggccacagcgcctccatcccttccagactggtccagacgtcggggaggtgaaacacgtctcttctctaccagctgccgcggcgggggcaaagcccccagagcctcactggccccggcgggatgaggagaccatgccgggcgcgcacacacggcagcttctgtttgaaaacggcgaccttcgggcccttttctccagcaactgcagaggcatttcaggagttggagaacggagtacatttttaaaattttttgttccattctgatcaactaaagaaaattaaggtgtccacctctcacaaacagtgacctgcaggtcggaggggcaggagccccatcccagccgtggttctgttgccgccgagctgcgacggcctcagactgggcttcagacctggtgcggagccaggcggagggacacagagccaggactcccagccgtattgaaatggagtcaaatccgcgtggtttgtatcttctttcctttaatcttgggcattttgtttctctttctgagaacgtaacttgaaacactacagagccaataatcatataaaaagtgtatccgtaaacgctgtacagttttatataccttcacaatgtacttttgctgccttctagataatttattttgcaacacattactgcacagttgtaaataacttatgtactgtaacatcactttcagttatgtgtaaagaaataaataaattaattaaaatgc

SEQ ID NO: 107578 - DNA, 1982 bp, Homo sapiens
  Payload ID: 1109
  Gene Symbol: ANKRD11
  Gene Name: ankyrin repeat domain 11
  ENST ID: ENST00000378332
  CDS Start-End: 418-525
cggggaggcgccgccgccgagcccgcggccagacgccccatcagtagcgtccgcaccgggagccgcggctctcgcccgagccgtgggcgcgcccgaggggcgggctcgcctcccgccgtccctcgcagctctgccgggcccgagcccgcgccgccgccgccgccgccttgccgctcgggccgcgcggcccgggaaacgcggccgcgggctgcatgggcagcgcccgcgccccgccgctgagccgtcgcggagccgcgcagccctcggagcacgaatatatacagccctgctctgggacacacctccattggatttaaaagacagtcctcgtcagcactgactttcagctatggaatcgcagacggttgatgatgaagcgccggccgtgtaaatgaagatcgggtgaggagcaggacgatgcccaagggtgggtgccctaaagcaccacagcaggaagagcttcccctcagcagcgacatggtggagaagcagactgggaaaaagatttttccaaaagaatcgtgatctcagtgacatatacgtggaagatggaaatggagcccacaactctgcagtgcatcctgatgccgcgctgacctgacggcttgtgcgtgtccctttggctgcaccagtgagcacagtggcaggcgtgtcagagaaagggccccttctgcagacggtctctcaccattgccgaccacggaatcccagaaccgctgagctgcctcgggaagaaccagcaggtgtctgcatcgttgagtgtgttctgatccaaaggataaagataaagtttctctaaccaagaccccaaaactggagcgtggcgatggcgggaaggaggtgagggagcgagccagcaagcggaagctgcccttcaccgcgggcgccaatggggagcagaaggactcggacacagatgcctccagcccagtccctgttgtggtgctgcaaggctggtacgctcctcgaagcaccatggcatgagatggaggttcctagaagcaagaagaaagagaagcagggccctgagcggaagaggattaagaaggagcctgtcacccggaaggccgggctgctgtttggcatggggctgtctggaatccgagccggctaccccctctccgagcgccagcaggtggcccttctcatgcagatgacggccgaggagtctgccaacagcccagtggacacaacaccaaagcacccctcccagtctacagtgtgtcagaagggaacgcccaactctgcctcaaaaaccaaagataaagtgaacaagagaaacgagcgtggagagacccgcctgcaccgagccgccatccgcggggacgcccggcgcatcaaagagctcatcagcgagggggcagacgtcaacgtcaaggacttcgcaggctggacggcgctgcacgaggcctgtaaccggggctactacgacgtcgcgaagcagctgctggctgcaggtgcggaggtgaacaccaagggcctagatgacgacacgcctttgcacgacgctgccaacaacgggcactacaagcccccatgatggaggaaaggaaggatcctgccctgccagcaccttgacctctgacctccacaattgtaagcctgaggttttgtgtagtcaccatagaaaactcacacacataagaactctgtactgattcaacaatagaacatgtcacacacgaactggaaactgattctgtgggcgacaagagtctatagtaaacgttatgacagattctttgaatgcgctaatctcagactggactaaagttgggattaaatttaatttgtacttgagttcagtgcattgctgttctgggcataggaaatccaggttgctggtgatgaacagctgaaaagagctgtgtcaccatggttgtctctgtcagtcatgtgaccacccttacccttgtaaaatcaagcaagggagagattattttctaatgtaaatgaaaataaaaaataaagcagcttgcaga

SEQ ID NO: 107579 - DNA, 2762 bp, Homo sapiens
  Payload ID: 1109
  Gene Symbol: ANKRD11
  Gene Name: ankyrin repeat domain 11
  ENST ID: ENST00000562275
  CDS Start-End: 57-350
acggttgatgatgaagcgccggccgtgtaaatgaagatcgggtgaggagcaggacgatgcccaagggtgggtgccctaaagcaccacagcaggaagagcttcccctcagcagcgacatggtggagaagcagactgggaaaaaggataaagataaagtttctctaaccaagaccccaaaactggagcgtggcgatggcgggaaggaggtgagggagcgagccagcaagcggaagctgcccttcaccgcgggcgccaatggggagcagaaggactcggacacagatgcctccagcccagtccctgttgtggtgctgcaaggctggtacgctcctcgaagcaccatggcatgagatggaggttcctagaagcaagaagaaagagaagcagggccctgagcggaagaggattaagaaggagcctgtcacccggaaggccgggctgctgtttggcatggggctgtctggaatccgagccggctaccccctctccgagcgccagcaggtggcccttctcatgcagatgacggccgaggagtctgccaacagcccagtggacacaacaccaaagcacccctcccagtctacagtgtgtcagaagggaacgcccaactctgcctcaaaaaccaaagataaagtgaacaagagaaacgagcgtggagagacccgcctgcaccgagccgccatccgcggggacgcccggcgcatcaaagagctcatcagcgagggggcagacgtcaacgtcaaggacttcgcaggctggacggcgctgcacgaggcctgtaaccggggctactacgacgtcgcgaagcagctgctggctgcaggtgcggaggtgaacaccaagggcctagatgacgacacgcctttgcacgacgctgccaacaacgggcactacaaggttggcatccccccgttcttcacacatccggcctgtcctggcatctgggtggttctgtagctttgtttccccgtagctagccggttccatgatgtggggcacaggaaagcgagttttcgccttgcccaccctcaaggccgagctgtgccctctgtctgcccccagctttccccttctgggtcagcctggacggcctctcacaggtttcccagcaagtgccatctatgaaaggctcgtatccgctagccgtgtaggtctggttggatttgagcaggtgaaggattacaccaagtggaaggaggcctgcaggagttgctgccggtccccgtcaccactgtgggactgttagacctgcaaggcagacccaccctcgtctggaatgaggtaacaccaagaggtgtggccagtgcacagaaccatagactcaagctttagaaagtggccattgtggccggcccaggagcagtgggcactgagaggtctcagcctctgtgggggtcgagagaggtcgtggtgtgcctgacagccccgtcctgccggaaagcaggggtgctgcctggagatgcggcgggtctcactgatgtcttcatcagagctccgtggagagcccctggttgcaggcaggacagcaaggctgaggggtcacacggggccacatctgctggtgcccgtcgtgctcctctgcagcaagcccagcctggccattgctggaggtcctggagcccacagtgccttggccttaaagagctcacttgagaaacggcttgttccggtggggtggggggtggattgaagactctgagacgagcagggaactcagaacactgagtccctatttgatgttaaaatatgaccgttaaacttctgggtaagataatgaatggcactatggtttatactgtttctgttttatgggctcttccagagacgtgaactggaaaaggctctgcagtgtctgggattcgctcagtgctgcaggggagggcaggtgtgaggggaatggccctggagggtgatggggctggggcatccgatgcagctttatagttctgtaattaccacttttaaactttttattacgaaaaatgtcaaggaccctggaattacggtgaggtaggcaggataatggcccccaagatgcccgtgttgtgacccccagaccttgtgagtgcctcacatggggagattgtcctaggtcatcttgcaggcccagggcagccccatgggcccttaaagcttgagagcctttcctgctgagtctgagagatgccagaagcaggagaggttagaacccgaggagggccgcacctgcgctgctggccttagaggagggccgaggagtgtggtggcccctaagcagctgggactggggacctccgtcccagccctgcaagaaactgaattctgccagcagcccccatgatggaggaaaggaaggatcctgccctgccagcaccttgacctctgacctccacaattgtaagcctgaggttttgtgtagtcaccatagaaaactcacacacataagaactctgtactgattcaacaatagaacatgtcacacacgaactggaaactgattctgtgggcgacaagagtctatagtaaacgttatgacagattctttgaatgcgctaatctcagactggactaaagttgggattaaatttaatttgtacttgagttcagtgcattgctgttctgggcataggaaatccaggttgctggtgatgaacagctgaaaagagctgtgtcaccatggttgtctctgtcagtcatgtgaccacccttacccttgtaaaatcaagcaagggagagattattttctaatgtaaatgaaaataaaaaataaagcagcttgcaga

SEQ ID NO: 107580 - DNA, 593 bp, Homo sapiens
  Payload ID: 1109
  Gene Symbol: ANKRD11
  Gene Name: ankyrin repeat domain 11
  ENST ID: ENST00000563291
  CDS Start-End: 101-475
actcactcagcaggggcctccactgatttcgcccgtgctcctggacggttgatgatgaagcgccggccgtgtaaatgaagatcgggtgaggagcaggacgatgcccaagggtgggtgccctaaagcaccacagcaggaagagcttcccctcagcagcgacatggtggagaagcagactgggaaaaaggataaagataaagtttctctaaccaagaccccaaaactggagcgtggcgatggcgggaaggaggtgagggagcgagccagcaagcggaagctgcccttcaccgcgggcgccaatggggagcagaaggactcggacacaggaccgccggggtcctgcttgtcctggggcagccacgagggagccctcgtcaggagcgccatgggccgaagctgcctgccctctgcacgtggatgtttctttggaacaaggggaaaaattatgattttcttattttgctttgacctgtgaatgacaccctggtctctggtgcctggggtgtgctctctgcagtgctgccaggcacatgctggttccttcagcgttaggtgcttggcaccttcagtcttttcctgacgtcatgtttgtt

SEQ ID NO: 107581 - DNA, 618 bp, Homo sapiens
  Payload ID: 1109
  Gene Symbol: ANKRD11
  Gene Name: ankyrin repeat domain 11
  ENST ID: ENST00000562194
  CDS Start-End: 1-616
gtttccaggctggacggcgctgcacgaggcctgtaaccggggctactacgacgtcgcgaagcagctgctggctgcaggtgcggaggtgaacaccaagggcctagatgacgacacgcctttgcacgacgctgccaacaacgggcactacaagatcgcaccccctccctccctggcggagcccctgaaggagctgttcaggcagcaggaggccgtccggggaaagctgcgtctacagcacagcatcgagcgggagaagctgatcgtatcctgtgagcaggagattctgcgggttcactgccgggcggccaggaccatcgccaaccaggcagtgccattcagcgcctgcacgatgctgctggactccgaggtctacaacatgcccctggagagccagggtgacgagaacaagtcagtgcgcgaccgtttcaacgcccgccagttcatctcctggctccaggacgtggatgacaagtatgaccgcatgaagacttgcctcctcatgcggcagcagcacgaggccgcggccctgaacgccgtgcagaggatggagtggcagctgaaggtgcaggaactggaccccgccgggcacaagtccctgtgcgtgaacgaggtgccctc

SEQ ID NO: 107582 - DNA, 1584 bp, Homo sapiens
  Payload ID: 1109
  Gene Symbol: ANKRD11
  Gene Name: ankyrin repeat domain 11
  ENST ID: ENST00000613312
  CDS Start-End: 219-1319
ggccgcgggctgcatgggcagcgcccgcgccccgccgctgagccgtcgcggagccgcgcagccctcggagcacgaatatatacagccctgctctgggacacacctccattggatttaaaagacagtcctcgtcagcactgactttcagctatggaatcgcagacggttgatgatgaagcgccggccgtgtaaatgaagatcgggtgaggagcaggacgatgcccaagggtgggtgccctaaagcaccacagcaggaagagcttcccctcagcagcgacatggtggagaagcagactgggaaaaaggataaagataaagtttctctaaccaagaccccaaaactggagcgtggcgatggcgggaaggaggtgagggagcgagccagcaagcggaagctgcccttcaccgcgggcgccaatggggagcagaaggactcggacacagagaagcagggccctgagcggaagaggattaagaaggagcctgtcacccggaaggccgggctgctgtttggcatggggctgtctggaatccgagccggctaccccctctccgagcgccagcaggtggcccttctcatgcagatgacggccgaggagtctgccaacagcccagtggacacaacaccaaagcacccctcccagtctacagtgtgtcagaagggaacgcccaactctgcctcaaaaaccaaagataaagtgaacaagagaaacgagcgtggagagacccgcctgcaccgagccgccatccgcggggacgcccggcgcatcaaagagctcatcagcgagggggcagacgtcaacgtcaaggacttcgcaggctggacggcgctgcacgaggcctgtaaccggggctactacgacgtcgcgaagcagctgctggctgcaggtgcggaggtgaacaccaagggcctagatgacgacacgcctttgcacgacgctgccaacaacgggcactacaaggtggtgaagctgctgctgcggtacggagggaacccgcagcagagcaacaggaaaggcgagacgccgctgaaagtggccaactcccccacgatggtgaacctcctgttaggcaaaggcacttacacttccagcgaggagagctcgacggagagctcagaagaggaagacgcaccatccttcgcaccttccagttcagtcgacggcaacaacacggactccgagttcgaaaaaggctcaagcacaaggccaagaacccagagccacagaaggccacggcccccgtcaaggacgagtatgagtttgatgaggacgacgagcaggacagggttcctccggtggacgacaagcacctattgaaaaaggactacagaaaagaaacgaaatccaatagttttatctctatacccaaaatggaggttaaaagttacactaaaaataacacgattgcaccaaagaaagcgtcccatcgtatcctgtcagacacgtcggacgaggaggacgcgagtgtcaccgtggggacaggagagaagctgagactctcggcacatacgatattgcctggtagtaagacacgagagccttctaatgccaagcagcagaaggaaaaaaataaagtgaaaaa

SEQ ID NO: 107583 - DNA, 11288 bp, Homo sapiens
  Payload ID: 1110
  Gene Symbol: ANKRD12
  Gene Name: ankyrin repeat domain 12
  Uniprot ID: Q6UB98
  ENST ID: ENST00000262126
  CDS Start-End: 241-6429
aatcgcggggcgacgctgtcctgggagcgaggaggctgtggtgagagacggaccgagaccggagatgttttcaagcccggctccggcggctttacaggcggctgcagcggcgacgaagacaacgacagcgacggctacgccgaagcactcgttccgggggtgaagcctcctgcgccggccttgcctcggatccaggatgagaagactgataaaagaagaagctagctgaacagctgtaaaatgcccaaatctgggttcacaaaaccaattcagagtgaaaattctgacagtgacagcaatatggtagagaaaccatatggaagaaagagtaaagacaagattgcatcctacagcaaaactccaaaaattgaacgaagtgatgtgagcaaggagatgaaagagaaatcatccatgaaacgtaaacttccttttactattagcccatcaagaaatgaagaacgagattcagacacagattcagatccaggacatacaagtgaaaattggggggagagacttatatcttcttacaggacatactcagagaaagaaggtccagaaaagaagaagacaaaaaaggaagctggaaataagaaatccacaccagttagcattctttttggttatccactctctgagcgaaaacagatggcacttcttatgcagatgacagcaagagacaacagtccagattccacaccaaatcatccatcacaaacaacgcctgcccaaaagaaaactcccagttcttcatctcgacagaaagataaagttaataaaagaaatgaacgtggtgaaactcctttacacatggctgctattcgaggagatgtgaaacaagttaaagaattaataagtttaggggcaaatgtgaatgtgaaagattttgcaggttggacaccactgcatgaagcttgcaatgttggatattacgatgttgctaagatacttatagcagctggagcagatgttaacacacaaggattagatgatgacactccactccatgattctgctagtagtgggcacagagatatagtaaagctgttacttcgtcacggtggaaatccatttcaagctaataaacatggggagcgtccagtggatgtagcagaaacagaggagttggagttgctactaaaaagagaggtgcctttatctgatgatgatgaaagttacacagattccgaagaggctcaatctgtaaatccttctagtgttgatgaaaatattgactctgaaacagagaaagactctctcatctgtgaaagtaaacagatacttcccagtaaaacacctcttccatctgcccttgatgagtatgagttcaaagatgatgatgatgaagaaattaataagatgattgatgataggcatattcttaggaaagaacaacgaaaagaaaatgaacctgaagcagaaaaaactcatttatttgcaaaacaggagaaagccttctatcctaaatcatttaaaagtaaaaaacaaaagccatctagggtcttatattcaagtactgaaagttctgatgaagaagctcttcagaataaaaagatttctacttcatgttccgtcatccctgaaacatcaaattctgatatgcaaaccaaaaaggaatatgtagtttcaggtgaacacaaacagaaaggcaaagttaaaagaaaattgaaaaatcagaataaaaataaagagaaccaagagctaaagcaagaaaaggaaggaaaagaaaatacaagaataacaaacttgacagtaaatactggactagattgttcagaaaagaccagagaggaggggaactttaggaaatcttttagcccaaaagatgatacttcattacatttatttcatatttccactggtaaatctcccaaacattcttgtggattaagtgaaaaacagtcaacaccactaaaacaagaacatactaaaacatgtttatcaccaggaagttctgaaatgtcattacagcctgatcttgttcggtatgataatacagaatctgaattcttgccagaaagttcaagtgtaaaatcttgtaagcataaggaaaaaagcaaacatcagaaagatttccacttagaatttggtgaaaaatcaaatgccaaaataaaggatgaagatcatagtccaacatttgaaaattcagattgcacactgaaaaaaatggataaagaaggtaaaacattaaaaaaacataaattgaagcataaagagagggaaaaagaaaagcataaaaaagaaattgaaggtgaaaaggaaaaatacaaaactaaggatagtgccaaagaactgcagaggagtgtggaatttgatagagaattttggaaagagaatttttttaaaagtgatgaaactgaagatctctttttaaatatggaacatgaatccttaacattagaaaaaaaatcaaaattggaaaaaaacatcaaagatgataaatcaaccaaggaaaagcatgtgtcaaaagagaggaactttaaagaggaacgagacaagattaaaaaggaaagcgagaaatcttttagggaggaaaaaataaaagatctaaaagaagagagagaaaacatacccacagataaagactcagaatttacttctttgggtatgagtgccattgaggaatctatagggcttcatttagtggaaaaggaaatagacattgaaaaacaagaaaagcatataaaggaaagtaaagaaaaacctgagaagcgatctcaaattaaagaaaaggacattgagaagatggaaagaaaaacctttgaaaaagaaaagaagataaaacatgagcataagtcagaaaaagacaaattagatcttagtgaatgtgttgataaaataaaagaaaaggacaagctatattcgcatcacacagaaaaatgccataaagaaggtgagaagagcaaaaatactgctgctattaaaaaaactgacgacagagagaaaagtagagaaaagatggataggaaacatgacaaagaaaagcctgaaaaagagaggcatctagcagaaagcaaagaaaagcacttgatggagaaaaaaaataaacaatcagataatagtgaatacagtaaatcagaaaaaggcaaaaataaagaaaaagacagggagctagataaaaaggaaaaatctagagataaagaaagtataaatataactaactccaaacacatacaggaagaaaaaaaatcaagtatagtagacggtaataaagcacaacatgaaaaacccttatcccttaaagaaaaaacaaaagatgaacctttgaaaactccagatggaaaagaaaaagataaaaaagataaagatatagatagatacaaagaacgagacaaacataaagataaaattcaaataaatagcttactcaaactaaaatctgaagcagataagcctaaacctaagtcatcaccagcatcaaaagatacccgacctaaagaaaagaggttagtgaatgatgatttaatgcagacaagttttgaacgaatgctaagccttaaagacctagaaatagaacagtggcacaaaaaacataaggaaaaaattaagcaaaaagaaaaggaacggttgagaaaccgaaactgtttagaacttaaaataaaagataaagaaaaaacaaagcatacaccaactgaatccaaaaataaagaacttactaggtcaaagagttcagaagtgactgatgcatataccaaggagaaacaacctaaagatgctgtaagtaacagatcacaatctgttgacaccaaaaatgtaatgactttagggaagtcatcttttgtttcagataatagcttaaacaggtctcctagatcagaaaatgaaaagccgggtctcagctccagatctgtatccatgatttctgttgctagttcagaagattcctgccatactacagtgacaaccccaaggcctccagttgagtatgactctgactttatgttagagagttcagaatcccaaatgtccttttcccagtcaccttttttgtcaattgccaaatctcctgctcttcatgaaagggaattggacagcctggctgacttgccggagcggattaaaccaccatatgcaaacagactttcaacatcccatcttaggtcatcttctgtagaagatgttaaactaattataagcgaggggagacctaccatagaagttcgaagatgtagcatgccttctgtcatttgtgaacataccaaacaattccaaacaatatcagaagagagcaatcaaggtagcttattaactgtgccaggagatactagtccttctcccaaacctgaggtattctcaaatgtgcctgaaagagacctttcaaatgtatctaacatacattccagttttgcaacttctccaactggagcttcaaacagcaagtatgtttcagctgatagaaatctcatcaagaatactgccccagtgaacactgtaatggacagtccagtgcatttagagccatctagtcaggttggtgtgatccagaataaatcatgggagatgcctgttgatagactagagacattaagcaccagagactttatctgcccaaattctaacatacctgatcaagaatcctctcttcagagtttttgtaattctgaaaataaggtattgaaagaaaatgctgattttttatccctgcgccagactgaactgccaggaaactcttgtgctcaggatccggcatcctttatgcctccacagcagccttgctctttccccagccaatcactttcagatgctgaatcgatttctaaacatatgtctttgtcatatgttgctaatcaagagccaggtattttacaacaaaaaaatgcagttcagattattagttctgctttagatactgataatgaatctacaaaagatacagaaaatacttttgtcctaggagatgttcaaaaaacagatgcctttgtcccagtgtactctgacagcactattcaagaagcatcaccaaactttgagaaagcttatactttacctgtgttaccatcagaaaaggactttaatggaagtgatgcctctacccagctaaatacacattatgcatttagcaaactaacttacaagtcttccagtggccatgaagttgagaatagcacaactgatactcaggtcatttcacatgaaaaagaaaacaaactggagagtttggttttaactcatttgagtaggtgtgattctgatttatgtgaaatgaatgcagggatgccaaaaggaaacctaaatgaacaagatccaaaacattgtcctgaaagtgaaaagtgtttgctttccatagaagatgaggaatctcaacaaagcattttatcaagtctggaaaaccattcacagcagtcaactcaaccagaaatgcataaatatggtcagttagttaaagtagaattagaagaaaatgccgaagatgataaaactgaaaaccaaatccctcaaagaatgactagaaacaaagcaaatacaatggcaaatcaaagcaaacagattcttgctagctgtacactattatcagaaaaagacagtgaatcctcatctcctagaggaagaataagattaactgaagatgacgatcctcaaattcaccatccacggaaaaggaaagtgtcacgtgtacctcagcctgtgcaagtgagtccctctttactacaagcaaaagagaaaactcagcaatctctggcagccattgtagattctctaaaactagatgagattcagccatacagttcagagagagcaaatccatattttgaatacttgcacataaggaaaaaaatagaagaaaaacgcaaattactgtgtagtgtgattcctcaagcacctcagtactatgacgaatatgtaacatttaacggatcatatctcctggatggaaaccccttaagcaagatttgtattcccacaattacaccaccaccttcactgtcagatccacttaaagagctttttcgacaacaggaagttgtaaggatgaaactacgtttgcaacacagtattgaaagggaaaaactcattgtatccaacgaacaagaagttttgcgagttcattacagagctgcaagaacattggcaaatcaaacactgccatttagtgcttgtactgttttgctggatgccgaagtatacaatgtaccattggactctcagtctgatgacagtaaaacttctgtgagggatcgctttaatgcaagacaattcatgtcttggttacaagatgtggatgataaatttgacaaattaaagacctgtcttttaatgaggcaacaacatgaagctgcggctttaaatgctgtccagaggttagaatggcagctcaaactccaggaacttgatcctgccacctataaatctatcagcatttacgaaatccaggagttttatgttccccttgttgatgttaacgacgactttgaattgactcctatatagcagtcagtacttcctgatggtattgtcctaaactggtgatgctcaagcattatactgtggaatactgccttttgacaaaaatactcatgcctttacaattgttagtaaagttcgattatagttggttatgtagtaaacactgtcattttataaaaaatgagaattattttggatcttagatccaaacacagtttctaatagaaaactattatttatattgggaaaggtaactattgcattagagcatgttggcagactggtaggtatttaaaaagttgagaatctgctaacagcgctggaagttgttagcgctctaagtaataagataaccactagtattcaaatctctttcaggttttattaaaaaatatatatcaataaactaaaaggttcaattcctaccaaatagtttctaatgtgggagaaaaacttggcacaaaatttcttcagtttattatctgtaaattgtacagttttctttttgaaagttttaatattgtcttcctttttaataacttattttatacatattgtgcagatgtaaatcttgtaattaatggtcaaactgtataaagggattggtagtcaaaacatgtacaaagaaatacctgtaaaactgttttgtctcatgttttattggaccaaagttgtggtttgtatggagtgtagtagtagtgtgtacaggtagaaaacttttaaatacagcatgcaggtgtttcagttagcttgttttcatcaccataactgcaaagatgtggcttagttgtattgcatgcttcctataatttaactctccataattgatgcctgcagtagtgtaaggcatttcatactagtctcctctagtagacctgtgacttactgtgttggacatattatttagacttagtcatacaaagaaacttagctcttttttcatctcacagtaaagcctatttccccaggaaaaaaataaatgcctttgaatgaaaattctgaaattgtaaatgtctattttaatattcacctatgaaagaatctgtgaatatatgtaaatacgtttaataaattttattggtcatgttaaatcattgtaaaacttttttacattgcttaatgttttaagcttaatagcctttgcacttttaaaataaaaaccaagtatgcaaatcaaagatatttggtagtcaaaataagtaaaagaaatataggaatattccagtcaatctctgaaatgtttatgaaaaacaggttaatatgttgtatttttttccttgtatcaagatgcaaaacataatttgcaaaattttataattgaaataaaacttggtatgctgttttataataaattagcaatatactttaaaaaaaatccagtttctcctataacatgatgtaaattaaatattcaggaatatttcaggtctgaaatctgctgctgaacttgttagacatttttgaaaggaaaattaggttagcgtacaatttatcataaatatatgaggtaaaatttgcaaaactttccacagtactttcttgaattataatactgaatgttttctgttccgatagagaaaagtgaagcaaatatgtgaggaatgaagtgatctagtgcaagttggtaattccagctaatgggagagaatgtaaatgtgcaaaggtacatattaagcttagggatttttgaatttttacgtcagtttatattttaattcttactgtacttggcatgcgcaataaagcagcacatgtaaaaaaaaaatacacagtgcaaggactttattataaaggttggatgtagttttccttagaaatttaggtgagagattttggccttttttattggataaattgggccagaaaggcagggtagatttcgaagcactggttctgttgaagttaagtttattaagcctgggaacattaaaagctaatttataaaagcaatactttttaatatgaaaacttactgcaaagtttgtttatacttttgcctaaaaaggaaattggatgggatactgtggcaaatcataaaaaaccagataattgaactttgaagttatagaaaatcagagaggggtaagtttatagggcattttgttctgatggttcaaccagaggtctgggaaatagcactgttggcccaaacagaacaggcttttagaagataaaagcgacaagaaggaatctggtgaattttagtcatcccagctttttagtcttaaccacagttctcactctcttaaatggtacctcaaaaagctggagcctctctgccatgattatgcttctacaaatttcttttataaagagactcaaagctaatgatagcttaaaagaaaagttaatgccttctcattggaaatgtataatcaaataagtagttaagggcttttggtattaaagatattctgaagctctgaaatgctagaaaaaaatttggaatggagtatatgcctgaaaaggttttggattcagaaagaaaaaggatggttagtttaatcagtgattctttttaaactcttcaaatatcatgaacaagatactaaattgtacctaaggatttgtatttctttacaatttgttctaaatatctgtttaatgactagttgatatttgtgcatgttatttaataaagagttatatttttatagaaaaaaagagtgaaatgtgtgctaactgtttttttacttaattttacttgggcagctagcaaaattgcagaaatatgcatcctgggaaaagaaacagcctttgaagaattagcctttcaagttcaaatctatttaataatgagaagtctcacaagtgaatttttaagtacaggcatacctcagacgtactttaggttccagaccatctcagtaaagcaaataccacaacaaagcgagtcaggaggaattttttggtttcccagtgcatataaaagttttgtttatactatattaagtgtgcaatagcattatgtctaaaaatatgtacataagtttaaaaatattttattgctaaaaatggtaacaaagtgagcacatgctgttggaaaaagagcaccaatagacttgcttgaagcagggttgccacaaaccttcaatttgtaaaaaacgccaatatgtacaaagcacaataaagcaaagcacaatagaacaggattgcctgtattagacatgctacaaacttcataactggaaacatctcaaagaccccatgaagctcatttgaatgggacttaacaattagacagttattttagaaattgagtgcagacctaaatacatagttttccaaaaagaaaattattgtctctgatatcttaaaacataaaaacccaaaattttatatagaagaaattgactctgtaaaacgcaatgaaatagtcctctttttaaacagtttaaaggaagcattttcaccgtttgtaaaaattatttttaaatatttagggcaaaatttttgttagataataatggaaaagcttgtgtgagtttagtggttaaaatatcttgtaattcatcattatttaagtgacttcttgggagccgtctttgtacctaaaatggagtttttttttaagcctccacagagatagtcacccaaagtatttccagtcagtaaaagtagaattcatagaaaaaactgaggcaaattaaaacaattccattaatcaaaatggctttaaacaaattaagtattagcataaaaatagcaaaaagtacaactaaaaaaatggttgggttttcccagtggttaaatgctatataataactgcaaataaaagtttttttgtacatggacagcgtcctcataaaagaaaataggccaggccaggcgcagtggctcgcgcctgtaatcccagcactttgggaggccaaggcgggcggatcacgaggtcaggagatcgagaccatcctggctaacacggtgaaaccccgtctctactaaacaaaatgcaaaaaatcagccgggtgtggccgcgggcgcctgtagttccagctactcgggaggctgaggcaggagaatggcgtgagcctgggaggcggagcttgcagtgagccgagatcgtgccactgcactccagcctgggcgacagagcgagactccgtctcaaaaaaaaaaaaaaagaaagaaaagaaaataggccaatatggtgaaaccctttctctactaaaaatacaaaaattagccaagcgtgacggtgcctgcctgtagtcctagctacttgggaggttgagacaggagaatcgcttgaagcctggaggcggaggttgcagtgagctcacgccactgcaccccagcctgggcaacaagagtgaaactctgtctccaaaaaaaaaaaaaaaaaaaaaaagtatatcacatatgtagcatgtgtttacaagtttaaaaggcaccacctatgcactcatcactcaagagaatatcaataactttctcagttttttttcattgttatagtctgtattcaataaaattacccagatcttaactaggcagtttgataaatcctgacaaatgtaaacactcatgttaccatcacccaaattaagatattgtaaaacattttcattactctagaaagttcactcatgcctctctccagtcactacccctgaggcagccactgtgctgatttcccatcaccatacattagttgtacctagccttgaacttcatagaaatagagtcatacatacttccttgtctgccttgtttctcaacatgatgttttgaaattcatccatgttgcacctaacagtaatgagtcgtaatttattaatgagtagtagtgtattgtacaaatttgtttattcgttctcttgttggtatttggattgtttccagtttgggactattgttaataaacctgtgaatctgcaagccta

SEQ ID NO: 107584 - DNA, 2250 bp, Homo sapiens
  Payload ID: 1110
  Gene Symbol: ANKRD12
  Gene Name: ankyrin repeat domain 12
  ENST ID: ENST00000359158
  CDS Start-End: 1-292
ttgcaatgttggatattacgatgttgctaagatacttatagcagctggagcagatgttaacacacaaggattagatgatgacactccactccatgattctgctagtagtgggcacagagatatagtaaagctgttacttcgtcacggtggaaatccatttcaagctaataaacatggggagcgtccagtggatgtagcagaaacagaggagttggagttgctactaaaaagagaggtgcctttatctgatgatgatgaaagttacacagaatatttattttccacatggtgaatgtgcctgaattattgcttggtcaaagtccctcaaggaatgatacaaaaatcatcaattccgaagaggctcaatctgtaaatccttctagtgttgatgaaaatattgactctgaaacagagaaagactctctcatctgtgaaagtaaacagatacttcccagtaaaacacctcttccatctgcccttgatgagtatgagttcaaagatgatgatgatgaagaaattaataagatgattgatgataggcatattcttaggaaagaacaacgaaaagaaaatgaacctgaagcagaaaaaactcatttatttgcaaaacaggagaaagccttctatcctaaatcatttaaaagtaaaaaacaaaagccatctagggtcttatattcaagtactgaaagttctgatgaagaagctcttcagaataaaaagatttctacttcatgttccgtcatccctgaaacatcaaattctgatatgcaaaccaaaaaggaatatgtagtttcaggtgaacacaaacagaaaggcaaagttaaaagaaaattgaaaaatcagaataaaaataaagagaaccaagagctaaagcaagaaaaggaaggaaaagaaaatacaagaataacaaacttgacagtaaatactggactagattgttcagaaaagaccagagaggaggggaactttaggaaatcttttagcccaaaagatgatacttcattacatttatttcatatttccactggtaaatctcccaaacattcttgtggattaagtgaaaaacagtcaacaccactaaaacaagaacatactaaaacatgtttatcaccaggaagttctgaaatgtcattacagcctgatcttgttcggtatgataatacagaatctgaattcttgccagaaagttcaagtgtaaaatcttgtaagcataaggaaaaaagcaaacatcagaaagatttccacttagaatttggtgaaaaatcaaatgccaaaataaaggatgaagatcatagtccaacatttgaaaattcagattgcacactgaaaaaaatggataaagaaggtaaaacattaaaaaaacataaattgaagcataaagagagggaaaaagaaaagcataaaaaagaaattgaaggtgaaaaggaaaaatacaaaactaaggatagtgccaaagaactgcagaggagtgtggaatttgatagagaattttggaaagagaatttttttaaaagtgatgaaactgaagatctctttttaaatatggaacatgaatccttaacattagaaaaaaaatcaaaattggaaaaaaacatcaaagatgataaatcaaccaaggaaaagcatgtgtcaaaagagaggaactttaaagaggaacgagacaagattaaaaaggaaagcgagaaatcttttagggaggaaaaaataaaagatctaaaagaagagagagaaaacatacccacagataaagactcagaatttacttctttgggtatgagtgccattgaggaatctatagggcttcatttagtggaaaaggaaatagacattgaaaaacaagaaaagcatataaaggaaagtaaagaaaaacctgagaagcgatctcaaattaaagaaaaggacattgagaagatggaaagaaaaacctttgaaaaagaaaagaagataaaacatgagcataagtcagaaaaagacaaattagatcttagtgaatgtgttgataaaataaaagaaaaggacaagctatattcgcatcacacagaaaaatgccataaagaaggtgagaagagcaaaaatactgctgctattaaaaaaactgacgacagagagaaaagtagagaaaagatggataggaaacatgacaaagaaaagcctgaaaaagagaggcatctagcagaaagcaaagaaaagcacttgatggagaaaaaaaataaacaatcagataatagtgaatacagtaaatcagaaaaa

SEQ ID NO: 107585 - DNA, 2241 bp, Homo sapiens
  Payload ID: 1110
  Gene Symbol: ANKRD12
  Gene Name: ankyrin repeat domain 12
  ENST ID: ENST00000383440
  CDS Start-End: 286-1602
ttgcaatgttggatattacgatgttgctaagatacttatagcagctggagcagatgttaacacacaaggattagatgatgacactccactccatgattctgctagtagtgggcacagagatatagtaaagctgttacttcgtcacggtggaaatccatttcaagctaataaacatggggagcgtccagtggatgtagcagaaacagaggagttggagttgctactaaaaagagaggtgcctttatctgatgatgatgaaagttacacagaatatttattttccacatggtgaatgtgcctgaattattgcttggtcaaagtccctcaaggaatgatacaaaaatcatcaattccgaagaggctcaatctgtaaatccttctagtgttgatgaaaatattgactctgaaacagagaaagactctctcatctgtgaaagtaaacagatacttcccagtaaaacacctcttccatctgcccttgatgagtatgagttcaaagatgatgatgatgaagaaattaataagatgattgatgataggcatattcttaggaaagaacaacgaaaagaaaatgaacctgaagcagaaaaaactcatttatttgcaaaacaggagaaagccttctatcctaaatcatttaaaagtaaaaaacaaaagccatctagggtcttatattcaagtactgaaagttctgatgaagaagctcttcagaataaaaagatttctacttcatgttccgtcatccctgaaacatcaaattctgatatgcaaaccaaaaaggaatatgtagtttcaggtgaacacaaacagaaaggcaaagttaaaagaaaattgaaaaatcagaataaaaataaagagaaccaagagctaaagcaagaaaaggaaggaaaagaaaatacaagaataacaaacttgacagtaaatactggactagattgttcagaaaagaccagagaggaggggaactttaggaaatcttttagcccaaaagatgatacttcattacatttatttcatatttccactggtaaatctcccaaacattcttgtggattaagtgaaaaacagtcaacaccactaaaacaagaacatactaaaacatgtttatcaccaggaagttctgaaatgtcattacagcctgatcttgttcggtatgataatacagaatctgaattcttgccagaaagttcaagtgtaaaatcttgtaagcataaggaaaaaagcaaacatcagaaagatttccacttagaatttggtgaaaaatcaaatgccaaaataaaggatgaagatcatagtccaacatttgaaaattcagattgcacactgaaaaaaatggataaagaaggtaaaacattaaaaaaacataaattgaagcataaagagagggaaaaagaaaagcataaaaaagaaattgaaggtgaaaaggaaaaatacaaaactaaggatagtgccaaagaactgcagaggagtgtggaatttgatagagaattttggaaagagaatttttttaaaagtgatgaaactgaagatctctttttaaatatggaacatgaatccttaacattagaaaaaatcaaaattggaaaaaaacatcaaagatgataaatcaaccaaggaaaagcatgtgtcaaaagagaggaactttaaagaggaacgagacaagattaaaaaggaaagcgagaaatcttttagggaggaaaaaataaaagatctaaaagaagagagagaaaacatacccacagataaagactcagaatttacttctttgggtatgagtgccattgaggaatctatagggcttcatttagtggaaaaggaaatagacattgaaaaacaagaaaagcatataaaggaaagtaaagaaaaacctgagaagcgatctcaaattaaagaaaaggacattgagaagatggaaagaaaaacctttgaaaaagaaaagaagataaaacatgagcataagtcagaaaaagacaaattagatcttagtgaatgtgttgataaaataaaagaaaaggacaagctatattcgcatcacacagaaaaatgccataaagaaggtgagaagagcaaaaatactgctgctattaaaaaaactgacgacagagagaaaagtagagaaaagatggataggaaacatgacaaagaaaagcctgaaaaagagaggcatctagcagaaagcaaagaaaagcacttgatggagaaaaaaaataaacaatcagataatagtgaatacagtaaatc

SEQ ID NO: 107586 - DNA, 9115 bp, Homo sapiens
  Payload ID: 1110
  Gene Symbol: ANKRD12
  Gene Name: ankyrin repeat domain 12
  Uniprot ID: Q6UB98
  ENST ID: ENST00000400020
  CDS Start-End: 363-6482
cggccgctcgggccgggagcgtcggaggtacccgggtcctgggagaggtggatgaaatcaagaaggggaaattgctgctttagtagtgtccggggaaagagcagccactctacagttctgtcttaaatgccagtgtaaaataaccttgccgcattggacaggcagttcccgtcatcgtttttcaagtacccacttgtgatgcttcaagacccctggagcacgtcaggttcttagatctcgttttgaggagtgatgtggagtgacgcatccttacagatcccaaagcgttgaataaacggttgtacaaagagatccaggatgagaagactgataaaagaagaagctagctgaacagctgtaaaatgcccaaatctgggttcacaaaaccaattcagagtgaaaattctgacagtgacagcaatatggtagagaaaccatatggaagaaagagtaaagacaagattgcatcctacagcaaaactccaaaaattgaacgaagtgatgtgagcaaggagatgaaagagaaatcatccatgaaacgtaaacttccttttactattagcccatcaagaaatgaagaacgagattcagacacagagaaagaaggtccagaaaagaagaagacaaaaaaggaagctggaaataagaaatccacaccagttagcattctttttggttatccactctctgagcgaaaacagatggcacttcttatgcagatgacagcaagagacaacagtccagattccacaccaaatcatccatcacaaacaacgcctgcccaaaagaaaactcccagttcttcatctcgacagaaagataaagttaataaaagaaatgaacgtggtgaaactcctttacacatggctgctattcgaggagatgtgaaacaagttaaagaattaataagtttaggggcaaatgtgaatgtgaaagattttgcaggttggacaccactgcatgaagcttgcaatgttggatattacgatgttgctaagatacttatagcagctggagcagatgttaacacacaaggattagatgatgacactccactccatgattctgctagtagtgggcacagagatatagtaaagctgttacttcgtcacggtggaaatccatttcaagctaataaacatggggagcgtccagtggatgtagcagaaacagaggagttggagttgctactaaaaagagaggtgcctttatctgatgatgatgaaagttacacagattccgaagaggctcaatctgtaaatccttctagtgttgatgaaaatattgactctgaaacagagaaagactctctcatctgtgaaagtaaacagatacttcccagtaaaacacctcttccatctgcccttgatgagtatgagttcaaagatgatgatgatgaagaaattaataagatgattgatgataggcatattcttaggaaagaacaacgaaaagaaaatgaacctgaagcagaaaaaactcatttatttgcaaaacaggagaaagccttctatcctaaatcatttaaaagtaaaaaacaaaagccatctagggtcttatattcaagtactgaaagttctgatgaagaagctcttcagaataaaaagatttctacttcatgttccgtcatccctgaaacatcaaattctgatatgcaaaccaaaaaggaatatgtagtttcaggtgaacacaaacagaaaggcaaagttaaaagaaaattgaaaaatcagaataaaaataaagagaaccaagagctaaagcaagaaaaggaaggaaaagaaaatacaagaataacaaacttgacagtaaatactggactagattgttcagaaaagaccagagaggaggggaactttaggaaatcttttagcccaaaagatgatacttcattacatttatttcatatttccactggtaaatctcccaaacattcttgtggattaagtgaaaaacagtcaacaccactaaaacaagaacatactaaaacatgtttatcaccaggaagttctgaaatgtcattacagcctgatcttgttcggtatgataatacagaatctgaattcttgccagaaagttcaagtgtaaaatcttgtaagcataaggaaaaaagcaaacatcagaaagatttccacttagaatttggtgaaaaatcaaatgccaaaataaaggatgaagatcatagtccaacatttgaaaattcagattgcacactgaaaaaaatggataaagaaggtaaaacattaaaaaaacataaattgaagcataaagagagggaaaaagaaaagcataaaaaagaaattgaaggtgaaaaggaaaaatacaaaactaaggatagtgccaaagaactgcagaggagtgtggaatttgatagagaattttggaaagagaatttttttaaaagtgatgaaactgaagatctctttttaaatatggaacatgaatccttaacattagaaaaaaaatcaaaattggaaaaaaacatcaaagatgataaatcaaccaaggaaaagcatgtgtcaaaagagaggaactttaaagaggaacgagacaagattaaaaaggaaagcgagaaatcttttagggaggaaaaaataaaagatctaaaagaagagagagaaaacatacccacagataaagactcagaatttacttctttgggtatgagtgccattgaggaatctatagggcttcatttagtggaaaaggaaatagacattgaaaaacaagaaaagcatataaaggaaagtaaagaaaaacctgagaagcgatctcaaattaaagaaaaggacattgagaagatggaaagaaaaacctttgaaaaagaaaagaagataaaacatgagcataagtcagaaaaagacaaattagatcttagtgaatgtgttgataaaataaaagaaaaggacaagctatattcgcatcacacagaaaaatgccataaagaaggtgagaagagcaaaaatactgctgctattaaaaaaactgacgacagagagaaaagtagagaaaagatggataggaaacatgacaaagaaaagcctgaaaaagagaggcatctagcagaaagcaaagaaaagcacttgatggagaaaaaaaataaacaatcagataatagtgaatacagtaaatcagaaaaaggcaaaaataaagaaaaagacagggagctagataaaaaggaaaaatctagagataaagaaagtataaatataactaactccaaacacatacaggaagaaaaaaaatcaagtatagtagacggtaataaagcacaacatgaaaaacccttatcccttaaagaaaaaacaaaagatgaacctttgaaaactccagatggaaaagaaaaagataaaaaagataaagatatagatagatacaaagaacgagacaaacataaagataaaattcaaataaatagcttactcaaactaaaatctgaagcagataagcctaaacctaagtcatcaccagcatcaaaagatacccgacctaaagaaaagaggttagtgaatgatgatttaatgcagacaagttttgaacgaatgctaagccttaaagacctagaaatagaacagtggcacaaaaaacataaggaaaaaattaagcaaaaagaaaaggaacggttgagaaaccgaaactgtttagaacttaaaataaaagataaagaaaaaacaaagcatacaccaactgaatccaaaaataaagaacttactaggtcaaagagttcagaagtgactgatgcatataccaaggagaaacaacctaaagatgctgtaagtaacagatcacaatctgttgacaccaaaaatgtaatgactttagggaagtcatcttttgtttcagataatagcttaaacaggtctcctagatcagaaaatgaaaagccgggtctcagctccagatctgtatccatgatttctgttgctagttcagaagattcctgccatactacagtgacaaccccaaggcctccagttgagtatgactctgactttatgttagagagttcagaatcccaaatgtccttttcccagtcaccttttttgtcaattgccaaatctcctgctcttcatgaaagggaattggacagcctggctgacttgccggagcggattaaaccaccatatgcaaacagactttcaacatcccatcttaggtcatcttctgtagaagatgttaaactaattataagcgaggggagacctaccatagaagttcgaagatgtagcatgccttctgtcatttgtgaacataccaaacaattccaaacaatatcagaagagagcaatcaaggtagcttattaactgtgccaggagatactagtccttctcccaaacctgaggtattctcaaatgtgcctgaaagagacctttcaaatgtatctaacatacattccagttttgcaacttctccaactggagcttcaaacagcaagtatgtttcagctgatagaaatctcatcaagaatactgccccagtgaacactgtaatggacagtccagtgcatttagagccatctagtcaggttggtgtgatccagaataaatcatgggagatgcctgttgatagactagagacattaagcaccagagactttatctgcccaaattctaacatacctgatcaagaatcctctcttcagagtttttgtaattctgaaaataaggtattgaaagaaaatgctgattttttatccctgcgccagactgaactgccaggaaactcttgtgctcaggatccggcatcctttatgcctccacagcagccttgctctttccccagccaatcactttcagatgctgaatcgatttctaaacatatgtctttgtcatatgttgctaatcaagagccaggtattttacaacaaaaaaatgcagttcagattattagttctgctttagatactgataatgaatctacaaaagatacagaaaatacttttgtcctaggagatgttcaaaaaacagatgcctttgtcccagtgtactctgacagcactattcaagaagcatcaccaaactttgagaaagcttatactttacctgtgttaccatcagaaaaggactttaatggaagtgatgcctctacccagctaaatacacattatgcatttagcaaactaacttacaagtcttccagtggccatgaagttgagaatagcacaactgatactcaggtcatttcacatgaaaaagaaaacaaactggagagtttggttttaactcatttgagtaggtgtgattctgatttatgtgaaatgaatgcagggatgccaaaaggaaacctaaatgaacaagatccaaaacattgtcctgaaagtgaaaagtgtttgctttccatagaagatgaggaatctcaacaaagcattttatcaagtctggaaaaccattcacagcagtcaactcaaccagaaatgcataaatatggtcagttagttaaagtagaattagaagaaaatgccgaagatgataaaactgaaaaccaaatccctcaaagaatgactagaaacaaagcaaatacaatggcaaatcaaagcaaacagattcttgctagctgtacactattatcagaaaaagacagtgaatcctcatctcctagaggaagaataagattaactgaagatgacgatcctcaaattcaccatccacggaaaaggaaagtgtcacgtgtacctcagcctgtgcaagtgagtccctctttactacaagcaaaagagaaaactcagcaatctctggcagccattgtagattctctaaaactagatgagattcagccatacagttcagagagagcaaatccatattttgaatacttgcacataaggaaaaaaatagaagaaaaacgcaaattactgtgtagtgtgattcctcaagcacctcagtactatgacgaatatgtaacatttaacggatcatatctcctggatggaaaccccttaagcaagatttgtattcccacaattacaccaccaccttcactgtcagatccacttaaagagctttttcgacaacaggaagttgtaaggatgaaactacgtttgcaacacagtattgaaagggaaaaactcattgtatccaacgaacaagaagttttgcgagttcattacagagctgcaagaacattggcaaatcaaacactgccatttagtgcttgtactgttttgctggatgccgaagtatacaatgtaccattggactctcagtctgatgacagtaaaacttctgtgagggatcgctttaatgcaagacaattcatgtcttggttacaagatgtggatgataaatttgacaaattaaagacctgtcttttaatgaggcaacaacatgaagctgcggctttaaatgctgtccagaggttagaatggcagctcaaactccaggaacttgatcctgccacctataaatctatcagcatttacgaaatccaggagttttatgttccccttgttgatgttaacgacgactttgaattgactcctatatagcagtcagtacttcctgatggtattgtcctaaactggtgatgctcaagcattatactgtggaatactgccttttgacaaaaatactcatgcctttacaattgttagtaaagttcgattatagttggttatgtagtaaacactgtcattttataaaaaatgagaattattttggatcttagatccaaacacagtttctaatagaaaactattatttatattgggaaaggtaactattgcattagagcatgttggcagactggtaggtatttaaaaagttgagaatctgctaacagcgctggaagttgttagcgctctaagtaataagataaccactagtattcaaatctctttcaggttttattaaaaaatatatatcaataaactaaaaggttcaattcctaccaaatagtttctaatgtgggagaaaaacttggcacaaaatttcttcagtttattatctgtaaattgtacagttttctttttgaaagttttaatattgtcttcctttttaataacttattttatacatattgtgcagatgtaaatcttgtaattaatggtcaaactgtataaagggattggtagtcaaaacatgtacaaagaaatacctgtaaaactgttttgtctcatgttttattggaccaaagttgtggtttgtatggagtgtagtagtagtgtgtacaggtagaaaacttttaaatacagcatgcaggtgtttcagttagcttgttttcatcaccataactgcaaagatgtggcttagttgtattgcatgcttcctataatttaactctccataattgatgcctgcagtagtgtaaggcatttcatactagtctcctctagtagacctgtgacttactgtgttggacatattatttagacttagtcatacaaagaaacttagctcttttttcatctcacagtaaagcctatttccccaggaaaaaaataaatgcctttgaatgaaaattctgaaattgtaaatgtctattttaatattcacctatgaaagaatctgtgaatatatgtaaatacgtttaataaattttattggtcatgttaaatcattgtaaaacttttttacattgcttaatgttttaagcttaatagcctttgcacttttaaaataaaaaccaagtatgcaaatcaaagatatttggtagtcaaaataagtaaaagaaatataggaatattccagtcaatctctgaaatgtttatgaaaaacaggttaatatgttgtatttttttccttgtatcaagatgcaaaacataatttgcaaaattttataattgaaataaaacttggtatgctgttttataataaattagcaatatactttaaaaaaaatccagtttctcctataacatgatgtaaattaaatattcaggaatatttcaggtctgaaatctgctgctgaacttgttagacatttttgaaaggaaaattaggttagcgtacaatttatcataaatatatgaggtaaaatttgcaaaactttccacagtactttcttgaattataatactgaatgttttctgttccgatagagaaaagtgaagcaaatatgtgaggaatgaagtgatctagtgcaagttggtaattccagctaatgggagagaatgtaaatgtgcaaaggtacatattaagcttagggatttttgaatttttacgtcagtttatattttaattcttactgtacttggcatgcgcaataaagcagcacatgtaaaaaaaaaatacacagtgcaaggactttattataaaggttggatgtagttttccttagaaatttaggtgagagattttggccttttttattggataaattgggccagaaaggcagggtagatttcgaagcactggttctgttgaagttaagtttattaagcctgggaacattaaaagctaatttataaaagcaatactttttaatatgaaaacttactgcaaagtttgtttatacttttgcctaaaaaggaaattggatgggatactgtggcaaatcataaaaaaccagataattgaactttgaagttatagaaaatcagagaggggtaagtttatagggcattttgttctgatggttcaaccagaggtctgggaaatagcactgttggcccaaacagaacaggcttttagaagataaaagcgacaagaaggaatctggtgaattttagtcatcccagctttttagtcttaaccacagttctcactctcttaaatggtacctcaaaaagctggagcctctctgccatgattatgcttctacaaatttcttttataaagagactcaaagctaatgatagcttaaaagaaaagttaatgccttctcattggaaatgtataatcaaataagtagttaagggcttttggtattaaagatattctgaagctctgaaatgctagaaaaaaatttggaatggagtatatgcctgaaaaggttttggattcagaaagaaaaaggatggttagtttaatcagtgattctttttaaactcttcaaatatcatgaacaagatactaaattgtacctaaggatttgtatttctttacaatttgttctaaatatctgtttaatgactagttgatatttgtgcatgttatttaataaagagttatatttttatag

SEQ ID NO: 107587 - DNA, 978 bp, Homo sapiens
  Payload ID: 1110
  Gene Symbol: ANKRD12
  Gene Name: ankyrin repeat domain 12
  ENST ID: ENST00000546007
  CDS Start-End: 48-978
aggatgagaagactgataaaagaagaagctagctgaacagctgtaaaatgcccaaatctgggttcacaaaaccaattcagagtgaaaattctgacagtgacagcaatatggtagagaaaccatatggaagaaagagtaaagacaagattgcatcctacagcaaaactccaaaaattgaacgaagtgatgtgagcaaggagatgaaagagaaatcatccatgaaacgtaaacttccttttactattagcccatcaagaaatgaagaacgagattcagacacagagaaagaaggtccagaaaagaagaagacaaaaaaggaagctggaaataagaaatccacaccagttagcattctttttggttatccactctctgagcgaaaacagatggcacttcttatgcagatgacagcaagagacaacaattccacaccaaatcatccatcacaaacaacgcctgcccaaaagaaaactcccagttcttcatctcgacagaaagataaagttaataaaagaaatgaacgtggtgaaactcctttacacatggctgctattcgaggagatgtgaaacaagttaaagaattaataagtttaggggcaaatgtgaatgtgaaagattttgcaggttggacaccactgcatgaagcttgcaatgttggatattacgatgttgctaagatacttatagcagctggagcagatgttaacacacaaggattagatgatgacactccactccatgattctgctagtagtgggcacagagatatagtaaagctgttacttcgtcacggtggaaatccatttcaagctaataaacatggggagcgtccagtggatgtagcagaaacagaggagttggagttgctactaaaaagagaggtgcctttatctgatgatgatgaaagttacacagattccgaagaggctcaatctgtaaatccttctagtgttgatgaaaatattgactctgaaacag

SEQ ID NO: 107588 - DNA, 390 bp, Homo sapiens
  Payload ID: 1110
  Gene Symbol: ANKRD12
  Gene Name: ankyrin repeat domain 12
  ENST ID: ENST00000577992
  CDS Start-End: 353-390
cctgggagcgaggaggctgtggtgagagacggaccgagaccggagatgttttcaagcccggctccggcggctttacaggcggctgcagcggcgacgaagacaacgacagcgacggctacgccgaagcactcgttccgggggtgaagcctcctgcgccggccttgcctcgggtccgtacgggtgaggggggcgtggcgacaggaaaggaggaaggaggggcgcggtttcgagcttgtccccggcgccagggaggagatcccctcagttctgcgctgctcccgttccccctccccagagcaagatccaggatgagaagactgataaaagaagaagctagctgaacagctgtaaaatgcccaaatctgggttcacaaaaccaattcagagtga

SEQ ID NO: 107589 - DNA, 631 bp, Homo sapiens
  Payload ID: 1110
  Gene Symbol: ANKRD12
  Gene Name: ankyrin repeat domain 12
  ENST ID: ENST00000581635
  CDS Start-End: 179-427
agatgttttcaagcccggctccggcggctttacaggcggctgcagcggcgacgaagacaacgacagcgacggctacgccgaagcactcgttccgggggtgaagcctcctgcgccggccttgcctcggatccaggatgagaagactgataaaagaagaagctagctgaacagctgtaaaatgcccaaatctgggttcacaaaaccaattcagagtgaaaattctgacagtgacagcaatatggtagagaaaccatatggaagaaagagtaaagacaagattgcatcctacagcaaaactccaaaaattgaacgaagtgatgtgagcaaggagatgaaagagaaatcatccatgaaacgtaaacttccttttactattagcccatcaagaaatgaagaacgagattcagacacagaattgacaggataaattttatagttgtaacagaggtaaatcatggcagtgtttactgttgaagattttggaatctgactagtgttgaccctaagccccctacgagcactggcccagtaattagacttctttagaaagaaggtccagaaaagaagaagacaaaaaaggaagctggaaataagaaatccacaccagttagcattctttttggttatccac

SEQ ID NO: 107590 - DNA, 313 bp, Homo sapiens
  Payload ID: 1110
  Gene Symbol: ANKRD12
  Gene Name: ankyrin repeat domain 12
  ENST ID: ENST00000585234
  CDS Start-End: 180-313
tggtgcggggccagacggccgccgccggcttagcgggggaacttcgcctagtcctcgggctgcggtcgcagcgtcattttgcctgagttggatcacgctcgtccacccaccccgtgtaaaaataacagatccaggatgagaagactgataaaagaagaagctagctgaacagctgtaaaatgcccaaatctgggttcacaaaaccaattcagagtgaaaattctgacagtgacagcaatatggtagagaaaccatatggaagaaagagtaaagacaagattgcatcctacagcaaaactccaaaaattgaacg

SEQ ID NO: 107591 - DNA, 2219 bp, Homo sapiens
  Payload ID: 1111
  Gene Symbol: ANKRD13D
  Gene Name: ankyrin repeat domain 13 family, member D
  Uniprot ID: Q6ZTN6
  ENST ID: ENST00000308440
  CDS Start-End: 512-2068
actgctgcgggggccgcggggggcgcagctggggcgcggctcggaggggaggctagggggccgtgccaggcccgaagccgaggcggggccgggatgcggcgctgaggcccagcatggccggcccgggccccaccttcccgctgcaccggctcgtctgggcgaaccggcatcgcgaactggaggccgcactgcacagccaccaggttccgccaaactcctgacaacctgcagctctgcctgaccaggccccgccgccagaccccggctctgcccctgccttccctcctgccccctcctctcccctgccaggacacgcaggccaccctctgccatctccctgcacgacattgaacaggaggacccccgcgggcggaccccactggagctggccgtgtctctgggaaacctggagtctgtgagagtgctccttcgacacaatgccaacgtgggcaaagagaaccgccagggctgggcagtcctgcaggaggcagtcagcactggagaccccgagatggtgcagctggtgctccagtatcgggactaccagagggccacgcagaggctggcgggcattccggaactgctcaacaaacttcgccaggcccccgatttctacgttgagatgaagtgggagttcaccagctgggtgccccttgtgtctaagatgtgcccaagcgatgtgtaccgcgtgtggaagcggggtgagagcctgcgagtagacaccagtctcctgggcttcgagcacatgacctggcagcggggccggaggagcttcatcttcaagggccaggaggcaggagccctggtgatggaagtggaccatgaccggcaggtggtgcatgtggagacactggggctcactctgcaggagcccgaaacactgctggccgccatgcggcccagcgaggagcatgtggccagtcgcctcacctctcctatcgtctccacccacctggacactcgtaatgtggcctttgagaggaacaaatgtggtatctggggctggcggtctgagaagatggaaactgttagcggctacgaggccaaggtgtacagtgccaccaacgtggagctggtgacacgcacacgcacggagcacctctctgatcaggacaagtcgaggagcaaagcggggaagactccattccagtccttcctggggatggcgcagcagcattcctcccacaccggggcccccgtgcagcaggcagccagccccaccaaccccacagccatctcccctgaggagtacttcgaccccaacttcagcctggagtcacggaacattggccgccccatcgagatgtccagcaaagtacagaggttcaaggcaacactgtggctgagtgaagagcacccgctctccctgggtgaccaggtgacccccatcatcgacctaatggccatcagcaacgctcactttgccaagctgcgcgacttcatcactctgcgccttccacctggcttccccgtcaaaattgagattccccttttccacgtgctcaatgcccgcatcaccttcagcaacctgtgtggctgtgatgagcccctgagctccgtgtgggtgccggcccccagctctgctgttgccgcatcagggaaccctttcccgtgcgaggtggaccccaccgtgtttgaagtgcccaacgggtacagcgtgctgggcatggagcgcaacgagcccctccgggacgaggacgatgacctcctgcagttcgccatccagcagagcctgcttgaagcgggcactgaggcggagcaggtgaccgtctgggaagccctgaccaacacccggcccggtgcccgccctcctccccaggccacggtttatgaggaacagcttcagctggagcgggccctccaggaaagcctgcagctgtccacagagcccaggggcccaggatcccctcccaggacacccccagcccccggtccacccagctttgaagagcagctgcgcctggccctggagttgtcttcacgggagcaggaggagcgggagcggcgcgggcagcaggaggaggaggacttacagcggatcctgcagctgtcactcactgagcactgagccatagccccgggagggctggccaggccactccctgcccgcttttgtaatttatttatttataaactctctgctgctgagcttggggcctggagccccaggaatgagcaggcaggggagactgagatggaaataaagagactgtcgcagc

SEQ ID NO: 107592 - DNA, 2881 bp, Homo sapiens
  Payload ID: 1111
  Gene Symbol: ANKRD13D
  Gene Name: ankyrin repeat domain 13 family, member D
  Uniprot ID: Q6ZTN6
  ENST ID: ENST00000447274
  CDS Start-End: 1176-2732
gacgctggcagccaaccgcagcctctgcaaaagggactcgtgcggcgggcgaaggcagccgttcgccgcgggcggtcctccgccgggacggctctgccgctgcctgggcctgcgcccctctctccccgaactcctatccctgacttcagggccccgggggccgcctccccgcatcgctgggcctgcagacaccggccaggtcccaggggaaggtgcttcccgctcagccggcaagcacttagtggcgtctgctcgttgctcgtctccaggccgggtgaggggagccggggcgccccacttcacccgcacaccccagcagagtcggtgaccgcgggacctggggtaggaagaccggggcgagcaaggggatccgcgggggaaacgcaggcatcacggctgcagcaggaccgcggcccgccgcgcacgcgcgtgcactaccgaggggcccagtgcccgccccctccggccccgccttcctcttccggacccggctccgggggtctgcgcagggctcggggcgcctcctgcgggccgcgggcggagctgtaaccgggcaccgccctccaggccgccccagcggacccgggcccgaccgaggtcggggcgcagacccaaggccgggcatctcctcgggcgctcgcggttgctctgccgcgcgctggcctggccgcggttgccatggttgcggggggacgggggcgcgcgcgaagccccgccccggcccggcgcagccccgcccgctccgccgcccgccccgccctccctgccgcccgcgctgccgccgccgccgccgccgccgctactgctgcgggggccgcggggggcgcagctggggcgcggctcggaggggaggctagggggccgtgccaggcccgaagccgaggcggggccgggatgcggcgctgaggcccagcatggccggcccgggccccaccttcccgctgcaccggctcgtctgggcgaaccggcatcgcgaactggaggccgcactgcacagccaccagcacgacattgaacaggaggacccccgcgggcggaccccactggagctggccgtgtctctgggaaacctggagtctgtgagagtgctccttcgacacaatgccaacgtgggcaaagagaaccgccagggctgggcagtcctgcaggaggcagtcagcactggagaccccgagatggtgcagctggtgctccagtatcgggactaccagagggccacgcagaggctggcgggcattccggaactgctcaacaaacttcgccaggcccccgatttctacgttgagatgaagtgggagttcaccagctgggtgccccttgtgtctaagatgtgcccaagcgatgtgtaccgcgtgtggaagcggggtgagagcctgcgagtagacaccagtctcctgggcttcgagcacatgacctggcagcggggccggaggagcttcatcttcaagggccaggaggcaggagccctggtgatggaagtggaccatgaccggcaggtggtgcatgtggagacactggggctcactctgcaggagcccgaaacactgctggccgccatgcggcccagcgaggagcatgtggccagtcgcctcacctctcctatcgtctccacccacctggacactcgtaatgtggcctttgagaggaacaaatgtggtatctggggctggcggtctgagaagatggaaactgttagcggctacgaggccaaggtgtacagtgccaccaacgtggagctggtgacacgcacacgcacggagcacctctctgatcaggacaagtcgaggagcaaagcggggaagactccattccagtccttcctggggatggcgcagcagcattcctcccacaccggggcccccgtgcagcaggcagccagccccaccaaccccacagccatctcccctgaggagtacttcgaccccaacttcagcctggagtcacggaacattggccgccccatcgagatgtccagcaaagtacagaggttcaaggcaacactgtggctgagtgaagagcacccgctctccctgggtgaccaggtgacccccatcatcgacctaatggccatcagcaacgctcactttgccaagctgcgcgacttcatcactctgcgccttccacctggcttccccgtcaaaattgagattccccttttccacgtgctcaatgcccgcatcaccttcagcaacctgtgtggctgtgatgagcccctgagctccgtgtgggtgccggcccccagctctgctgttgccgcatcagggaaccctttcccgtgcgaggtggaccccaccgtgtttgaagtgcccaacgggtacagcgtgctgggcatggagcgcaacgagcccctccgggacgaggacgatgacctcctgcagttcgccatccagcagagcctgcttgaagcgggcactgaggcggagcaggtgaccgtctgggaagccctgaccaacacccggcccggtgcccgccctcctccccaggccacggtttatgaggaacagcttcagctggagcgggccctccaggaaagcctgcagctgtccacagagcccaggggcccaggatcccctcccaggacacccccagcccccggtccacccagctttgaagagcagctgcgcctggccctggagttgtcttcacgggagcaggaggagcgggagcggcgcgggcagcaggaggaggaggacttacagcggatcctgcagctgtcactcactgagcactgagccatagccccgggagggctggccaggccactccctgcccgcttttgtaatttatttatttataaactctctgctgctgagcttggggcctggagccccaggaatgagcaggcaggggagactgagatggaaataaagagactgtcgca

SEQ ID NO: 107593 - DNA, 2139 bp, Homo sapiens
  Payload ID: 1111
  Gene Symbol: ANKRD13D
  Gene Name: ankyrin repeat domain 13 family, member D
  Uniprot ID: Q6ZTN6
  ENST ID: ENST00000511455
  CDS Start-End: 171-1988
gccgcccgccccgccctccctgccgcccgcgctgccgccgccgccgccgccgccgctactgctgcgggggccgcggggggcgcagctggggcgcggctcggaggggaggctagggggccgtgccaggcccgaagccgaggcggggccgggatgcggcgctgaggcccagcatggccggcccgggccccaccttcccgctgcaccggctcgtctgggcgaaccggcatcgcgaactggaggccgcactgcacagccaccagcacgacattgaacaggaggacccccgcgggcggaccccactggagctggccgtgtctctgggaaacctggagtctgtgagagtgctccttcgacacaatgccaacgtgggcaaagagaaccgccagggctgggcagtcctgcaggaggcagtcagcactggagaccccgagatggtgcagctggtgctccagtatcgggactaccagagggccacgcagaggctggcgggcattccggaactgctcaacaaacttcgccaggcccccgatttctacgttgagatgaagtgggagttcaccagctgggtgccccttgtgtctaagatgtgcccaagcgatgtgtaccgcgtgtggaagcggggtgagagcctgcgagtagacaccagtctcctgggcttcgagcacatgacctggcagcggggccggaggagcttcatcttcaagggccaggaggcaggagccctggtgatggaagtggaccatgaccggcaggtggtgcatgtggagacactggggctcactctgcaggagcccgaaacactgctggccgccatgcggcccagcgaggagcatgtggccagtcgcctcacctctcctatcgtctccacccacctggacactcgtaatgtggcctttgagaggaacaaatgtggtatctggggctggcggtctgagaagatggaaactgttagcggctacgaggccaaggtgtacagtgccaccaacgtggagctggtgacacgcacacgcacggagcacctctctgatcaggacaagtcgaggagcaaagcggggaagactccattccagtccttcctggggatggcgcagcagcattcctcccacaccggggcccccgtgcagcaggcagccagccccaccaaccccacagccatctcccctgaggagtacttcgaccccaacttcagcctggagtcacggaacattggccgccccatcgagatgtccagcaaagtacagaggttcaaggcaacactgtggctgagtgaagagcacccgctctccctgggtgaccaggtgacccccatcatcgacctaatggccatcagcaacgctcactttgccaagctgcgcgacttcatcactctgcgccttccacctggcttccccgtcaaaattgagattccccttttccacgtgctcaatgcccgcatcaccttcagcaacctgtgtggctgtgatgagcccctgagctccgtgtgggtgccggcccccagctctgctgttgccgcatcagggaaccctttcccgtgcgaggtggaccccaccgtgtttgaagtgcccaacgggtacagcgtgctgggcatggagcgcaacgagcccctccgggacgaggacgatgacctcctgcagttcgccatccagcagagcctgcttgaagcgggcactgaggcggagcaggtgaccgtctgggaagccctgaccaacacccggcccggtgcccgccctcctccccaggccacggtttatgaggaacagcttcagctggagcgggccctccaggaaagcctgcagctgtccacagagcccaggggcccaggatcccctcccaggacacccccagcccccggtccacccagctttgaagagcagctgcgcctggccctggagttgtcttcacgggagcaggaggagcgggagcggcgcgggcagcaggaggaggaggacttacagcggatcctgcagctgtcactcactgagcactgagccatagccccgggagggctggccaggccactccctgcccgcttttgtaatttatttatttataaactctctgctgctgagcttggggcctggagccccaggaatgagcaggcaggggagactgagatggaaataaagagactgtcgcagc

SEQ ID NO: 107594 - DNA, 1111 bp, Homo sapiens
  Payload ID: 1111
  Gene Symbol: ANKRD13D
  Gene Name: ankyrin repeat domain 13 family, member D
  Uniprot ID: Q6ZTN6
  ENST ID: ENST00000515828
  CDS Start-End: 192-959
ggagccccagcctgggcccagggaggagggcagcttgggccacgtggccaggacaccagctcccgggggaggcgggcagcggcatctgagcagagcagggcactccaggccaggcagaaggtgggtaaaggcagctgcccacgaaccagagggcagtcctcaatggaagggccaccagccgtgcctcacccatgtcctgtggtcggctgggcaggttcaaggcaacactgtggctgagtgaagagcacccgctctccctgggtgaccaggtgacccccatcatcgacctaatggccatcagcaacgctcactttgccaagctgcgcgacttcatcactctgcgccttccacctggcttccccgtcaaaattgagattccccttttccacgtgctcaatgcccgcatcaccttcagcaacctgtgtggctgtgatgagcccctgagctccgtgtgggtgccggcccccagctctgctgttgccgcatcagggaaccctttcccgtgcgaggtggaccccaccgtgtttgaagtgcccaacgggtacagcgtgctgggcatggagcgcaacgagcccctccgggacgaggacgatgacctcctgcagttcgccatccagcagagcctgcttgaagcgggcactgaggcggagcaggtgaccgtctgggaagccctgaccaacacccggcccggtgcccgccctcctccccaggccacggtttatgaggaacagcttcagctggagcgggccctccaggaaagcctgcagctgtccacagagcccaggggcccaggatcccctcccaggacacccccagcccccggtccacccagctttgaagagcagctgcgcctggccctggagttgtcttcacgggagcaggaggagcgggagcggcgcgggcagcaggaggaggaggacttacagcggatcctgcagctgtcactcactgagcactgagccatagccccgggagggctggccaggccactccctgcccgcttttgtaatttatttatttataaactctctgctgctgagcttggggcctggagccccaggaatgagcaggcaggggagactgagatggaaataaagagactgtcgcagca

SEQ ID NO: 107595 - DNA, 2138 bp, Homo sapiens
  Payload ID: 1111
  Gene Symbol: ANKRD13D
  Gene Name: ankyrin repeat domain 13 family, member D
  Uniprot ID: Q6ZTN6
  ENST ID: ENST00000514166
  CDS Start-End: 429-1985
agggggccgtgccaggcccgaagccgaggcggggccgggatgcggcgctgaggcccagcatggccggcccgggccccaccttcccgctgcaccggctcgtctgggcgaaccggcatcgcgaactggaggccgcactgcacagccaccagcacgacattgaacaggaggacccccgcgggcggaccccactggagctggccgtgtctctgggaaacctggagtctgtgagagtgctccttcgacacaatgccaacgtgggcaaagagaaccgccagggctgggcaggtactgcagaggacaaggggctccccctgaggctggcaggcggggggcagtgagcagccaggcctggggtcatctggagggctcccctcagcagcctggtgcccgcagtcctgcaggaggcagtcagcactggagaccccgagatggtgcagctggtgctccagtatcgggactaccagagggccacgcagaggctggcgggcattccggaactgctcaacaaacttcgccaggcccccgatttctacgttgagatgaagtgggagttcaccagctgggtgccccttgtgtctaagatgtgcccaagcgatgtgtaccgcgtgtggaagcggggtgagagcctgcgagtagacaccagtctcctgggcttcgagcacatgacctggcagcggggccggaggagcttcatcttcaagggccaggaggcaggagccctggtgatggaagtggaccatgaccggcaggtggtgcatgtggagacactggggctcactctgcaggagcccgaaacactgctggccgccatgcggcccagcgaggagcatgtggccagtcgcctcacctctcctatcgtctccacccacctggacactcgtaatgtggcctttgagaggaacaaatgtggtatctggggctggcggtctgagaagatggaaactgttagcggctacgaggccaaggtgtacagtgccaccaacgtggagctggtgacacgcacacgcacggagcacctctctgatcaggacaagtcgaggagcaaagcggggaagactccattccagtccttcctggggatggcgcagcagcattcctcccacaccggggcccccgtgcagcaggcagccagccccaccaaccccacagccatctcccctgaggagtacttcgaccccaacttcagcctggagtcacggaacattggccgccccatcgagatgtccagcaaagtacagaggttcaaggcaacactgtggctgagtgaagagcacccgctctccctgggtgaccaggtgacccccatcatcgacctaatggccatcagcaacgctcactttgccaagctgcgcgacttcatcactctgcgccttccacctggcttccccgtcaaaattgagattccccttttccacgtgctcaatgcccgcatcaccttcagcaacctgtgtggctgtgatgagcccctgagctccgtgtgggtgccggcccccagctctgctgttgccgcatcagggaaccctttcccgtgcgaggtggaccccaccgtgtttgaagtgcccaacgggtacagcgtgctgggcatggagcgcaacgagcccctccgggacgaggacgatgacctcctgcagttcgccatccagcagagcctgcttgaagcgggcactgaggcggagcaggtgaccgtctgggaagccctgaccaacacccggcccggtgcccgccctcctccccaggccacggtttatgaggaacagcttcagctggagcgggccctccaggaaagcctgcagctgtccacagagcccaggggcccaggatcccctcccaggacacccccagcccccggtccacccagctttgaagagcagctgcgcctggccctggagttgtcttcacgggagcaggaggagcgggagcggcgcgggcagcaggaggaggaggacttacagcggatcctgcagctgtcactcactgagcactgagccatagccccgggagggctggccaggccactccctgcccgcttttgtaatttatttatttataaactctctgctgctgagcttggggcctggagccccaggaatgagcaggcaggggagactgagatggaaataaagagactgtcgcagcag

SEQ ID NO: 107596 - DNA, 609 bp, Homo sapiens
  Payload ID: 1111
  Gene Symbol: ANKRD13D
  Gene Name: ankyrin repeat domain 13 family, member D
  ENST ID: ENST00000506119
  CDS Start-End: 1-98
cagccatctcccctgaggagtacttcgaccccaacttcagcctggagtcacggaacattggccgccccatcgagatgtccagcaaagtacagaggtgaggtctgagagctggctggggacttgcctcgggacaagggctcttgcagacccctctctgggcctgtcatagttagggacccactccctcggctggcttctctctggactccactcctggagggcaggagtcatgtctgccttatccatggtcctcagcccttagcaaggggcttggcacagaaaaccggtagtttgtctttgatgaatggatggtgccacccatgtatggttttctattgaatttcatgagtacctgctggggccagcgtggcacagtgggaagggcccccagcgacgtggcctgggagtggagcgtctgccttggtggaacagaacagttacgctcttgcctcgtgaggagccttgagcaggttcaaggcaacactgtggctgagtgaagagcacccgctctccctgggtgaccaggtgacccccatcatcgacctaatggccatcagcaacgctcactttgccaagctgcgcgacttcatcactctgcgccttccacct

SEQ ID NO: 107597 - DNA, 642 bp, Homo sapiens
  Payload ID: 1111
  Gene Symbol: ANKRD13D
  Gene Name: ankyrin repeat domain 13 family, member D
  ENST ID: ENST00000514779
  CDS Start-End: 316-642
ggacacgcaggccaccctctgccatctccctggtcagtccgccgtccttatttcccacagcgattcccaaccctgctcgccctggcagcctccctgccttgccctcttctctcctgccctttgtgagtgtcccgtctcccccagcacgacattgaacaggaggacccccgcgggcggaccccactggagctggccgtgtctctgggaaacctggagtctgtgagagtgctccttcgacacaatgccaacgtgggcaaagagaaccgccagggctgggcagtcctgcaggaggcagtcagcactggagaccccgagatggtgcagctggtgctccagtatcgggactaccagagggccacgcagaggctggcgggcattccggaactgctcaacaaacttcgccaggcccccgatttctacgttgagatgaagtgggagttcaccagctgggtgccccttgtgtctaagatgtgcccaagcgatgtgtaccgcgtgtggaagcggggtgagagcctgcgagtagacaccagtctcctgggcttcgagcacatgacctggcagcggggccggaggagcttcatcttcaagggccaggaggcaggagccctggtgatggaagtggaccatgaccggcaggtggtg

SEQ ID NO: 107598 - DNA, 4148 bp, Homo sapiens
  Payload ID: 1112
  Gene Symbol: ANKRD13A
  Gene Name: ankyrin repeat domain 13A
  Uniprot ID: Q8IZ07
  ENST ID: ENST00000261739
  CDS Start-End: 167-1939
cggacctcccgcgcgccccgcacccgaccggctcagccggccggcagcgtaacacgccctacgctcgcttgctcgccggcctcagggcaggcaggcgggcgcgggagaccccgccggggccgagacttggggcgggcgacgaggaccaggttacggcctcctcgccatgtcctcggcctgcgacgcgggcgaccactaccccctgcacctcctagtctggaaaaacgactaccggcagctcgagaaggagctgcagggccagaatgtggaggctgtggacccacgaggtcgaacattattgcatcttgctgtttccttgggacatttggaatctgctcgagtcttactccgacataaagcagatgtgacaaaagaaaatcgccagggatggacagttttacatgaggctgtgagcactggcgatcctgagatggtgtacacagttctccaacatcgagactaccacaacacatccatggcccttgagggagttcctgagctgctccaaaaaattctcgaggctccggatttctatgtgcagatgaaatgggaattcaccagctgggtgcccttggtttctagaatatgcccaaatgatgtctgtcgcatctggaaaagtggtgccaaactgcgcgtcgatatcacattgctgggatttgaaaacatgagctggataagagggaggcgtagttttatatttaagggagaagacaactgggcggagttaatggaagtcaaccatgatgacaaagtggtcaccaccgaacgcttcgacctttcccaagaaatggagcgcctcactctggacttgatgaagccaaaaagcagggaagttgagcggcggctcacaagccctgtcattaacaccagcctcgatactaaaaatattgcttttgaaagaactaaatccggattctggggctggaggacagataaagcagaagttgttaatggttacgaagcaaaggtttacacagtaaacaatgtgaatgtgatcaccaaaatacgcacagaacatctgaccgaggaggaaaaaaagagatataaagcagacaggaacccgctggaatctttgctgggaactgtggaacaccaatttggtgcacaaggggacctcaccacggaatgtgctactgcaaacaaccccacagccatcacgcctgatgagtacttcaatgaagagtttgatctgaaagacagggacattggaaggccgaaagagctgacgattagaacacagaagtttaaagcaatgttgtggatgtgtgaagagtttcccctctctctggtggagcaggtcattcccatcattgacctaatggctcgaacgagtgctcattttgcaagactgagagatttcatcaaattggaattcccacctggatttcctgtcaaaatagaaattcccttgtttcatgtcttaaatgcacggattacatttggaaatgttaatggctgtagcactgccgaagaatctgtatctcaaaatgtggaagggacccaggctgattcagcttcccacatcacaaactttgaggttgatcaatctgtgtttgaaattcccgaatcttactatgttcaagacaatggcagaaatgtgcatttgcaagatgaagattacgagataatgcagtttgccatccagcaaagtctgctggagtccagcaggagccaggaactttcaggaccagcttcgaatggagggatcagccagacaaacacctatgacgcccagtatgagagggccatccaggagagcctcctcaccagcacagaaggcctgtgccccagcgccctgagcgagacaagccgttttgataatgacttgcagctagccatggagctctctgccaaagagctggaggaatgggagctccggctccaggaggaagaggctgagctccagcaagtcttacagctgtcactcactgacaaatagacctttcagcctgtgagcctctgcacaaagcagaggctgtgggctgtcacagatgctgtgtcaaccagggccctagggctaagggcctgcaccttgcgtgcatgcagcaggcaacaactgccccttctttatgcagaggtgcagaaccagggactcctgggcccatccaggctgctccctggggtggagaagggaccagggattgcaggccccatctccaggctaaggggaggagagcatcatcactttccattagctgtattggcttgcaggtcacatttttactaccagctttagacaaaaccccaatccccgcaggtttgtagataaatttttatcaaggagtgataacaagacaagttattgcagagtcagggtgcttttatatataagagcagcagccgcctttgtaaagtgtgatctatgagaattggagacacttctttactgttcaccaaagaaatgggtaatctgtgctgatctccttatttttacctttttacagggtttctaggacattgtcattattcttcctccatctatctgattccattccttccacacccagctaaagttagaggagatacatatagaatctattttagattattgttaactatttgcatcaaattaagatacacaaatggccatggatgttgccttagccttaaacattactaatagtttcacatcacctcactgcacgcatcgaaggatctgatttgaatttgtaaaggcaattcttttgagagcaggattctccaggctaaatcaaaggcagctaatcctgtccctgaaggagcagctaggggaacctgaggcttgttcttgaagtgggcaagctggccaaaatattggaacacacagaaccaaaccaggtgtgttctacacctgcatgagtgaaggatttccacgtagacacctaggaagagcccgcatgccctagactcactccagaggaaggattgatttgcaaccagaaagggagctgaaaaccacggagctccatggctcttcattcaaaagggaaaataatgattccacgttgctttttagagttcaaatcaacatctttctggataaatctattttttaacaatctttttattatttgtaaaagatataaaaacaactcccatcagtagcaatacaaggttatacattttaaccagattttctcaggccttttttggatacctttagtagttaactctcttttgtcaaaccctcttgtatataaccatcgcacaacatacagaaccctggggaatacagccaagggcactgctcactgtggcccgtgtattcattcccacaggctgcactgaaataacctggtaaacaacaccctcctccattttgcgtctatttcttctattgtgcttctttggggataggaagagaaacataactactgttccaggtaacgtctgtatcatacagttagtgttgccagtgaaacgttcccagatacaaagaattgtgcttttaattccatttcacaatctgttttgttttttttttttgtcattgtctgaccaaaattccttctgcacatgaggccagtataggcaacgtcacatttgtttgtttcaaatatgcagtgtggtattttgtttactttgcatttaccgtgagcaaagatacttcttggaatggctgcagtgaggccgtgtcattggctcacaaaagtgactcataggtaatttctgtgtttgcattccactgctctgctccctaaggtccttgactttctccccaggaattcacttaaaaagggactgagcattgtgtcaacctgttgcagtgtttttcatatatgtgttcactctaaaaatgcaaataaagactgcttccttagagggtgctcatacaaaattccagtctttgagtctttttccttttcagttttttctagtcactggatgtacccacacttcctgttacgtatgtcagtagaacattagaatgcctcacttcgctcagttcatcactgcaaaggtggcatgctcctcccagccttcctgcccaggttaacaagccccatgctgcttgtttcaaatggcaactaaaagcaagccagtgttgggctgttctgacacctctgtggtcctcctggaggggaactggctcttgtggggtaagggaagcccagccaacatcaaagctctgcatcaatgctatcccttgaagccaactgctttgtgag

SEQ ID NO: 107599 - DNA, 561 bp, Homo sapiens
  Payload ID: 1112
  Gene Symbol: ANKRD13A
  Gene Name: ankyrin repeat domain 13A
  ENST ID: ENST00000551491
  CDS Start-End: 1-252
ctaatggctcgaacgagtgctcattttgcaagactgagagatttcatcaaattggaattcccacctggatttcctgtcaaaatagaaattcccttgtttcatgtcttaaatgcacggattacatttggaaatgttaatggctgtagcactgccgaagaatctgtatctcaaaatgtggaagggacccaggctgattcaggaactttcaggaccagcttcgaatggagggatcagccagacaaacacctatgacgcccagtatgagagggccatccaggagagcctcctcaccagcacagaaggcctgtgccccagcgccctgagcgagacaagccgttttgataatgacttgcagctagccatggagctctctgccaaagagctggaggaatgggagctccggctccaggaggaagaggctgagctccagcaagtcttacagctgtcactcactgacaaatagacctttcagcctgtgagcctctgcacaaagcagaggctgtgggctgtcacagatgctgtgtcaaccagggccctagggctaagggcctgcaccttgcg

SEQ ID NO: 107600 - DNA, 904 bp, Homo sapiens
  Payload ID: 1112
  Gene Symbol: ANKRD13A
  Gene Name: ankyrin repeat domain 13A
  ENST ID: ENST00000547639
  CDS Start-End: 1-904
gcatctggaaaagtggtgccaaactgcgcgtcgatatcacattgctgggatttgaaaacatgagctggataagagggaggcgtagttttatatttaagggagaagacaactgggcggagttaatggaagtcaaccatgatgacaaagtggtcaccaccgaacgcttcgacctttcccaagaaatggagcgcctcactctggacttgatgaagccaaaaagcagggaagttgagcggcggctcacaagccctgtcattaacaccagcctcgatactaaaaatattgcttttgaaagaactaaatccggattctggggctggaggacagataaagcagaagttgttaatggttacgaagcaaaggtttacacagtaaacaatgtgaatgtgatcaccaaaatacgcacagaacatctgaccgaggaggaaaaaaagagatataaagacaggaacccgctggaatctttgctgggaactgtggaacaccaatttggtgcacaaggggacctcaccacggaatgtgctactgcaaacaaccccacagccatcacgcctgatgagtacttcaatgaagagtttgatctgaaagacagggacattggaaggccgaaagagctgacgattagaacacagaagtttaaagcaatgttgtggatgtgtgaagagtttcccctctctctggtggagcaggtcattcccatcattgacctaatggctcgaacgagtgctcattttgcaagactgagagatttcatcaaattggaattcccacctggatttcctgtcaaaatagaaattcccttgtttcatgtcttaaatgcacggattacatttggaaatgttaatggctgtagcactgccgaagaatctgtatctcaaaatgtggaagggacccaggctgattc

SEQ ID NO: 107601 - DNA, 1455 bp, Homo sapiens
  Payload ID: 1112
  Gene Symbol: ANKRD13A
  Gene Name: ankyrin repeat domain 13A
  ENST ID: ENST00000553025
  CDS Start-End: 303-824
atggggctactggagcagggggaaagaagctggggacaggtagacggaactttccgcgtggagatctttggccaagagaatgagcctcagctctgttctgtgggctgcactgagtttctcggtgtgagctggagaatgtggaggctgtggacccacgaggtcgaacattattgcatcttgctgtttccttgggacatttggaatctgctcgagtcttactccgacataaagcagatgtgacaaaagaaaatcgccagggatggacagttttacatgaggctgtgagcactggcgatcctgagatggtgtacacagttctccaacatcgagactaccacaacacatccatggcccttgagggagttcctgagctgctccaaaaaattctcgaggctccggatttctatgtgcagatgaaatgggaattcaccagctgggtgcccttggtttctagaatatgcccaaatgatgtctgtcgcatctggaaaagtggtgccaaactgcgcgtcgatatcacattgctgggatttgaaaacatgagctggataagagggaggcgtagttttatatttaagggagaagacaactgggcggagttaatggaagtcaaccatgatgacaaagtggtcaccaccgaacgcttcgacctttcccaagaaatggagcgcctcactctggacttgatgaagccaaaaagcagggaagttgagcggcggctcacaagccctgtcattaacaccagcctcgatactaaaaatattgcttttgaaagggttttcagagttctcaagctaactcttttgcaactgacagtgtgtagctgagagagaatttttggaagacagctgctttgttttaatggtgctcagaattaaatgtgtgcttgtcgtgcattgagcaagaattgagccactccttaggattgataccagctacgaaaagaatatagctgctcttgaatgtgaggtttacacagtaaacaatgtgaatgtgatcaccaaaatacgcacagaacatctgaccgaggaggaaaaaaagagatataaagcagacaggaacccgctggaatctttgctgggaactgtggaacaccaatttggtgcacaaggggacctcaccacggaatgtgctactgcaaacaaccccacagccatcacgcctgatgagtacttcaatgaagagtttgatctgaaagacagggacattggaaggccgaaagagctgacgattagaacacagaagtttaaagcaatgttgtggatgtgtgaagagtttcccctctctctggtggagcaggtcattcccatcattgacctaatggctcgaacgagtgctcattttgcaagactgagagatttcatcaaattggaattcccacctggatttcctgtcaaaatagaaattcccttgtttcatgtcttaaatgcacggattacatttggaaatgttaatggc

SEQ ID NO: 107602 - DNA, 640 bp, Homo sapiens
  Payload ID: 1112
  Gene Symbol: ANKRD13A
  Gene Name: ankyrin repeat domain 13A
  ENST ID: ENST00000547419
  CDS Start-End: 1-521
cgcctgatgagtacttcaatgaagagtttgatctgaaagacagggacattggaaggccgaaagagctgacgattagaacacagaagtttaaagcaatgttgtggatgtgtgaagagtttcccctctctctggtggagcaggtcattcccatcattgacctaatggctcgaacgagtgctcattttgcaagactgagagatttcatcaaattggaattcccacctggatttcctgtcaaaatagaaattcccttgtttcatgtcttaaatgcacggattacatttggaaatgttaatggctgtagcactgccgaagaatctgtatctcaaaatgtggaagggacccaggctgattcagcttcccacatcacaaactttgaggttgatcaatctgtgtttgaaattcccgaatcttactatgttcaagacaatggcagaaatgtgcatttgcaagatgaagattacgagataatgcagtttgccatccagcaaatcttacagctgtcactcactgacaaatagacctttcagcctgtgagcctctgcacaaagcagaggctgtgggctgtcacagatgctgtgtcaaccagggccctagggctaagggcctgcaccttgcgtgcatgcagcaggcaacaact

SEQ ID NO: 107603 - DNA, 3214 bp, Homo sapiens
  Payload ID: 1113
  Gene Symbol: ANKRD13B
  Gene Name: ankyrin repeat domain 13B
  Uniprot ID: Q86YJ7
  ENST ID: ENST00000394859
  CDS Start-End: 155-2035
cgcgccgcccccgcccgccgccgctcgcacatgcccgagccgcagccccgcgagcaggcagcgccggccccccgccccgcggccccgggccccggctccggcgccgtccctcctccccggccgggcgccgcggccccggcatgaggagcgggcgatgatccccgccaacgcctccgccaggaaggggcccgagggcaagtatccgctgcactacctcgtgtggcacaaccgccaccgcgagctggagaaggaggtccgcgcgggccaggtggacatcgagcagctggatccccgcggccggactcccctgcacctggccaccacgctggggcaccttgagtgtgcccgtgtgctcctggcgcacggcgcagacgtgggcagggagaatcgcagcggctggacagtgctccaggaggctgtgagtacccgggacctggagctggtgcagctggtgcttcggtaccgggactaccagcgggtggtgaagcggctggcgggcatccccgtgctcctggagaagctgcgcaaggcccaggacttctacgtggagatgaaatgggagttcactagctgggtgcccctggtgtccaagatctgccctagtgacacctacaaagtgtggaagagcggccagaacctgagggtagacaccacactcctgggctttgaccacatgacctggcagcgagggaaccgcagctttgtcttcaggggccaagacacaagcgccgtggtcatggagattgaccacgaccgccgggtggtgtacacagagactctggcactggctgggcaggaccgggagctgctgctggctgctgctcagcccactgaggaacaggtgctgagccggcttaccgcgcccgtcgtcaccactcagcttgacaccaagaatatctcctttgagaggaacaagactggcatcctgggctggcgcagtgaaaagacggagatggtgaatgggtatgaagctaaggtgtatggggcatctaacgtggagctcatcacccgcacacggacagaacatctttcagaacagcacaagggcaaggtcaaaggctgtaagacacctttgcagtccttcctgggaatcgctgagcagcacgggggcccccaaaatgggaccctgatcactcagactctgagccaagccaaccccactgccatcactgcagaagaatacttcaaccccaactttgagctgggcaaccgtgatatgggccgccccatggaactgaccaccaagacacagaagttcaaggccaagctgtggctgtgtgaggagcatcccctgtccctgtgtgagcaggtggcccccatcattgacctcatggccgtcagcaatgcgctttttgccaagctccgggacttcatcaccctgcgtctgcctcctggcttcccagttaagattgaaatcccgatcttccacatcctcaacgcccgcatcaccttcgggaacctcaacggctgcgacgaaccggtgccatcggtgcgaggcagccccagcagcgagacgccttccccaggcagcgactcctccagcgtcagcagctccagctccacgacctcctgccgcggctgcgagatctccccagcgttgttcgaggccccgcgcggctacagcatgatgggcggccagcgggaggcggcgacccgggacgacgacgacgacctgctgcaattcgccatccagcagagcctgcttgaggcgggcagtgagtatgaccaggtcaccatctgggaggcgctaaccaacagcaagccaggcacccaccccatgtcctacgagggtcgccgacaggacaggagcgccccgcccacgccgcagcgccagcctgcgcccccggcgtcagtgcccagccctcggcccagctcagggccaggttccggcggccacgtgttccggagctacgacgagcagctgcggctggcgatggaactgtcggcgcaggagcaggaggagaggcggcggcgcgcgcgccaggaggaggaggagctggagcgcatcctgaggctctcactgaccgagcagtagcgccccctgccgggaccctcgccagcgccacgcgcgccacgcccagggccaggagccagacaaaccccggcctgcgcgcctgcagagcggcggctggagactggagccaccgcctcgcgggtgcagcagcacagcaggcacggttcggggagggattcggcatggccgcggggtaccttcccaggccagggccctggaggcaactggcacggcctggtccccctgctttgctgtattctgattccccaacccgctcccctgggctcagatctgtcctgtcctagggcggagccaggcggtcctgagggggagatgaatccttagaggagcgctgtccctatcccttgctccttctggccggtccgcatttctgttcactaaccccactccaggacactgcccctgaagcctttgcatctctgctcttcactcctggggggcagctgagctccccgcgtgctgtgtcactgctttgttccagacacaaaccagcacgtctagggcccagcccctcccccaccccggcatttcagcgtcaagtgcacttagcggggtacccggctcccccagcccccacacccgtcctgggtctcagggtggttccagcttctccttgggcagccagaagttggagtcccatcccccaaggcacatttttttttttttttttttgtgatcagggagtgtgtccaacgtagccccctggcctgtgcaagccctgactccctcatggtgcctcggagagtggggagcatattgggctggggtaagcactagacccaagtagactggacacaaagggctcgcccagggccctggcgccacccccaccccttcccaccagctgctgctagcctctgtggttgtacatcccacttgcccccacacggagactgactctaaaacccttcatccaatggtgctaacccccggctctcccctgccccacctcacccacccagagaagcacagaccccgccaggggcaggggcccaccgcacacccttgtcccgggcctgtctgggactggccttcccggctcagccagtgaggctcagaagggacacaaagagggatggaagaaaagaacaaagagaaactgttcctcccacccccttccctgatgccaggggcaccagactgattctgaggcacaaataaaagaggcttcataccgga

SEQ ID NO: 107604 - DNA, 2671 bp, Homo sapiens
  Payload ID: 1113
  Gene Symbol: ANKRD13B
  Gene Name: ankyrin repeat domain 13B
  Uniprot ID: Q86YJ7
  ENST ID: ENST00000488766
  CDS Start-End: 155-2035
cgcgccgcccccgcccgccgccgctcgcacatgcccgagccgcagccccgcgagcaggcagcgccggccccccgccccgcggccccgggccccggctccggcgccgtccctcctccccggccgggcgccgcggccccggcatgaggagcgggcgatgatccccgccaacgcctccgccaggaaggggcccgagggcaagtatccgctgcactacctcgtgtggcacaaccgccaccgcgagctggagaaggaggtccgcgcgggccaggtggacatcgagcagctggatccccgcggccggactcccctgcacctggccaccacgctggggcaccttgagtgtgcccgtgtgctcctggcgcacggcgcagacgtgggcagggagaatcgcagcggctggacagtgctccaggaggctgtgagtacccgggacctggagctggtgcagctggtgcttcggtaccgggactaccagcgggtggtgaagcggctggcgggcatccccgtgctcctggagaagctgcgcaaggcccaggacttctacgtggagatgaaatgggagttcactagctgggtgcccctggtgtccaagatctgccctagtgacacctacaaagtgtggaagagcggccagaacctgagggtagacaccacactcctgggctttgaccacatgacctggcagcgagggaaccgcagctttgtcttcaggggccaagacacaagcgccgtggtcatggagattgaccacgaccgccgggtggtgtacacagagactctggcactggctgggcaggaccgggagctgctgctggctgctgctcagcccactgaggaacaggtgctgagccggcttaccgcgcccgtcgtcaccactcagcttgacaccaagaatatctcctttgagaggaacaagactggcatcctgggctggcgcagtgaaaagacggagatggtgaatgggtatgaagctaaggtgtatggggcatctaacgtggagctcatcacccgcacacggacagaacatctttcagaacagcacaagggcaaggtcaaaggctgtaagacacctttgcagtccttcctgggaatcgctgagcagcacgggggcccccaaaatgggaccctgatcactcagactctgagccaagccaaccccactgccatcactgcagaagaatacttcaaccccaactttgagctgggcaaccgtgatatgggccgccccatggaactgaccaccaagacacagaagttcaaggccaagctgtggctgtgtgaggagcatcccctgtccctgtgtgagcaggtggcccccatcattgacctcatggccgtcagcaatgcgctttttgccaagctccgggacttcatcaccctgcgtctgcctcctggcttcccagttaagattgaaatcccgatcttccacatcctcaacgcccgcatcaccttcgggaacctcaacggctgcgacgaaccggtgccatcggtgcgaggcagccccagcagcgagacgccttccccaggcagcgactcctccagcgtcagcagctccagctccacgacctcctgccgcggctgcgagatctccccagcgttgttcgaggccccgcgcggctacagcatgatgggcggccagcgggaggcggcgacccgggacgacgacgacgacctgctgcaattcgccatccagcagagcctgcttgaggcgggcagtgagtatgaccaggtcaccatctgggaggcgctaaccaacagcaagccaggcacccaccccatgtcctacgagggtcgccgacaggacaggagcgccccgcccacgccgcagcgccagcctgcgcccccggcgtcagtgcccagccctcggcccagctcagggccaggttccggcggccacgtgttccggagctacgacgagcagctgcggctggcgatggaactgtcggcgcaggagcaggaggagaggcggcggcgcgcgcgccaggaggaggaggagctggagcgcatcctgaggctctcactgaccgagcagtagcgccccctgccgggaccctcgccagcgccacgcgcgccacgcccagggccaggagccagacaaaccccggcctgcgcgcctgcagagcggcggctggagactggagccaccgcctcgcgggtgcagcagcacagcagggagtgtgtccaacgtagccccctggcctgtgcaagccctgactccctcatggtgcctcggagagtggggagcatattgggctggggtaagcactagacccaagtagactggacacaaagggctcgcccagggccctggcgccacccccaccccttcccaccagctgctgctagcctctgtggttgtacatcccacttgcccccacacggagactgactctaaaacccttcatccaatggtgctaacccccggctctcccctgccccacctcacccacccagagaagcacagaccccgccaggggcaggggcccaccgcacacccttgtcccgggcctgtctgggactggccttcccggctcagccagtgaggctcagaagggacacaaagagggatggaagaaaagaacaaagagaaactgttcctcccacccccttccctgatgccaggggcaccagactgattctgaggcacaaataaaagaggcttcataccgga

SEQ ID NO: 107605 - DNA, 543 bp, Homo sapiens
  Payload ID: 1113
  Gene Symbol: ANKRD13B
  Gene Name: ankyrin repeat domain 13B
  ENST ID: ENST00000579719
  CDS Start-End: 1-387
gaaccggtgccatcggtgcgaggcagccccagcagcgagacgccttccccaggcagcgactcctccagcgtcagcagctccagctccacgacctcctgccgcggctgcgagatctccccagcgttgttcgaggccccgcgcggctacagcatgatgggcggccagcgggaggcggcgacccgggacgacgacgacgacctgctgcaattcgccatccagcagagcctgcttgaggcgggcagtgagtatgaccaggtcaccatctgggaggcgctaaccaacagcaagccaggcacccaccccatgtcctacgagggtcgccgacaggacaggtcagtgcccgctgggccggagagaatcctccggagaggatcctgtctcccctaagccaggacacagccggagaacccgcggggccctcggcagggaccctcctggtatcgggatggcttctgccaccactcctgcctccgaggcggcaggcaggggtcagggatccaggcttcaccgcggagttcagactctccccaggcattgacgggg

SEQ ID NO: 107606 - DNA, 582 bp, Homo sapiens
  Payload ID: 1113
  Gene Symbol: ANKRD13B
  Gene Name: ankyrin repeat domain 13B
  ENST ID: ENST00000583728
  CDS Start-End: 377-582
gcttaaaggggccgcggcagatgcccggccccggcgggcagcgtggcctgcggccctggcctccgctgcagcgctcgcctggcccggaggcaatgtggacatcgagcagctggatccccgcggccggactcccctgcacctggccaccacgctggggcaccttgagtgtgcccgtgtgctcctggcgcacggcgcagacgtgggcagggagaatcgcagcggctggacagtgctccaggaggctgtgagtacccgggacctggagctggtgcagctggtgcttcggtaccgggactaccagcgggtggtgaagcggctggcgggcatccccgtgctcctggagaagctgcgcaaggcccaggacttctacgtggagatgaaatgggagttcactagctgggtgcccctggtgtccaagatctgccctagtgacacctacaaagtgtggaagagcggccagaacctgagggtagacaccacactcctgggctttgaccacatgacctggcagcgagggaaccgcagctttgtcttcaggggccaagacacaagcgccgtggtcatggagattgaccacgaccg

SEQ ID NO: 107607 - DNA, 2670 bp, Homo sapiens
  Payload ID: 1113
  Gene Symbol: ANKRD13B
  Gene Name: ankyrin repeat domain 13B
  Uniprot ID: Q86YJ7
  ENST ID: ENST00000614878
  CDS Start-End: 155-2035
cgcgccgcccccgcccgccgccgctcgcacatgcccgagccgcagccccgcgagcaggcagcgccggccccccgccccgcggccccgggccccggctccggcgccgtccctcctccccggccgggcgccgcggccccggcatgaggagcgggcgatgatccccgccaacgcctccgccaggaaggggcccgagggcaagtatccgctgcactacctcgtgtggcacaaccgccaccgcgagctggagaaggaggtccgcgcgggccaggtggacatcgagcagctggatccccgcggccggactcccctgcacctggccaccacgctggggcaccttgagtgtgcccgtgtgctcctggcgcacggcgcagacgtgggcagggagaatcgcagcggctggacagtgctccaggaggctgtgagtacccgggacctggagctggtgcagctggtgcttcggtaccgggactaccagcgggtggtgaagcggctggcgggcatccccgtgctcctggagaagctgcgcaaggcccaggacttctacgtggagatgaaatgggagttcactagctgggtgcccctggtgtccaagatctgccctagtgacacctacaaagtgtggaagagcggccagaacctgagggtagacaccacactcctgggctttgaccacatgacctggcagcgagggaaccgcagctttgtcttcaggggccaagacacaagcgccgtggtcatggagattgaccacgaccgccgggtggtgtacacagagactctggcactggctgggcaggaccgggagctgctgctggctgctgctcagcccactgaggaacaggtgctgagccggcttaccgcgcccgtcgtcaccactcagcttgacaccaagaatatctcctttgagaggaacaagactggcatcctgggctggcgcagtgaaaagacggagatggtgaatgggtatgaagctaaggtgtatggggcatctaacgtggagctcatcacccgcacacggacagaacatctttcagaacagcacaagggcaaggtcaaaggctgtaagacacctttgcagtccttcctgggaatcgctgagcagcacgggggcccccaaaatgggaccctgatcactcagactctgagccaagccaaccccactgccatcactgcagaagaatacttcaaccccaactttgagctgggcaaccgtgatatgggccgccccatggaactgaccaccaagacacagaagttcaaggccaagctgtggctgtgtgaggagcatcccctgtccctgtgtgagcaggtggcccccatcattgacctcatggccgtcagcaatgcgctttttgccaagctccgggacttcatcaccctgcgtctgcctcctggcttcccagttaagattgaaatcccgatcttccacatcctcaacgcccgcatcaccttcgggaacctcaacggctgcgacgaaccggtgccatcggtgcgaggcagccccagcagcgagacgccttccccaggcagcgactcctccagcgtcagcagctccagctccacgacctcctgccgcggctgcgagatctccccagcgttgttcgaggccccgcgcggctacagcatgatgggcggccagcgggaggcggcgacccgggacgacgacgacgacctgctgcaattcgccatccagcagagcctgcttgaggcgggcagtgagtatgaccaggtcaccatctgggaggcgctaaccaacagcaagccaggcacccaccccatgtcctacgagggtcgccgacaggacaggagcgccccgcccacgccgcagcgccagcctgcgcccccggcgtcagtgcccagccctcggcccagctcagggccaggttccggcggccacgtgttccggagctacgacgagcagctgcggctggcgatggaactgtcggcgcaggagcaggaggagaggcggcggcgcgcgcgccaggaggaggaggagctggagcgcatcctgaggctctcactgaccgagcagtagcgccccctgccgggaccctcgccagcgccacgcgcgccacgcccagggccaggagccagacaaaccccggcctgcgcgcctgcagagcggcggctggagactggagccaccgcctcgcgggtgcagcagcacagcagggagtgtgtccaacgtagccccctggcctgtgcaagccctgactccctcatggtgcctcggagagtggggagcatattgggctggggtaagcactagacccaagtagactggacacaaagggctcgcccagggccctggcgccacccccaccccttcccaccagctgctgctagcctctgtggttgtacatcccacttgcccccacacggagactgactctaaaacccttcatccaatggtgctaacccccggctctcccctgccccacctcacccacccagagaagcacagaccccgccaggggcaggggcccaccgcacacccttgtcccgggcctgtctgggactggccttcccggctcagccagtgaggctcagaagggacacaaagagggatggaagaaaagaacaaagagaaactgttcctcccacccccttccctgatgccaggggcaccagactgattctgaggcacaaataaaagaggcttcataccgg

SEQ ID NO: 107608 - DNA, 3327 bp, Homo sapiens
  Payload ID: 1114
  Gene Symbol: ANKRD13C
  Gene Name: ankyrin repeat domain 13C
  Uniprot ID: Q8N6S4
  ENST ID: ENST00000262346
  CDS Start-End: 327-1847
ctctcgcgagaggagcaagaggaagatggccgtgccctgtttttcggtgtaaggcagcgacggcggctgcgacggcgagactgagatcctggtgtcgtgggcacctgagttctagcttcccccagcgagcgcgcgtcccttcgtgcctaggcgagagccggctcttccccgggagatgcgtttgtcccaggctcgggggctcagtgggagttcatgctgcgctggaggctcttggccaccgctctaatcgccttgtgccgccgcagcgccagctccgtcgccagcggtgagcctcccgattcccccccttgcccctggcggcggcgatgaccggggagaagatccgctcactgcggagggaccacaagcccagcaaagaagaaggggacctgctggagcccggggatgaggaagcggcggctgccctcggcggtacctttaccagaagcaggattggcaagggcggcaaagcttgtcataagatcttcagtaaccatcaccaccggctacagctgaaggcagctccggcctcctccaatccccccggcgccccggctctgccgctgcacaattcctccgtgactgccaactcccagtccccggcccttctggccggcaccaaccccgttgctgtcgtcgcggatggaggcagttgccccgcacactacccggtgcacgagtgcgtcttcaagggggatgtgaggagactctcctctctcatccgcacgcacaatatcgggcagaaagataatcacggaaatactcctttacaccttgctgtgatgttaggaaataaagttacagctcttttgaggaagcttaagcagcaatccagggaaagtgttgaagaaaaacgacctcgattattaaaagccctgaaagagctaggtgacttttatctagaacttcactgggattttcaaagctgggtgcctttactttcccgaattctgccttccgatgcatgtaaaatatacaaacaaggtatcaatatcaggcttgacacaactctcatagactttactgacatgaagtgccaacgaggggatctaagcttcattttcaatggggatgcggcgccctctgaatcttttgtagtattagacaatgaacaaaaagtttatcagcgaatacatcatgaggaatcagagatggaaacagaagaagaggtggatattttaatgagcagtgatatttactctgcaactttatcaacaaaatcaatttctttcacgcgtgcccagacaggatggctttttcgggaagataaaacagaaagagtaggaaactttttggcagacttttacctggtgaatggacttgttttagaatcaaggaaaagaagagaacatctcagtgaagaggatattcttcgaaataaggccatcatggagagtttgagtaaaggtggaaacataatggaacagaattttgagccgattcgaagacagtctcttacacctcctcctcagaacactattacatgggaagaatatatatctgctgaaaatggaaaagctcctcatctgggtagagaattggtgtgcaaagagagtaagaaaacgtttaaagctacgatagccatgagccaggaatttcccttagggatagagttattattgaatgttttagaagtagtagctcccttcaagcactttaacaagcttagagaatttgttcagatgaagcttcctccaggctttcctgtaaaattagatatacctgtgtttcccacaatcacagccactgtgacttttcaggagtttcgatacgatgaatttgatggctccatctttactatacctgatgactacaaggaagacccaagccgttttcctgatctttaactgacgtggaaaaggatgccgtctaaccaaggaaagaaaatacagagaccctagaagtggatccaaatagaagggacaaatgctttcagtgaagaaaagggaattacacattgaatcgacacatcagtaatacgatacagtgaaatgggcctctaataagaatttcagcgagttttctgatgtgccattttttgtctttttaaaaatatacatattataaatgtaatagtttgacacattaatgaccctaagacctgcgtatgtgaagcagctatgagtgctgtgatttgtttttaaaaatttttacacttcttgttgaaatatatatgcatataaatatatctatatctatatctatatctaaaacactcctggaccattaacgtaaattaaatgtcttaagagatatggagcccttttaaacttgtcatctttatgcaaggtgacatttataaatattccttcgagctttgttttcataaaatgtaaactatgtaacattatgtatagttcagtaatttgaatgtttgttcaatataatgaactagaaggaatgcaattttctgtagatgaatgaaccaaatggtaaccattaaacaattgcatttatatgttgcaatacatttcagaaggagcgttcactctgcagggaataaggtacctcctttagcaccttagtgcaattcattgtggtgctatttgtttttacctgaatgtttgttactaatcttcctttcatagaacctctattttttttttttctaaacttgagtttgagtccttgttatggtcatcataaggtaatggttagcatgtttaaagatattcctcttccaaatctcagcactttaaaaaaaaatccaaatttttaaacttgcttcctaataagtacacatcggtctgattattttgtttgtttttagtagaatatggatgcattggtgtcagttttaaaaaacaatacacatattttggacaaccctacatatttaatcctttcaaaataagataaaaacattttatatgctaacagaatatatttgttacaagttaaagtccagaagtatacacaagattgattactcctattattttttttaaatcacaggaaaatattgatttcattgtctccaaagtgataaaatcatgtattactcatttttgcacttaaaatttttcttatttattccaaggtggtttgaaggtccaagtatgaaaataaattagggggattaatgtataacagttataaagtatcatgttgtattaaagagcttacttagattgatgtttttaaaatgtatcctgatgaatgtctcaagaatgcatctgtcaagttttttagactgaccagtagcttaaacttttttcaggattttaggtaatttgaaaggagtttagagacccttattgaaaatatgatttaaaaatccaaagcataaaccgtaagaaaaattttaaataaacatctttaaagctg

SEQ ID NO: 107609 - DNA, 4069 bp, Homo sapiens
  Payload ID: 1114
  Gene Symbol: ANKRD13C
  Gene Name: ankyrin repeat domain 13C
  Uniprot ID: Q8N6S4
  ENST ID: ENST00000370944
  CDS Start-End: 315-1940
gagcaagaggaagatggccgtgccctgtttttcggtgtaaggcagcgacggcggctgcgacggcgagactgagatcctggtgtcgtgggcacctgagttctagcttcccccagcgagcgcgcgtcccttcgtgcctaggcgagagccggctcttccccgggagatgcgtttgtcccaggctcgggggctcagtgggagttcatgctgcgctggaggctcttggccaccgctctaatcgccttgtgccgccgcagcgccagctccgtcgccagcggtgagcctcccgattcccccccttgcccctggcggcggcgatgaccggggagaagatccgctcactgcggagggaccacaagcccagcaaagaagaaggggacctgctggagcccggggatgaggaagcggcggctgccctcggcggtacctttaccagaagcaggattggcaagggcggcaaagcttgtcataagatcttcagtaaccatcaccaccggctacagctgaaggcagctccggcctcctccaatccccccggcgccccggctctgccgctgcacaattcctccgtgactgccaactcccagtccccggcccttctggccggcaccaaccccgttgctgtcgtcgcggatggaggcagttgccccgcacactacccggtgcacgagtgcgtcttcaagggggatgtgaggagactctcctctctcatccgcacgcacaatatcgggcagaaagataatcacggaaatactcctttacaccttgctgtgatgttaggaaataaagaatgtgcccatttacttttggctcacaatgctccagtcaaggtgaaaaatgctcagggatggagccctctggcggaagccatcagctatggagataggcagatgattacagctcttttgaggaagcttaagcagcaatccagggaaagtgttgaagaaaaacgacctcgattattaaaagccctgaaagagctaggtgacttttatctagaacttcactgggattttcaaagctgggtgcctttactttcccgaattctgccttccgatgcatgtaaaatatacaaacaaggtatcaatatcaggcttgacacaactctcatagactttactgacatgaagtgccaacgaggggatctaagcttcattttcaatggggatgcggcgccctctgaatcttttgtagtattagacaatgaacaaaaagtttatcagcgaatacatcatgaggaatcagagatggaaacagaagaagaggtggatattttaatgagcagtgatatttactctgcaactttatcaacaaaatcaatttctttcacgcgtgcccagacaggatggctttttcgggaagataaaacagaaagagtaggaaactttttggcagacttttacctggtgaatggacttgttttagaatcaaggaaaagaagagaacatctcagtgaagaggatattcttcgaaataaggccatcatggagagtttgagtaaaggtggaaacataatggaacagaattttgagccgattcgaagacagtctcttacacctcctcctcagaacactattacatgggaagaatatatatctgctgaaaatggaaaagctcctcatctgggtagagaattggtgtgcaaagagagtaagaaaacgtttaaagctacgatagccatgagccaggaatttcccttagggatagagttattattgaatgttttagaagtagtagctcccttcaagcactttaacaagcttagagaatttgttcagatgaagcttcctccaggctttcctgtaaaattagatatacctgtgtttcccacaatcacagccactgtgacttttcaggagtttcgatacgatgaatttgatggctccatctttactatacctgatgactacaaggaagacccaagccgttttcctgatctttaactgacgtggaaaaggatgccgtctaaccaaggaaagaaaatacagagaccctagaagtggatccaaatagaagggacaaatgctttcagtgaagaaaagggaattacacattgaatcgacacatcagtaatacgatacagtgaaatgggcctctaataagaatttcagcgagttttctgatgtgccattttttgtctttttaaaaatatacatattataaatgtaatagtttgacacattaatgaccctaagacctgcgtatgtgaagcagctatgagtgctgtgatttgtttttaaaaatttttacacttcttgttgaaatatatatgcatataaatatatctatatctatatctatatctaaaacactcctggaccattaacgtaaattaaatgtcttaagagatatggagcccttttaaacttgtcatctttatgcaaggtgacatttataaatattccttcgagctttgttttcataaaatgtaaactatgtaacattatgtatagttcagtaatttgaatgtttgttcaatataatgaactagaaggaatgcaattttctgtagatgaatgaaccaaatggtaaccattaaacaattgcatttatatgttgcaatacatttcagaaggagcgttcactctgcagggaataaggtacctcctttagcaccttagtgcaattcattgtggtgctatttgtttttacctgaatgtttgttactaatcttcctttcatagaacctctattttttttttttctaaacttgagtttgagtccttgttatggtcatcataaggtaatggttagcatgtttaaagatattcctcttccaaatctcagcactttaaaaaaaaatccaaatttttaaacttgcttcctaataagtacacatcggtctgattattttgtttgtttttagtagaatatggatgcattggtgtcagttttaaaaaacaatacacatattttggacaaccctacatatttaatcctttcaaaataagataaaaacattttatatgctaacagaatatatttgttacaagttaaagtccagaagtatacacaagattgattactcctattattttttttaaatcacaggaaaatattgatttcattgtctccaaagtgataaaatcatgtattactcatttttgcacttaaaatttttcttatttattccaaggtggtttgaaggtccaagtatgaaaataaattagggggattaatgtataacagttataaagtatcatgttgtattaaagagcttacttagattgatgtttttaaaatgtatcctgatgaatgtctcaagaatgcatctgtcaagttttttagactgaccagtagcttaaacttttttcaggattttaggtaatttgaaaggagtttagagacccttattgaaaatatgatttaaaaatccaaagcataaaccgtaagaaaaattttaaataaacatctttaaagctgcatcttccatactgatacatgcattgcgtatgttgacattaaatacattttataatgaagaaaaataatcatagtaaaaaattgaaagacctaattactacgttacatggacctattgaattttgggggaacgtgttagtaaacccagactagctttgttgaatagaagttgatcgctgttatttaggaaatgggtagatcaaatgacttagagactgaattatcctatcagtggttacatggggttggagacactgaaaggcagtgatcactgttgcttctaggctcccttactttgtaggaatatggtatactttcaggaatatgctatatatgttttcataagtacagacaccttagggaagaaaaaaagtgggtaattgaagcttatggttgattaatttcctaacagcacagctatgaatattttgctggggtacactggaggtaggaagactactggaaatttttgcacttgaattttgtttttaaagcttttttctttaaagaatggtagaaacagattatccattccaaaatgtcttttctctgatcacaaagagcaaacaaatgtcaatatctcttatgatggtgaaaaaaaggaattaatcgatgcaaataaacttttcacagtattacttttaatgaa

SEQ ID NO: 107610 - DNA, 1567 bp, Homo sapiens
  Payload ID: 1115
  Gene Symbol: ANKRD16
  Gene Name: ankyrin repeat domain 16
  Uniprot ID: Q6P6B7
  ENST ID: ENST00000191063
  CDS Start-End: 553-1467
ggggctggaggctggggcggccctgaggacgcgtgcggggcaggtcacgcttgggcctggctgcctcaggagccaccctgcacggcgccgggcgaggctgtgcgcgccctcccggaccctccactttggggctttgcggtgtagcggcgcgccccactcccttacgtgttcagtcccgaatcacgtacgggccgctgcagctccaggacggcggacgccagcgctctcggatccccaggcccctccgtgctcatcccggaccgctccgtccctgaggaaaaaccgccccgtgcccggaaccgcggcttctcccacgcggggcaggccggggctgtgagggggcagcccgcctgcggactaggccgggggtttgaggaggcggctctgccggggacaaagccgggggcgtgaggggcggttctgccgggttcggggcgcgcggggcaggttgcgtgaagaggcggaaagtcccactcgccctcggcttctccctgcccggccgccggtgtcccgcccgccgcctccccgcgcagcccggcccgacccgcggcgatggcccagcccggggacccgcggcgcctctgcaggctggtgcaggagggccggctgcgcgccctgaaggaggagctgcaggcggccgggggctgcccggggccggccggggataccctcctgcactgcgccgcgcgccacgggcatcgggacgtgctggcctatctggccgaggcctggggcatggacatcgaggccaccaaccgagactacaagcggcctctgcacgaggcggcctccatgggccaccgagactgcgtgcgctacctgctgggccggggggcagcggtcgactgcctgaagaaggccgactggactcctctgatgatggcctgcacaaggaagaacctgggggtgatccaggagctggtggaacatggcgccaatccactcctgaagaacaaagatggctggaacagtttccacattgccagtcgagaaggcgaccctctgatcctccagtacctgctcactgtttgcccaggtgcctggaagacagagagcaaaattagaaggactcctctgcatactgcagcaatgcatggccatttggaggcagtcaaggtgcttcttaagaggtgccaatatgaaccagactacagagacaactgtggcgtcaccgccttgatggacgcaatccagtgtgggcacatcgacgtcgctaggctgctcctcgatgaacatggggcttgcctttcagcagaagacagcctgggtgcccaggctctgcacagggcagctgtcacagggcaggacgaagccatccgattcttggtctctgaacttggcgtcgatgtagatgtgagagccacatcaacccacctcacagcacttcattatgcagctaagccctgcatctggcctgtgcaggtcagcacttggcctgtgccaagtttctcctgcagtcgggactgaaggattctgaagacatcacgggcaccctggctcagcagctcccaaggagagcagatgtccttcagggctctggccatagcgcaatgacataaggatgttt

SEQ ID NO: 107611 - DNA, 1646 bp, Homo sapiens
  Payload ID: 1115
  Gene Symbol: ANKRD16
  Gene Name: ankyrin repeat domain 16
  Uniprot ID: Q6P6B7
  ENST ID: ENST00000380092
  CDS Start-End: 518-1603
cggggcaggtcacgcttgggcctggctgcctcaggagccaccctgcacggcgccgggcgaggctgtgcgcgccctcccggaccctccactttggggctttgcggtgtagcggcgcgccccactcccttacgtgttcagtcccgaatcacgtacgggccgctgcagctccaggacggcggacgccagcgctctcggatccccaggcccctccgtgctcatcccggaccgctccgtccctgaggaaaaaccgccccgtgcccggaaccgcggcttctcccacgcggggcaggccggggctgtgagggggcagcccgcctgcggactaggccgggggtttgaggaggcggctctgccggggacaaagccgggggcgtgaggggcggttctgccgggttcggggcgcgcggggcaggttgcgtgaagaggcggaaagtcccactcgccctcggcttctccctgcccggccgccggtgtcccgcccgccgcctccccgcgcagcccggcccgacccgcggcgatggcccagcccggggacccgcggcgcctctgcaggctggtgcaggagggccggctgcgcgccctgaaggaggagctgcaggcggccgggggctgcccggggccggccggggataccctcctgcactgcgccgcgcgccacgggcatcgggacgtgctggcctatctggccgaggcctggggcatggacatcgaggccaccaaccgagactacaagcggcctctgcacgaggcggcctccatgggccaccgagactgcgtgcgctacctgctgggccggggggcagcggtcgactgcctgaagaaggccgactggactcctctgatgatggcctgcacaaggaagaacctgggggtgatccaggagctggtggaacatggcgccaatccactcctgaagaacaaagatggctggaacagtttccacattgccagtcgagaaggcgaccctctgatcctccagtacctgctcactgtttgcccaggtgcctggaagacagagagcaaaattagaaggactcctctgcatactgcagcaatgcatggccatttggaggcagtcaaggtgcttcttaagaggtgccaatatgaaccagactacagagacaactgtggcgtcaccgccttgatggacgcaatccagtgtgggcacatcgacgtcgctaggctgctcctcgatgaacatggggcttgcctttcagcagaagacagcctgggtgcccaggctctgcacagggcagctgtcacagggcaggacgaagccatccgattcttggtctctgaacttggcgtcgatgtagatgtgagagccacatcaacccacctcacagcacttcattatgcagctaaggaaggacatacaagtacaattcagactctcttatccttgggagctgacatcaattctaaagatgaaaaaaatcgatcagccctgcatctggcctgtgcaggtcagcacttggcctgtgccaagtttctcctgcagtcgggactgaaggattctgaagacatcacgggcaccctggctcagcagctcccaaggagagcagatgtccttcagggctctggccatagcgcaatgacataaggatgtttccaagaggaggcaataaagtgcatggtaattcata

SEQ ID NO: 107612 - DNA, 2738 bp, Homo sapiens
  Payload ID: 1115
  Gene Symbol: ANKRD16
  Gene Name: ankyrin repeat domain 16
  Uniprot ID: Q6P6B7
  ENST ID: ENST00000380094
  CDS Start-End: 545-1630
aggctggggcggccctgaggacgcgtgcggggcaggtcacgcttgggcctggctgcctcaggagccaccctgcacggcgccgggcgaggctgtgcgcgccctcccggaccctccactttggggctttgcggtgtagcggcgcgccccactcccttacgtgttcagtcccgaatcacgtacgggccgctgcagctccaggacggcggacgccagcgctctcggatccccaggcccctccgtgctcatcccggaccgctccgtccctgaggaaaaaccgccccgtgcccggaaccgcggcttctcccacgcggggcaggccggggctgtgagggggcagcccgcctgcggactaggccgggggtttgaggaggcggctctgccggggacaaagccgggggcgtgaggggcggttctgccgggttcggggcgcgcggggcaggttgcgtgaagaggcggaaagtcccactcgccctcggcttctccctgcccggccgccggtgtcccgcccgccgcctccccgcgcagcccggcccgacccgcggcgatggcccagcccggggacccgcggcgcctctgcaggctggtgcaggagggccggctgcgcgccctgaaggaggagctgcaggcggccgggggctgcccggggccggccggggataccctcctgcactgcgccgcgcgccacgggcatcgggacgtgctggcctatctggccgaggcctggggcatggacatcgaggccaccaaccgagactacaagcggcctctgcacgaggcggcctccatgggccaccgagactgcgtgcgctacctgctgggccggggggcagcggtcgactgcctgaagaaggccgactggactcctctgatgatggcctgcacaaggaagaacctgggggtgatccaggagctggtggaacatggcgccaatccactcctgaagaacaaagatggctggaacagtttccacattgccagtcgagaaggcgaccctctgatcctccagtacctgctcactgtttgcccaggtgcctggaagacagagagcaaaattagaaggactcctctgcatactgcagcaatgcatggccatttggaggcagtcaaggtgcttcttaagaggtgccaatatgaaccagactacagagacaactgtggcgtcaccgccttgatggacgcaatccagtgtgggcacatcgacgtcgctaggctgctcctcgatgaacatggggcttgcctttcagcagaagacagcctgggtgcccaggctctgcacagggcagctgtcacagggcaggacgaagccatccgattcttggtctctgaacttggcgtcgatgtagatgtgagagccacatcaacccacctcacagcacttcattatgcagctaaggaaggacatacaagtacaattcagactctcttatccttgggagctgacatcaattctaaagatgaaaaaaatcgatcagccctgcatctggcctgtgcaggtcagcacttggcctgtgccaagtttctcctgcagtcgggactgaaggattctgaagacatcacgggcaccctggctcagcagctcccaaggagagcagatgtccttcagggctctggccatagcgcaatgacataaggatgtttccaagaggaggcaataaagtgcatgagttgctgggagcctgagcacctttcgtttttcggctcagagaaagccaagtgcaacttgcttcagtcatcctgaacctgagttcaaccaaccgcagccacctacgtttgaccccagcgagatcaaagttgtatatctgaggtgtaccagtggtgaagtcagtgccacatctgcactggcccccaaggtcagctccctgggtctgtctccaaaaatggttgctgatgacatcaccaaccattgactggaagagtctgaggatgatagtgaaactgaccagccacagcagacaggcccagattgaggtggtgccttctgcctctgccctgatcgtcacaaccctcaggaaccaccgacagaaagaaagaaacacaaaaacatgaaacacagtggtagcaccacttctgatgagattgtcaacattgcctaacagatgcagcagcagtctttagccagagaactctctggaaccattaaagaattcctgggggccggttgcggtggctcatgcctgtaatcccagcactttgggaggccgaggcgggaggatcatgaggtcaggagatcgagaccatcctggctaacgtggtgaaaccccgtctcttactaaaaatacaaaaaaattagccaggcatggtggtgggcgcctgtagtcccagctactcaggaggctgaggcaggagaatgctgtgaaccctggaggcagagcttgcagtgagccgaatatgcgccactgcactccagcctgggcaacagagcaagactccgtctccaaaaaaaaaaaaaaaaaaaaagaattcctggggcctgcccagtctgtgagctgccatgttgatagtatcacagatgataccaacagtgaagctgtggaatgcccagctagttaaagaatgcaaaggaaaatattttcacaaagggttatctgataaccaaaaaaaaaaaagacatttcatctaagccacttaacaccgtgtctgatgtgtagtaaataataaatgtcaatgattctcaaagaacccaggaatagaaaaagcatttaataaaaattagctcttggcataatctcttcatccac

SEQ ID NO: 107613 - DNA, 7734 bp, Homo sapiens
  Payload ID: 1116
  Gene Symbol: ANKRD17
  Gene Name: ankyrin repeat domain 17
  Uniprot ID: O75179
  ENST ID: ENST00000330838
  CDS Start-End: 131-7189
agtagaggtgaccgaggcggtggcggcggaggcggcaccgattgctgtgtcggccccagtgcggccgaagtcgcggtagagcgtagccccacgcccctcccccgtccgcgccctccctctttccctggggatggagaaggcgacggttccggtggcggcggcgacggctgcagaaggagaagggagccccccggcggtggcggctgtggcgggcccccccgcggcggcggaggtcggcggcggcgttggcggcagcagcagagctcgctcggcctcgtctcctcgtgggatggtgcgagtctgcgacctgctcctgaagaagaagccgccgcagcagcagcaccacaaggccaagcgtaaccggacttgccgaccccccagcagcagcgaaagcagcagcgacagcgacaacagcggcggcggtggaggcggcggtggaggcggaggtggcggcggcggcaccagcagtaacaacagcgaggaagaagaggacgacgacgacgaggaagaggaggtttctgaggtggagtctttcattttggatcaggatgatttggaaaatccaatgctggaaacagcttccaagttgctcttatcaggtactgctgatggtgcagacctcaggacagtagatccagaaacacaggctagactggaagctttactagaagctgcaggaataggaaaattgtccacggctgatggtaaagcctttgcagatcctgaagtacttcggaggttgacatcgtctgttagttgtgcgttggatgaagctgctgctgcacttacccgtatgagagctgaaagcacagcaaatgcagggcagtcggacaaccgcagtttggcagaagcctgttcagaaggagatgtaaatgctgtgcgaaagttactcattgaagggcgaagtgtaaatgaacacacagaggaaggggagagcctcctttgtttagcttgttctgctggatactatgagcttgcacaggttttgttggcaatgcatgcaaatgtggaagataggggaatcaaaggtgacattacacctttaatggctgctgctaatggaggacatgtcaaaattgtgaagttgctgctagctcataaagcagatgttaatgcacagtcttcaacaggcaatacagcacttacatatgcttgtgctggaggctatgtagatgttgtaaaggtgctcttggaatccggtgctagtattgaggaccataatgaaaatggtcatacccctcttatggaagctggaagtgctggacatgtggaagtagccagattgctgctagaaaatggggctggcattaatacgcattctaatgaatttaaagagagtgcccttaccttagcttgttacaaaggacacttagagatggtgcgatttcttttggaagcaggcgcggatcaagagcataaaacagatgaaatgcacactgctctgatggaggcttgcatggatggccatgttgaagtagctaggttacttcttgacagcggtgcccaagtgaacatgcctgctgattcatttgagtcaccattaactttggctgcatgtggtgggcatgtggaacttgcggctttacttattgaaagaggagctagcctggaagaggtcaatgatgaaggttatacaccattgatggaagcagctcgagaaggacatgaagaaatggtggcattacttcttggtcaaggagcaaatatcaatgcacagacagaagaaactcaagaaactgccttgactctggcttgctgtggaggctttctggaagtggcagactttctaattaaggcaggagccgatatagaactagggtgttctacccctttaatggaagctgctcaagagggtcatttggagttagttaaatacttattagctgcaggagctaacgttcatgcaacaacagcaacaggggatacagcactaacatatgcctgtgaaaatggtcatactgatgtagcagatgtcttacttcaggcaggcgcagatctggaacatgaatctgaaggtggaagaactcctttaatgaaagctgcaagagctggtcatgtttgtactgttcagttcttaattagtaaaggagcgaatgtgaatagaaccacagctaataatgaccatactgtactgtccctggcttgtgcagggggtcatctggcagtggtggaactacttttggctcatggggcagatcctactcaccgtttgaaagatggctcaactatgttgatagaagcagcaaaaggtggccatacaagtgttgtttgctatctcttggattatcctaataacttgctttcagcccctccaccagatgtcactcagttaactcccccatcccacgatttaaatagggctcctcgtgtaccagttcaagcactgcccatggttgttccacctcaggagcctgacaaaccacctgccaatgttgccaccactcttcccatcaggaataaagcagtcagtggaagagcatctgcaatgtcaaacactcctacccacagtattgctgcatccatttcccaacctcagactccaactccaagtcctatcatctctccttcagccatgcttcctatctaccctgccattgatattgatgcacagactgagagtaatcatgacacggcactaacacttgcctgtgctggtggccacgaggaactggtacaaacactgctagagagaggagctagtatagagcaccgagacaagaaaggttttactccactcatcttggctgccacagctggtcatgttggtgttgtggaaatattgctggacaatggtgcagacattgaagcccagtctgaaagaaccaaggacacaccactctccttggcttgttctgggggaagacaggaggtggtggagctattgttagctcgaggggcaaataaagagcacaggaatgtttctgattacacacctctaagtctggctgcttctggtggctatgtgaacatcatcaaaatattactaaatgcaggagctgagattaactctagaactggtagcaaattgggcatctctcctctgatgttagcagctatgaatgggcatacagctgctgttaagctcctgttagacatgggctctgacataaatgctcagatagaaaccaatcggaacactgcccttactttagcctgcttccaaggaagaactgaagtggttagtcttctgcttgatagaaaagcaaatgttgaacacagagctaagactggtctcacaccactaatggaagctgcctctggtggatatgcggaggtgggccgagttcttttggataaaggtgctgatgttaatgcccctccagttccctcctcaagagatacagctttaaccatagcagcagataaagggcattacaaattctgtgagcttcttattggcaggggagctcatattgatgtacgtaacaagaaggggaacactccattgtggctagcagcaaatggtggacacctcgatgtggttcagttactggtgcaagcaggtgcagatgtggatgcagcagataaccgcaagataactcctcttatggcagcatttagaaagggtcatgtgaaggtggtgcgctacttagtcaaagaagtcaatcagtttccatcagattctgaatgtatgagatacatagcaaccatcactgataaggagatgctgaagaagtgtcatctttgtatggagtcaatagtacaagccaaagatagacaggctgctgaagcaaacaaaaacgccagcattttgttagaggagttagacttggaaaagttaagggaagaaagtcggaggctggctttggctgcgaaaagagaaaaaagaaaagagaagagaaggaagaaaaaggaagaacaaagaaggaaactagaagaaattgaagccaaaaataaagagaactttgaactccaagctgctcaagaaaaagaaaagcttaaagttgaagatgagcctgaagtcttgacagaacctccaagtgccacaaccactactaccataggtatatctgcaacctggacaactttggcaggttctcatggtaaaagaaataataccataactacaaccagttcaaagaggaaaaacaggaaaaataaaattactccagaaaacgttcaaattatatttgatgatccactaccaatttcatacagtcagccagagaaggtgaatggagagtccaagagcagcagtaccagcgagagtggggacagtgataacatgaggatttccagctgcagcgatgaaagtagtaacagcaacagcagtcgtaagagtgacaatcattcaccagctgtggtcactaccactgtgagcagcaaaaagcagccatcagttcttgttacatttccaaaggaagagagaaaatctgtttctggcaaggcttcaataaaattgtcagaaactatcagtgaagggaccagtaattctctatctacttgtacaaaatctggtccatctcccctttcttctccaaatgggaagttaacagtagcaagtcctaagcgtgggcaaaagagggaagaaggatggaaagaagttgtaagaaggtcaaagaaagtatctgttccatcaactgtgatatccagagtgattggaagaggaggctgtaatatcaatgctattcgggagtttactggtgcacacatagatattgataaacagaaagacaagactggagaccggataatcactataaggggtggcactgaatcaacaagacaagcaactcaattgattaatgctttgatcaaggatccagacaaagaaattgatgaacttattccaaagaatcgtttgaaaagctcctcagcaaattccaaaatagggtcatcagcacctaccaccactgctgctaacacttccttaatgggaattaaaatgacaactgtagctctgtcatcaacatctcaaactgccacagcactcactgtgcctgcaatttcttctgcatccactcacaaaaccattaagaacccagtgaataatgtgaggcctggttttccagtttctcttccattagcatatcctcctccacagtttgcacatgctttgcttgctgctcagactttccagcagatccgtccaccaaggttgcccatgacccactttggaggtacttttccaccagctcaatccacttggggtccgtttcctgtcaggcctttgagccctgccagagctactaactcgcctaagcctcacatggtgcctcgccatagcaatcagaatagcagtggttctcaggtgaattcagcaggttctttaacttcaagcccaacaactacaaccagttcatcagcttcaacggtgcctggtacatctacaaatggcagtccaagttcaccttctgtccgaaggcagctttttgtcacagttgtgaagacatccaatgccaccacaacaacagtcacaaccacggcaagcaacaacaacactgcacccacaaatgccacatatcctatgcctactgccaaagaacactatccagtatcatccccatcttccccatcaccaccagcccagccaggaggggtttctagaaacagccctttggattgtggatcagcatctccaaataaagtggcatcttcctccgaacaggaagcaggtagtccaccagtagtagaaacaacaaacactagacctccaaacagcagcagttcttctgggagttcatcagctcattctaatcagcaacaacctccgggatctgtttctcaggaaccaagaccacctcttcagcagtctcaggttcctcccccggaagttagaatgactgttcctcctttagcaacaagttctgctccagtggcggtgccttctactgccccagtgacttaccctatgcctcagacaccaatgggatgcccccagcctactcctaaaatggaaacccctgctattagaccaccccctcatggcacaactgcccctcacaagaattcagcttcagtgcaaaattcatctgttgcagtcctcagtgtcaatcacattaaaagacctcacagtgttccctcttctgtccagctaccttcgaccttaagtacacaaagtgcttgtcagaattcagtacatccagcaaataagcctattgctcccaatttcagtgcccccttaccatttgggccctttagcacattgtttgaaaacagccctacttctgctcatgccttctggggaggatctgttgtttcatctcagtcaacaccagaatctatgctatcaggaaaatcctcatatttgccaaattcagatcctttacatcagtctgatacttccaaagctccaggttttagaccaccattacagagacctgctccaagtccctcaggtattgtcaatatggactcgccatatggttctgtaacaccttcttcaacacatttgggaaactttgcttcaaacatttcaggaggtcagatgtacggacctggggcaccccttggaggagcacccgcagctgctaactttaacagacaacatttttccccgcttagtttgttgactccgtgttcatcagcatcaaatgattcttctgcacagtcagtatcctcgggagttcgtgcaccatctcctgccccatcatcagtaccgttagggtcagaaaagcccagcaatgtgtctcaggacaggaaagttccagtccctattgggactgaacgttctgcacgtatcaggcaaactggaacgtcagctccatctgttattgggagcaatttgtctacatcagtaggacatagtggcatctggtcctttgaagggattggtggcaatcaagacaaagtagactggtgtaaccctgggatgggaaatcctatgatccacagaccgatgtctgacccaggagtattttcacaacatcaagcaatggagcgagatagtacaggaattgtaactccttctggtacattccatcagcatgttcctgcaggctacatggactttcctaaagttgggggtatgcctttttctgtgtatgggaatgcaatgattcctccagtagcacctatccctgatggtgctggaggacccatatttaatggccctcatgctgcagacccttcttggaactcactgataaagatggtttccagctccacggaaaataatggccctcaaacggtgtggactggaccctgggcacctcacatgaacagtgtgcatatgaaccagcttggctgatgaggatcagcttgttagcctgcagattccttttcatttggaggaaatcacaagtggccgaaaaaaaaaattatgctcccaaatcattctactgatgtgcttgactgaagtgtgtaggctttttgcagaagatcttactaactgacctattttctgtgaacatttgtgactgcccattccccatcatcatccgttttaccttagttagcatttttcttatcatttttctttttttctttccctcttcccctttggacataactttctgttgaagctgttctttggctggttggttttagtactgtaaactgcttctgagcaaacacggaaatttagcaaaattatgtaaacttgatcctgaagttttagaatggcaaataaatgtacaattgtttacataacagaaaaggctaagcagaaagtaaatttcaatatgtcagtatagaggctctactttatgtagacttaaattaatgtgagatatgtaccttcatattcagaaatctggatgtttccttcatacattaaactattaataagcataa

SEQ ID NO: 107614 - DNA, 10784 bp, Homo sapiens
  Payload ID: 1116
  Gene Symbol: ANKRD17
  Gene Name: ankyrin repeat domain 17
  Uniprot ID: O75179
  ENST ID: ENST00000358602
  CDS Start-End: 118-7929
gaggcggtggcggcggaggcggcaccgattgctgtgtcggccccagtgcggccgaagtcgcggtagagcgtagccccacgcccctcccccgtccgcgccctccctctttccctggggatggagaaggcgacggttccggtggcggcggcgacggctgcagaaggagaagggagccccccggcggtggcggctgtggcgggcccccccgcggcggcggaggtcggcggcggcgttggcggcagcagcagagctcgctcggcctcgtctcctcgtgggatggtgcgagtctgcgacctgctcctgaagaagaagccgccgcagcagcagcaccacaaggccaagcgtaaccggacttgccgaccccccagcagcagcgaaagcagcagcgacagcgacaacagcggcggcggtggaggcggcggtggaggcggaggtggcggcggcggcaccagcagtaacaacagcgaggaagaagaggacgacgacgacgaggaagaggaggtttctgaggtggagtctttcattttggatcaggatgatttggaaaatccaatgctggaaacagcttccaagttgctcttatcaggtactgctgatggtgcagacctcaggacagtagatccagaaacacaggctagactggaagctttactagaagctgcaggaataggaaaattgtccacggctgatggtaaagcctttgcagatcctgaagtacttcggaggttgacatcgtctgttagttgtgcgttggatgaagctgctgctgcacttacccgtatgagagctgaaagcacagcaaatgcagggcagtcggacaaccgcagtttggcagaagcctgttcagaaggagatgtaaatgctgtgcgaaagttactcattgaagggcgaagtgtaaatgaacacacagaggaaggggagagcctcctttgtttagcttgttctgctggatactatgagcttgcacaggttttgttggcaatgcatgcaaatgtggaagataggggaatcaaaggtgacattacacctttaatggctgctgctaatggaggacatgtcaaaattgtgaagttgctgctagctcataaagcagatgttaatgcacagtcttcaacaggcaatacagcacttacatatgcttgtgctggaggctatgtagatgttgtaaaggtgctcttggaatccggtgctagtattgaggaccataatgaaaatggtcatacccctcttatggaagctggaagtgctggacatgtggaagtagccagattgctgctagaaaatggggctggcattaatacgcattctaatgaatttaaagagagtgcccttaccttagcttgttacaaaggacacttagagatggtgcgatttcttttggaagcaggcgcggatcaagagcataaaacagatgaaatgcacactgctctgatggaggcttgcatggatggccatgttgaagtagctaggttacttcttgacagcggtgcccaagtgaacatgcctgctgattcatttgagtcaccattaactttggctgcatgtggtgggcatgtggaacttgcggctttacttattgaaagaggagctagcctggaagaggtcaatgatgaaggttatacaccattgatggaagcagctcgagaaggacatgaagaaatggtggcattacttcttggtcaaggagcaaatatcaatgcacagacagaagaaactcaagaaactgccttgactctggcttgctgtggaggctttctggaagtggcagactttctaattaaggcaggagccgatatagaactagggtgttctacccctttaatggaagctgctcaagagggtcatttggagttagttaaatacttattagctgcaggagctaacgttcatgcaacaacagcaacaggggatacagcactaacatatgcctgtgaaaatggtcatactgatgtagcagatgtcttacttcaggcaggcgcagatctggaacatgaatctgaaggtggaagaactcctttaatgaaagctgcaagagctggtcatgtttgtactgttcagttcttaattagtaaaggagcgaatgtgaatagaaccacagctaataatgaccatactgtactgtccctggcttgtgcagggggtcatctggcagtggtggaactacttttggctcatggggcagatcctactcaccgtttgaaagatggctcaactatgttgatagaagcagcaaaaggtggccatacaagtgttgtttgctatctcttggattatcctaataacttgctttcagcccctccaccagatgtcactcagttaactcccccatcccacgatttaaatagggctcctcgtgtaccagttcaagcactgcccatggttgttccacctcaggagcctgacaaaccacctgccaatgttgccaccactcttcccatcaggaataaagctgcttctaaacaaaagtccagcagccatttgccagcaaacagccaggatgtacagggttacatcaccaatcagtctccagagagcattgtagaagaggctcagggaaagttaacagaactggaacagaggataaaagaagccatagaaaagaatgcacagctgcagtccttggaactggctcatgctgaccaacttaccaaggagaagatcgaggagctcaacaaaacaagggaggaacaaattcagaagaaacaaaagattttggaggaactacagaaagtagaacgagagttacaactgaaaactcagcagcagctaaaaaagcagtatctagaggttaaagctcaaagaattcaacttcagcaacagcagcaacagtcttgccaacacctgggattactaactcctgttggagttggagagcagctttctgagggagactatgcacggttacagcaagtggatcctgttttacttaaagatgaaccccagcagactgctgctcagatgggttttgcgccaatccagcctctggcgatgcctcaagctttgcctctggcggcaggtcccttgcctccagggtccatcgcaaatcttacagaactgcaaggagtgatagttggacagccagtactgggccaagcacagttggcagggctggggcaaggaattctgacagaaacacaacaagggttaatggtagccagccctgctcagaccctcaatgacacgctggatgacatcatggcagcagtcagtggaagagcatctgcaatgtcaaacactcctacccacagtattgctgcatccatttcccaacctcagactccaactccaagtcctatcatctctccttcagccatgcttcctatctaccctgccattgatattgatgcacagactgagagtaatcatgacacggcactaacacttgcctgtgctggtggccacgaggaactggtacaaacactgctagagagaggagctagtatagagcaccgagacaagaaaggttttactccactcatcttggctgccacagctggtcatgttggtgttgtggaaatattgctggacaatggtgcagacattgaagcccagtctgaaagaaccaaggacacaccactctccttggcttgttctgggggaagacaggaggtggtggagctattgttagctcgaggggcaaataaagagcacaggaatgtttctgattacacacctctaagtctggctgcttctggtggctatgtgaacatcatcaaaatattactaaatgcaggagctgagattaactctagaactggtagcaaattgggcatctctcctctgatgttagcagctatgaatgggcatacagctgctgttaagctcctgttagacatgggctctgacataaatgctcagatagaaaccaatcggaacactgcccttactttagcctgcttccaaggaagaactgaagtggttagtcttctgcttgatagaaaagcaaatgttgaacacagagctaagactggtctcacaccactaatggaagctgcctctggtggatatgcggaggtgggccgagttcttttggataaaggtgctgatgttaatgcccctccagttccctcctcaagagatacagctttaaccatagcagcagataaagggcattacaaattctgtgagcttcttattggcaggggagctcatattgatgtacgtaacaagaaggggaacactccattgtggctagcagcaaatggtggacacctcgatgtggttcagttactggtgcaagcaggtgcagatgtggatgcagcagataaccgcaagataactcctcttatggcagcatttagaaagggtcatgtgaaggtggtgcgctacttagtcaaagaagtcaatcagtttccatcagattctgaatgtatgagatacatagcaaccatcactgataaggagatgctgaagaagtgtcatctttgtatggagtcaatagtacaagccaaagatagacaggctgctgaagcaaacaaaaacgccagcattttgttagaggagttagacttggaaaagttaagggaagaaagtcggaggctggctttggctgcgaaaagagaaaaaagaaaagagaagagaaggaagaaaaaggaagaacaaagaaggaaactagaagaaattgaagccaaaaataaagagaactttgaactccaagctgctcaagaaaaagaaaagcttaaagttgaagatgagcctgaagtcttgacagaacctccaagtgccacaaccactactaccataggtatatctgcaacctggacaactttggcaggttctcatggtaaaagaaataataccataactacaaccagttcaaagaggaaaaacaggaaaaataaaattactccagaaaacgttcaaattatatttgatgatccactaccaatttcatacagtcagccagagaaggtgaatggagagtccaagagcagcagtaccagcgagagtggggacagtgataacatgaggatttccagctgcagcgatgaaagtagtaacagcaacagcagtcgtaagagtgacaatcattcaccagctgtggtcactaccactgtgagcagcaaaaagcagccatcagttcttgttacatttccaaaggaagagagaaaatctgtttctggcaaggcttcaataaaattgtcagaaactatcagtgaagggaccagtaattctctatctacttgtacaaaatctggtccatctcccctttcttctccaaatgggaagttaacagtagcaagtcctaagcgtgggcaaaagagggaagaaggatggaaagaagttgtaagaaggtcaaagaaagtatctgttccatcaactgtgatatccagagtgattggaagaggaggctgtaatatcaatgctattcgggagtttactggtgcacacatagatattgataaacagaaagacaagactggagaccggataatcactataaggggtggcactgaatcaacaagacaagcaactcaattgattaatgctttgatcaaggatccagacaaagaaattgatgaacttattccaaagaatcgtttgaaaagctcctcagcaaattccaaaatagggtcatcagcacctaccaccactgctgctaacacttccttaatgggaattaaaatgacaactgtagctctgtcatcaacatctcaaactgccacagcactcactgtgcctgcaatttcttctgcatccactcacaaaaccattaagaacccagtgaataatgtgaggcctggttttccagtttctcttccattagcatatcctcctccacagtttgcacatgctttgcttgctgctcagactttccagcagatccgtccaccaaggttgcccatgacccactttggaggtacttttccaccagctcaatccacttggggtccgtttcctgtcaggcctttgagccctgccagagctactaactcgcctaagcctcacatggtgcctcgccatagcaatcagaatagcagtggttctcaggtgaattcagcaggttctttaacttcaagcccaacaactacaaccagttcatcagcttcaacggtgcctggtacatctacaaatggcagtccaagttcaccttctgtccgaaggcagctttttgtcacagttgtgaagacatccaatgccaccacaacaacagtcacaaccacggcaagcaacaacaacactgcacccacaaatgccacatatcctatgcctactgccaaagaacactatccagtatcatccccatcttccccatcaccaccagcccagccaggaggggtttctagaaacagccctttggattgtggatcagcatctccaaataaagtggcatcttcctccgaacaggaagcaggtagtccaccagtagtagaaacaacaaacactagacctccaaacagcagcagttcttctgggagttcatcagctcattctaatcagcaacaacctccgggatctgtttctcaggaaccaagaccacctcttcagcagtctcaggttcctcccccggaagttagaatgactgttcctcctttagcaacaagttctgctccagtggcggtgccttctactgccccagtgacttaccctatgcctcagacaccaatgggatgcccccagcctactcctaaaatggaaacccctgctattagaccaccccctcatggcacaactgcccctcacaagaattcagcttcagtgcaaaattcatctgttgcagtcctcagtgtcaatcacattaaaagacctcacagtgttccctcttctgtccagctaccttcgaccttaagtacacaaagtgcttgtcagaattcagtacatccagcaaataagcctattgctcccaatttcagtgcccccttaccatttgggccctttagcacattgtttgaaaacagccctacttctgctcatgccttctggggaggatctgttgtttcatctcagtcaacaccagaatctatgctatcaggaaaatcctcatatttgccaaattcagatcctttacatcagtctgatacttccaaagctccaggttttagaccaccattacagagacctgctccaagtccctcaggtattgtcaatatggactcgccatatggttctgtaacaccttcttcaacacatttgggaaactttgcttcaaacatttcaggaggtcagatgtacggacctggggcaccccttggaggagcacccgcagctgctaactttaacagacaacatttttccccgcttagtttgttgactccgtgttcatcagcatcaaatgattcttctgcacagtcagtatcctcgggagttcgtgcaccatctcctgccccatcatcagtaccgttagggtcagaaaagcccagcaatgtgtctcaggacaggaaagttccagtccctattgggactgaacgttctgcacgtatcaggcaaactggaacgtcagctccatctgttattgggagcaatttgtctacatcagtaggacatagtggcatctggtcctttgaagggattggtggcaatcaagacaaagtagactggtgtaaccctgggatgggaaatcctatgatccacagaccgatgtctgacccaggagtattttcacaacatcaagcaatggagcgagatagtacaggaattgtaactccttctggtacattccatcagcatgttcctgcaggctacatggactttcctaaagttgggggtatgcctttttctgtgtatgggaatgcaatgattcctccagtagcacctatccctgatggtgctggaggacccatatttaatggccctcatgctgcagacccttcttggaactcactgataaagatggtttccagctccacggaaaataatggccctcaaacggtgtggactggaccctgggcacctcacatgaacagtgtgcatatgaaccagcttggctgatgaggatcagcttgttagcctgcagattccttttcatttggaggaaatcacaagtggccgaaaaaaaaaattatgctcccaaatcattctactgatgtgcttgactgaagtgtgtaggctttttgcagaagatcttactaactgacctattttctgtgaacatttgtgactgcccattccccatcatcatccgttttaccttagttagcatttttcttatcatttttctttttttctttccctcttcccctttggacataactttctgttgaagctgttctttggctggttggttttagtactgtaaactgcttctgagcaaacacggaaatttagcaaaattatgtaaacttgatcctgaagttttagaatggcaaataaatgtacaattgtttacataacagaaaaggctaagcagaaagtaaatttcaatatgtcagtatagaggctctactttatgtagacttaaattaatgtgagatatgtaccttcatattcagaaatctggatgtttccttcatacattaaactattaataagcataacttttctactggtgtaatttaagtataaagtaaaataatgggcattatcattggatgtttccccacattggcttttaaaatacccatcttgctttctttttggtttatttgtagcaaggcacatatagaagaagaaatttctggcttttccatgttgttttattaccttttctcacttttaaaactaatacagacttatctcctcactcctttttctctccttacctttaccactaataccagtaaaattatctttctgatagtgaaaaggttctgtcaagattttcactgtaatggctgctacagagatggaccatcttcatcatcaccagtggtttcttctaattataaaatgtttaaactttctgagaatttaaaaagccaccactgttcccagtcagcatatacaagctcttaatattctgtttattaaataattcaatgtactattttatattggatgatattgattcttaacattggcttttcagtcatcaacagtcaacataaaaatttcaattttcagtaatttagtggaaaatatcttatttcttttttcaattttaaaggcttcctgcttttttacccttgtatattatcagtgaaaaggatcaacagttaatttgagccaagtaataaaagaaattctgcatttgtcacgaagacaatttatggtagacagataaatacacagattacagtgtaaagtctccatttaacctgtttataaaagatacaaggccacactaaactactcagtgggatttatatattccatccacttgaaacaataaacagtaatgtatccaagaagattatgtgtcctaccctgtctcatggaaaaattaattatatggttgaaatgtaaaagaaagtaagcataaaaatcgagtaatgtatatatcaatttgtcttctttttttttaattagacataaaatttcacactggtaaaacataaaaactaactaaaattcatataaatcacctagagttgatgatattaacatggttccttggttgtcaagtaaatcaaatgatttcttccatctgagtaaagagtaaagcctgagtaaagagtaaaaagatgacttctcaaacatatccagaaatttgtaaacagtacactcatatcttttagtttaagaagtggtcttaaaatatataaatttgtttttccacctatgtttaatatgcccaaatttaaagggagagctaaaagacagcctacaaataaatatagctatgaaataaaattatagcactttactaaaaaagggatgtaataatgttatttaacgaagtattttatatatgacttgccactattctatacataaaattttttttcttaattctttcctgtgttaactagggttattttctatttaaggtaatcctgctggagaacagatgctatccaatatttattacaacacatgagttgtgttgtttcacaatactgaatttcttaggtgaggtattttatttaaaaaggagggggaaaactcctatattttcttgacttcaaacctgtggggccaggggatatagattgaaatgctccgtatttagtcttggggatcaggcttgtttagtacaataccatggttttagaagtctgtactaggaacatttttaaaatacattttttatatttcagatgtaatgcagtgcacttttatttgaacaataaaaaaacccataactttttgagaccatgaaggtcttttattttttaattttgaaaatatgtggtatgtgtatatgcagactacatcattgttttaagaaatgatttaactcttggacattacacttgggttagttcacaccttaaatccccaagtagttaatatctcaattattgtataatcagtttataccatccattcccaacaaaattccacatttcatgccttttcaacatacatttcaacataatcaacatatttacaaacactgacttcactgtttataaagaagaaatttcccctcctatttcccattactgaaaagtcaagtcatttttattgatacatgaaaattaatttttttgtaaatgactacgtatagtcatttttctcctttggaaaaggtaaatagcttattaactaatcctgtcttgttcttcacaaaaataatagtccatccgtgttttgactcaaataacctaaatacacattttgtaaaaattttgtaccctatattacttatttttaaaacagtacagtgttagactaaacaggaaaactcaaagttataaaatctcttcagatcctctagtttattaaatctattttcatgttga

SEQ ID NO: 107615 - DNA, 8105 bp, Homo sapiens
  Payload ID: 1116
  Gene Symbol: ANKRD17
  Gene Name: ankyrin repeat domain 17
  Uniprot ID: O75179
  ENST ID: ENST00000509867
  CDS Start-End: 88-7560
tcctgttcccttgctgacacagaggagtgttcctgctggcaatgatctaatcatagtgcagtaagaaacatggcagtttgataaaacatggtggagacagcggctgaaatggaagcatatgttctagaagacattcttgaggtggagtctttcattttggatcaggatgatttggaaaatccaatgctggaaacagcttccaagttgctcttatcaggtactgctgatggtgcagacctcaggacagtagatccagaaacacaggctagactggaagctttactagaagctgcaggaataggaaaattgtccacggctgatggtaaagcctttgcagatcctgaagtacttcggaggttgacatcgtctgttagttgtgcgttggatgaagctgctgctgcacttacccgtatgagagctgaaagcacagcaaatgcagggcagtcggacaaccgcagtttggcagaagcctgttcagaaggagatgtaaatgctgtgcgaaagttactcattgaagggcgaagtgtaaatgaacacacagaggaaggggagagcctcctttgtttagcttgttctgctggatactatgagcttgcacaggttttgttggcaatgcatgcaaatgtggaagataggggaatcaaaggtgacattacacctttaatggctgctgctaatggaggacatgtcaaaattgtgaagttgctgctagctcataaagcagatgttaatgcacagtcttcaacaggcaatacagcacttacatatgcttgtgctggaggctatgtagatgttgtaaaggtgctcttggaatccggtgctagtattgaggaccataatgaaaatggtcatacccctcttatggaagctggaagtgctggacatgtggaagtagccagattgctgctagaaaatggggctggcattaatacgcattctaatgaatttaaagagagtgcccttaccttagcttgttacaaaggacacttagagatggtgcgatttcttttggaagcaggcgcggatcaagagcataaaacagatgaaatgcacactgctctgatggaggcttgcatggatggccatgttgaagtagctaggttacttcttgacagcggtgcccaagtgaacatgcctgctgattcatttgagtcaccattaactttggctgcatgtggtgggcatgtggaacttgcggctttacttattgaaagaggagctagcctggaagaggtcaatgatgaaggttatacaccattgatggaagcagctcgagaaggacatgaagaaatggtggcattacttcttggtcaaggagcaaatatcaatgcacagacagaagaaactcaagaaactgccttgactctggcttgctgtggaggctttctggaagtggcagactttctaattaaggcaggagccgatatagaactagggtgttctacccctttaatggaagctgctcaagagggtcatttggagttagttaaatacttattagctgcaggagctaacgttcatgcaacaacagcaacaggggatacagcactaacatatgcctgtgaaaatggtcatactgatgtagcagatgtcttacttcaggcaggcgcagatctggaacatgaatctgaaggtggaagaactcctttaatgaaagctgcaagagctggtcatgtttgtactgttcagttcttaattagtaaaggagcgaatgtgaatagaaccacagctaataatgaccatactgtactgtccctggcttgtgcagggggtcatctggcagtggtggaactacttttggctcatggggcagatcctactcaccgtttgaaagatggctcaactatgttgatagaagcagcaaaaggtggccatacaagtgttgtttgctatctcttggattatcctaataacttgctttcagcccctccaccagatgtcactcagttaactcccccatcccacgatttaaatagggctcctcgtgtaccagttcaagcactgcccatggttgttccacctcaggagcctgacaaaccacctgccaatgttgccaccactcttcccatcaggaataaagctgcttctaaacaaaagtccagcagccatttgccagcaaacagccaggatgtacagggttacatcaccaatcagtctccagagagcattgtagaagaggctcagggaaagttaacagaactggaacagaggataaaagaagccatagaaaagaatgcacagctgcagtccttggaactggctcatgctgaccaacttaccaaggagaagatcgaggagctcaacaaaacaagggaggaacaaattcagaagaaacaaaagattttggaggaactacagaaagtagaacgagagttacaactgaaaactcagcagcagctaaaaaagcagtatctagaggttaaagctcaaagaattcaacttcagcaacagcagcaacagtcttgccaacacctgggattactaactcctgttggagttggagagcagctttctgagggagactatgcacggttacagcaagtggatcctgttttacttaaagatgaaccccagcagactgctgctcagatgggttttgcgccaatccagcctctggcgatgcctcaagctttgcctctggcggcaggtcccttgcctccagggtccatcgcaaatcttacagaactgcaaggagtgatagttggacagccagtactgggccaagcacagttggcagggctggggcaaggaattctgacagaaacacaacaagggttaatggtagccagccctgctcagaccctcaatgacacgctggatgacatcatggcagcagtcagtggaagagcatctgcaatgtcaaacactcctacccacagtattgctgcatccatttcccaacctcagactccaactccaagtcctatcatctctccttcagccatgcttcctatctaccctgccattgatattgatgcacagactgagagtaatcatgacacggcactaacacttgcctgtgctggtggccacgaggaactggtacaaacactgctagagagaggagctagtatagagcaccgagacaagaaaggttttactccactcatcttggctgccacagctggtcatgttggtgttgtggaaatattgctggacaatggtgcagacattgaagcccagtctgaaagaaccaaggacacaccactctccttggcttgttctgggggaagacaggaggtggtggagctattgttagctcgaggggcaaataaagagcacaggaatgtttctgattacacacctctaagtctggctgcttctggtggctatgtgaacatcatcaaaatattactaaatgcaggagctgagattaactctagaactggtagcaaattgggcatctctcctctgatgttagcagctatgaatgggcatacagctgctgttaagctcctgttagacatgggctctgacataaatgctcagatagaaaccaatcggaacactgcccttactttagcctgcttccaaggaagaactgaagtggttagtcttctgcttgatagaaaagcaaatgttgaacacagagctaagactggtctcacaccactaatggaagctgcctctggtggatatgcggaggtgggccgagttcttttggataaaggtgctgatgttaatgcccctccagttccctcctcaagagatacagctttaaccatagcagcagataaagggcattacaaattctgtgagcttcttattggcaggggagctcatattgatgtacgtaacaagaaggggaacactccattgtggctagcagcaaatggtggacacctcgatgtggttcagttactggtgcaagcaggtgcagatgtggatgcagcagataaccgcaagataactcctcttatggcagcatttagaaagggtcatgtgaaggtggtgcgctacttagtcaaagaagtcaatcagtttccatcagattctgaatgtatgagatacatagcaaccatcactgataaggagatgctgaagaagtgtcatctttgtatggagtcaatagtacaagccaaagatagacaggctgctgaagcaaacaaaaacgccagcattttgttagaggagttagacttggaaaagttaagggaagaaagtcggaggctggctttggctgcgaaaagagaaaaaagaaaagagaagagaaggaagaaaaaggaagaacaaagaaggaaactagaagaaattgaagccaaaaataaagagaactttgaactccaagctgctcaagaaaaagaaaagcttaaagttgaagatgagcctgaagtcttgacagaacctccaagtgccacaaccactactaccataggtatatctgcaacctggacaactttggcaggttctcatggtaaaagaaataataccataactacaaccagttcaaagaggaaaaacaggaaaaataaaattactccagaaaacgttcaaattatatttgatgatccactaccaatttcatacagtcagccagagaaggtgaatggagagtccaagagcagcagtaccagcgagagtggggacagtgataacatgaggatttccagctgcagcgatgaaagtagtaacagcaacagcagtcgtaagagtgacaatcattcaccagctgtggtcactaccactgtgagcagcaaaaagcagccatcagttcttgttacatttccaaaggaagagagaaaatctgtttctggcaaggcttcaataaaattgtcagaaactatcagtgaagggaccagtaattctctatctacttgtacaaaatctggtccatctcccctttcttctccaaatgggaagttaacagtagcaagtcctaagcgtgggcaaaagagggaagaaggatggaaagaagttgtaagaaggtcaaagaaagtatctgttccatcaactgtgatatccagagtgattggaagaggaggctgtaatatcaatgctattcgggagtttactggtgcacacatagatattgataaacagaaagacaagactggagaccggataatcactataaggggtggcactgaatcaacaagacaagcaactcaattgattaatgctttgatcaaggatccagacaaagaaattgatgaacttattccaaagaatcgtttgaaaagctcctcagcaaattccaaaatagggtcatcagcacctaccaccactgctgctaacacttccttaatgggaattaaaatgacaactgtagctctgtcatcaacatctcaaactgccacagcactcactgtgcctgcaatttcttctgcatccactcacaaaaccattaagaacccagtgaataatgtgaggcctggttttccagtttctcttccattagcatatcctcctccacagtttgcacatgctttgcttgctgctcagactttccagcagatccgtccaccaaggttgcccatgacccactttggaggtacttttccaccagctcaatccacttggggtccgtttcctgtcaggcctttgagccctgccagagctactaactcgcctaagcctcacatggtgcctcgccatagcaatcagaatagcagtggttctcaggtgaattcagcaggttctttaacttcaagcccaacaactacaaccagttcatcagcttcaacggtgcctggtacatctacaaatggcagtccaagttcaccttctgtccgaaggcagctttttgtcacagttgtgaagacatccaatgccaccacaacaacagtcacaaccacggcaagcaacaacaacactgcacccacaaatgccacatatcctatgcctactgccaaagaacactatccagtatcatccccatcttccccatcaccaccagcccagccaggaggggtttctagaaacagccctttggattgtggatcagcatctccaaataaagtggcatcttcctccgaacaggaagcaggtagtccaccagtagtagaaacaacaaacactagacctccaaacagcagcagttcttctgggagttcatcagctcattctaatcagcaacaacctccgggatctgtttctcaggaaccaagaccacctcttcagcagtctcaggttcctcccccggaagttagaatgactgttcctcctttagcaacaagttctgctccagtggcggtgccttctactgccccagtgacttaccctatgcctcagacaccaatgggatgcccccagcctactcctaaaatggaaacccctgctattagaccaccccctcatggcacaactgcccctcacaagaattcagcttcagtgcaaaattcatctgttgcagtcctcagtgtcaatcacattaaaagacctcacagtgttccctcttctgtccagctaccttcgaccttaagtacacaaagtgcttgtcagaattcagtacatccagcaaataagcctattgctcccaatttcagtgcccccttaccatttgggccctttagcacattgtttgaaaacagccctacttctgctcatgccttctggggaggatctgttgtttcatctcagtcaacaccagaatctatgctatcaggaaaatcctcatatttgccaaattcagatcctttacatcagtctgatacttccaaagctccaggttttagaccaccattacagagacctgctccaagtccctcaggtattgtcaatatggactcgccatatggttctgtaacaccttcttcaacacatttgggaaactttgcttcaaacatttcaggaggtcagatgtacggacctggggcaccccttggaggagcacccgcagctgctaactttaacagacaacatttttccccgcttagtttgttgactccgtgttcatcagcatcaaatgattcttctgcacagtcagtatcctcgggagttcgtgcaccatctcctgccccatcatcagtaccgttagggtcagaaaagcccagcaatgtgtctcaggacaggaaagttccagtccctattgggactgaacgttctgcacgtatcaggcaaactggaacgtcagctccatctgttattgggagcaatttgtctacatcagtaggacatagtggcatctggtcctttgaagggattggtggcaatcaagacaaagtagactggtgtaaccctgggatgggaaatcctatgatccacagaccgatgtctgacccaggagtattttcacaacatcaagcaatggagcgagatagtacaggaattgtaactccttctggtacattccatcagcatgttcctgcaggctacatggactttcctaaagttgggggtatgcctttttctgtgtatgggaatgcaatgattcctccagtagcacctatccctgatggtgctggaggacccatatttaatggccctcatgctgcagacccttcttggaactcactgataaagatggtttccagctccacggaaaataatggccctcaaacggtgtggactggaccctgggcacctcacatgaacagtgtgcatatgaaccagcttggctgatgaggatcagcttgttagcctgcagattccttttcatttggaggaaatcacaagtggccgaaaaaaaaaattatgctcccaaatcattctactgatgtgcttgactgaagtgtgtaggctttttgcagaagatcttactaactgacctattttctgtgaacatttgtgactgcccattccccatcatcatccgttttaccttagttagcatttttcttatcatttttctttttttctttccctcttcccctttggacataactttctgttgaagctgttctttggctggttggttttagtactgtaaactgcttctgagcaaacacggaaatttagcaaaattatgtaaacttgatcctgaagttttagaatggcaaataaatgtacaattgtttacataacagaaaaggctaagcagaaagtaaatttcaatatgtcagtatagaggctctactttatgtagacttaaattaatgtgagatatgtaccttcatattcagaaatctggatgtttccttcatacattaaactattaataagcataa

SEQ ID NO: 107616 - DNA, 2717 bp, Homo sapiens
  Payload ID: 1116
  Gene Symbol: ANKRD17
  Gene Name: ankyrin repeat domain 17
  ENST ID: ENST00000561029
  CDS Start-End: 131-2717
agtagaggtgaccgaggcggtggcggcggaggcggcaccgattgctgtgtcggccccagtgcggccgaagtcgcggtagagcgtagccccacgcccctcccccgtccgcgccctccctctttccctggggatggagaaggcgacggttccggtggcggcggcgacggctgcagaaggagaagggagccccccggcggtggcggctgtggcgggcccccccgcggcggcggaggtcggcggcggcgttggcggcagcagcagagctcgctcggcctcgtctcctcgtgggatggtgcgagtctgcgacctgctcctgaagaagaagccgccgcagcagcagcaccacaaggccaagcgtaaccggacttgccgaccccccagcagcagcgaaagcagcagcgacagcgacaacagcggcggcggtggaggcggcggtggaggcggaggtggcggcggcggcaccagcagtaacaacagcgaggaagaagaggacgacgacgacgaggaagaggagcctgacaaaccacctgccaatgttgccaccactcttcccatcaggaataaagctgcttctaaacaaaagtccagcagccatttgccagcaaacagccaggatgtacagggttacatcaccaatcagtctccagagagcattgtagaagaggctcagggaaagttaacagaactggaacagaggataaaagaagccatagaaaagaatgcacagctgcagtccttggaactggctcatgctgaccaacttaccaaggagaagatcgaggagctcaacaaaacaagggaggaacaaattcagaagaaacaaaagattttggaggaactacagaaagtagaacgagagttacaactgaaaactcagcagcagctaaaaaagcagtatctagaggttaaagctcaaagaattcaacttcagcaacagcagcaacagtcttgccaacacctgggattactaactcctgttggagttggagagcagctttctgagggagactatgcacggttacagcaagtggatcctgttttacttaaagatgaaccccagcagactgctgctcagatgggttttgcgccaatccagcctctggcgatgcctcaagctttgcctctggcggcaggtcccttgcctccagggtccatcgcaaatcttacagaactgcaaggagtgatagttggacagccagtactgggccaagcacagttggcagggctggggcaaggaattctgacagaaacacaacaagggttaatggtagccagccctgctcagaccctcaatgacacgctggatgacatcatggcagtcagtggaagagcatctgcaatgtcaaacactcctacccacagtattgctgcatccatttcccaacctcagactccaactccaagtcctatcatctctccttcagccatgcttcctatctaccctgccattgatattgatgcacagactgagagtaatcatgacacggcactaacacttgcctgtgctggtggccacgaggaactggtacaaacactgctagagagaggagctagtatagagcaccgagacaagaaaggttttactccactcatcttggctgccacagctggtcatgttggtgttgtggaaatattgctggacaatggtgcagacattgaagcccagtctgaaagaaccaaggacacaccactctccttggcttgttctgggggaagacaggaggtggtggagctattgttagctcgaggggcaaataaagagcacaggaatgtttctgattacacacctctaagtctggctgcttctggtggctatgtgaacatcatcaaaatattactaaatgcaggagctgagattaactctagaactggtagcaaattgggcatctctcctctgatgttagcagctatgaatgggcatacagctgctgttaagctcctgttagacatgggctctgacataaatgctcagatagaaaccaatcggaacactgcccttactttagcctgcttccaaggaagaactgaagtggttagtcttctgcttgatagaaaagcaaatgttgaacacagagctaagactggtctcacaccactaatggaagctgcctctggtggatatgcggaggtgggccgagttcttttggataaaggtgctgatgttaatgcccctccagttccctcctcaagagatacagctttaaccatagcagcagataaagggcattacaaattctgtgagcttcttattggcaggggagctcatattgatgtacgtaacaagaaggggaacactccattgtggctagcagcaaatggtggacacctcgatgtggttcagttactggtgcaagcaggtgcagatgtggatgcagcagataaccgcaagataactcctcttatggcagcatttagaaagggtcatgtgaaggtggtgcgctacttagtcaaagaagtcaatcagtttccatcagattctgaatgtatgagatacatagcaaccatcactgataaggagatgctgaagaagtgtcatctttgtatggagtcaatagtacaagccaaagatagacaggctgctgaagcaaacaaaaacgccagcattttgttagaggagttagacttggaaaagttaagggaagaaagtcggaggctggctttggctgcgaaaagagaaaaaagaaaagagaagagaaggaagaaaaaggaagaacaaa

SEQ ID NO: 107617 - DNA, 8456 bp, Homo sapiens
  Payload ID: 1116
  Gene Symbol: ANKRD17
  Gene Name: ankyrin repeat domain 17
  ENST ID: ENST00000558247
  CDS Start-End: 1-7463
gcgaggaagaagaggacgacgacgacgaggaagaggaggtttctgaggtggagtctttcattttggatcaggatgatttggaaaatccaatgctggaaacagcttccaagttgctcttatcaggtactgctgatggtgcagacctcaggacagtagatccagaaacacaggctagactggaagctttactagaagctgcaggaataggaaaattgtccacggctgatggtaaagcctttgcagatcctgaagtacttcggaggttgacatcgtctgttagttgtgcgttggatgaagctgctgctgcacttacccgtatgagagctgaaagcacagcaaatgcagggcagtcggacaaccgcagtttggcagaagcctgttcagaaggagatgtaaatgctgtgcgaaagttactcattgaagggcgaagtgtaaatgaacacacagaggaaggggagagcctcctttgtttagcttgttctgctggatactatgagcttgcacaggttttgttggcaatgcatgcaaatgtggaagataggggaatcaaaggtgacattacacctttaatggctgctgctaatggaggacatgtcaaaattgtgaagttgctgctagctcataaagcagatgttaatgcacagtcttcaacaggcaatacagcacttacatatgcttgtgctggaggctatgtagatgttgtaaaggtgctcttggaatccggtgctagtattgaggaccataatgaaaatggtcatacccctcttatggaagctggaagtgctggacatgtggaagtagccagattgctgctagaaaatggggctggcattaatacgcattctaatgaatttaaagagagtgcccttaccttagcttgttacaaaggacacttagagatggtgcgatttcttttggaagcaggcgcggatcaagagcataaaacagatgaaatgcacactgctctgatggaggcttgcatggatggccatgttgaagtagctaggttacttcttgacagcggtgcccaagtgaacatgcctgctgattcatttgagtcaccattaactttggctgcatgtggtgggcatgtggaacttgcggctttacttattgaaagaggagctagcctggaagaggtcaatgatgaaggttatacaccattgatggaagcagctcgagaaggacatgaagaaatggtggcattacttcttggtcaaggagcaaatatcaatgcacagacagaagaaactcaagaaactgccttgactctggcttgctgtggaggctttctggaagtggcagactttctaattaaggcaggagccgatatagaactagggtgttctacccctttaatggaagctgctcaagagggtcatttggagttagttaaatacttattagctgcaggagctaacgttcatgcaacaacagcaacaggggatacagcactaacatatgcctgtgaaaatggtcatactgatgtagcagatgtcttacttcaggcaggcgcagatctggaacatgaatctgaaggtggaagaactcctttaatgaaagctgcaagagctggtcatgtttgtactgttcagttcttaattagtaaaggagcgaatgtgaatagaaccacagctaataatgaccatactgtactgtccctggcttgtgcagggggtcatctggcagtggtggaactacttttggctcatggggcagatcctactcaccgtttgaaagatggctcaactatgttgatagaagcagcaaaaggtggccatacaagtgttgtttgctatctcttggattatcctaataacttgctttcagcccctccaccagatgtcactcagttaactcccccatcccacgatttaaatagggctcctcgtgtaccagttcaagcactgcccatggttgttccacctcaggagcctgacaaaccacctgccaatgttgccaccactcttcccatcaggaataaagctgcttctaaacaaaagtccagcagccatttgccagcaaacagccaggatgtacagggttacatcaccaatcagtctccagagagcattgtagaagaggctcagggaaagttaacagaactggaacagaggataaaagaagccatagaaaagaatgcacagctgcagtccttggaactggctcatgctgaccaacttaccaaggagaagatcgaggagctcaacaaaacaagggaggaacaaattcagaagaaacaaaagattttggaggaactacagaaagtagaacgagagttacaactgaaaactcagcagcagctaaaaaagcagtatctagaggttaaagctcaaagaattcaacttcagcaacagcagcaacagtcttgccaacacctgggattactaactcctgttggagttggagagcagctttctgagggagactatgcacggttacagcaagtggatcctgttttacttaaagatgaaccccagcagactgctgctcagatgggttttgcgccaatccagcctctggcgatgcctcaagctttgcctctggcggcaggtcccttgcctccagggtccatcgcaaatcttacagaactgcaaggagtgatagttggacagccagtactgggccaagcacagttggcagggctggggcaaggaattctgacagaaacacaacaagggttaatggtagccagccctgctcagaccctcaatgacacgctggatgacatcatggcagtcagtggaagagcatctgcaatgtcaaacactcctacccacagtattgctgcatccatttcccaacctcagactccaactccaagtcctatcatctctccttcagccatgcttcctatctaccctgccattgatattgatgcacagactgagagtaatcatgacacggcactaacacttgcctgtgctggtggccacgaggaactggtacaaacactgctagagagaggagctagtatagagcaccgagacaagaaaggttttactccactcatcttggctgccacagctggtcatgttggtgttgtggaaatattgctggacaatggtgcagacattgaagcccagtctgaaagaaccaaggacacaccactctccttggcttgttctgggggaagacaggaggtggtggagctattgttagctcgaggggcaaataaagagcacaggaatgtttctgattacacacctctaagtctggctgcttctggtggctatgtgaacatcatcaaaatattactaaatgcaggagctgagattaactctagaactggtagcaaattgggcatctctcctctgatgttagcagctatgaatgggcatacagctgctgttaagctcctgttagacatgggctctgacataaatgctcagatagaaaccaatcggaacactgcccttactttagcctgcttccaaggaagaactgaagtggttagtcttctgcttgatagaaaagcaaatgttgaacacagagctaagactggtctcacaccactaatggaagctgcctctggtggatatgcggaggtgggccgagttcttttggataaaggtgctgatgttaatgcccctccagttccctcctcaagagatacagctttaaccatagcagcagataaagggcattacaaattctgtgagcttcttattggcaggggagctcatattgatgtacgtaacaagaaggggaacactccattgtggctagcagcaaatggtggacacctcgatgtggttcagttactggtgcaagcaggtgcagatgtggatgcagcagataaccgcaagataactcctcttatggcagcatttagaaagggtcatgtgaaggtggtgcgctacttagtcaaagaagtcaatcagtttccatcagattctgaatgtatgagatacatagcaaccatcactgataaggagatgctgaagaagtgtcatctttgtatggagtcaatagtacaagccaaagatagacaggctgctgaagcaaacaaaaacgccagcattttgttagaggagttagacttggaaaagttaagggaagaaagtcggaggctggctttggctgcgaaaagagaaaaaagaaaagagaagagaaggaagaaaaaggaagaacaaagaaggaaactagaagaaattgaagccaaaaataaagagaactttgaactccaagctgctcaagaaaaagaaaagcttaaagttgaagatgagcctgaagtcttgacagaacctccaagtgccacaaccactactaccataggtatatctgcaacctggacaactttggcaggttctcatggtaaaagaaataataccataactacaaccagttcaaagaggaaaaacaggaaaaataaaattactccagaaaacgttcaaattatatttgatgatccactaccaatttcatacagtcagccagagaaggtgaatggagagtccaagagcagcagtaccagcgagagtggggacagtgataacatgaggatttccagctgcagcgatgaaagtagtaacagcaacagcagtcgtaagagtgacaatcattcaccagctgtggtcactaccactgtgagcagcaaaaagcagccatcagttcttgttacatttccaaaggaagagagaaaatctgtttctggcaaggcttcaataaaattgtcagaaactatcagtgaagggaccagtaattctctatctacttgtacaaaatctggtccatctcccctttcttctccaaatgggaagttaacagtagcaagtcctaagcgtgggcaaaagagggaagaaggatggaaagaagttgtaagaaggtcaaagaaagtatctgttccatcaactgtgatatccagagtgattggaagaggaggctgtaatatcaatgctattcgggagtttactggtgcacacatagatattgataaacagaaagacaagactggagaccggataatcactataaggggtggcactgaatcaacaagacaagcaactcaattgattaatgctttgatcaaggatccagacaaagaaattgatgaacttattccaaagaatcgtttgaaaagctcctcagcaaattccaaaatagggtcatcagcacctaccaccactgctgctaacacttccttaatgggaattaaaatgacaactgtagctctgtcatcaacatctcaaactgccacagcactcactgtgcctgcaatttcttctgcatccactcacaaaaccattaagaacccagtgaataatgtgaggcctggttttccagtttctcttccattagcatatcctcctccacagtttgcacatgctttgcttgctgctcagactttccagcagatccgtccaccaaggttgcccatgacccactttggaggtacttttccaccagctcaatccacttggggtccgtttcctgtcaggcctttgagccctgccagagctactaactcgcctaagcctcacatggtgcctcgccatagcaatcagaatagcagtggttctcaggtgaattcagcaggttctttaacttcaagcccaacaactacaaccagttcatcagcttcaacggtgcctggtacatctacaaatggcagtccaagttcaccttctgtccgaaggcagctttttgtcacagttgtgaagacatccaatgccaccacaacaacagtcacaaccacggcaagcaacaacaacactgcacccacaaatgccacatatcctatgcctactgccaaagaacactatccagtatcatccccatcttccccatcaccaccagcccagccaggaggggtttctagaaacagccctttggattgtggatcagcatctccaaataaagtggcatcttcctccgaacaggaagcaggtagtccaccagtagtagaaacaacaaacactagacctccaaacagcagcagttcttctgggagttcatcagctcattctaatcagcaacaacctccgggatctgtttctcaggaaccaagaccacctcttcagcagtctcaggttcctcccccggaagttagaatgactgttcctcctttagcaacaagttctgctccagtggcggtgccttctactgccccagtgacttaccctatgcctcagacaccaatgggatgcccccagcctactcctaaaatggaaacccctgctattagaccaccccctcatggcacaactgcccctcacaagaattcagcttcagtgcaaaattcatctgttgcagtcctcagtgtcaatcacattaaaagacctcacagtgttccctcttctgtccagctaccttcgaccttaagtacacaaagtgcttgtcagaattcagtacatccagcaaataagcctattgctcccaatttcagtgcccccttaccatttgggccctttagcacattgtttgaaaacagccctacttctgctcatgccttctggggaggatctgttgtttcatctcagtcaacaccagaatctatgctatcaggaaaatcctcatatttgccaaattcagatcctttacatcagtctgatacttccaaagctccaggttttagaccaccattacagagacctgctccaagtccctcaggtattgtcaatatggactcgccatatggttctgtaacaccttcttcaacacatttgggaaactttgcttcaaacatttcaggaggtcagatgtacggacctggggcaccccttggaggagcacccgcagctgctaactttaacagacaacatttttccccgcttagtttgttgactccgtgttcatcagcatcaaatgattcttctgcacagtcagtatcctcgggagttcgtgcaccatctcctgccccatcatcagtaccgttagggtcagaaaagcccagcaatgtgtctcaggacaggaaagttccagtccctattgggactgaacgttctgcacgtatcaggcaaactggaacgtcagctccatctgttattgggagcaatttgtctacatcagtaggacatagtggcatctggtcctttgaagggattggtggcaatcaagacaaagtagactggtgtaaccctgggatgggaaatcctatgatccacagaccgatgtctgacccaggagtattttcacaacatcaagcaatggagcgagatagtacaggaattgtaactccttctggtacattccatcagcatgttcctgcaggctacatggactttcctaaagttgggggtatgcctttttctgtgtatgggaatgcaatgattcctccagtagcacctatccctgatggtgctggaggacccatatttaatggccctcatgctgcagacccttcttggaactcactgataaagatggtttccagctccacggaaaataatggccctcaaacggtgtggactggaccctgggcacctcacatgaacagtgtgcatatgaaccagcttggctgatgaggatcagcttgttagcctgcagattccttttcatttggaggaaatcacaagtggccgaaaaaaaaaattatgctcccaaatcattctactgatgtgcttgactgaagtgtgtaggctttttgcagaagatcttactaactgacctattttctgtgaacatttgtgactgcccattccccatcatcatccgttttaccttagttagcatttttcttatcatttttctttttttctttccctcttcccctttggacataactttctgttgaagctgttctttggctggttggttttagtactgtaaactgcttctgagcaaacacggaaatttagcaaaattatgtaaacttgatcctgaagttttagaatggcaaataaatgtacaattgtttacataacagaaaaggctaagcagaaagtaaatttcaatatgtcagtatagaggctctactttatgtagacttaaattaatgtgagatatgtaccttcatattcagaaatctggatgtttccttcatacattaaactattaataagcataacttttctactggtgtaatttaagtataaagtaaaataatgggcattatcattggatgtttccccacattggcttttaaaatacccatcttgctttctttttggtttatttgtagcaaggcacatatagaagaagaaatttctggcttttccatgttgttttattaccttttctcacttttaaaactaatacagacttatctcctcactcctttttctctccttacctttaccactaataccagtaaaattatctttctgatagtgaaaaggttctgtcaagattttcactgtaatggctgctacagagatggaccatcttcatcatcaccagtggtttcttctaattataaaatgtttaaactttctgagaatttaaaaagccaccactgttcccagtcagcatatacaagctcttaatattctgtttattaaataattcaatgtact

SEQ ID NO: 107618 - DNA, 4041 bp, Homo sapiens
  Payload ID: 1117
  Gene Symbol: ANKRD18A
  Gene Name: ankyrin repeat domain 18A
  Uniprot ID: Q8IVF6
  ENST ID: ENST00000399703
  CDS Start-End: 376-3354
ggcttccggagtcccggctggcgctgagttgtaggcgcgcgcctaactggcatcgcggggactcactcggtctgagagttcggagcgctgaggttcaggcgcgcgcctaacggcttagctgggctcactcggtctgagaggtcggagtctgcgagtgtcgctgctgaaggctgtggtggaccgggctggatcgcggattctgagctacattgcgggtttgggggtggatcttggatttgggggtggatcgcgggttgcgggggggatcgcgggttgcgggggagatcgcggatttggggcggagtgggggtggaaaggccacgaggagccgccgcggctcaggagcgggtggtgggcgtctgagaagtcgccaccatgaggaagctcttcagcttcgggagacgcctgggccaggcgctcctgagctccatggaccaagagtatgcgggtccgggttacgacattcgggactgggaactgcggaagatccacagggctgccatcaagggcgacgccgcggaggtggagcgctgcctgacgcgcaggttccgggacttggacgcccgcgacagaaaagacaggactgttctacatttggcctgtgcccatggccgtgtgcaagtggtcactctcttgctgcacagaagatgccagatcgacatctgtgacagactaaacaggacacctttaatgaaggctgtacacagccaggaagaggcttgtgccatcgttctcctggaatgtggcgccaatccaaacattgaggatatctacggcaacactgctctccattatgccgtgtataataaggggacttcactggcagaaagactgctttcccaccatgcaaatattgaagcactaaacaaggagggaaacactccacttttgtttgctataaattccaggagacagcatatggtggaatttttattgaagaaccaggcaaatatacatgccgttgacaatttcaaaagaacagccctcatacttgcagtacagcataacttgtcaagtatcgtcaccctcctgcttcaacaaaatatacgtatctcttctcaagacatgtttggccaaactgccgaggattatgctctttgttctgatttgagaagcatccgacaacaaattttggaacataaaaataaaatgcttaaaaatcatcttcgaaatgacaatcaagaaacagcagctatgaagcctgcaaatttgaaaaaaagaaaagaacgtgcaaaagcagaacacaacctaaaagtggcttcagaggaaaagcaagaaaggctccaaagaagtgaaaataaacagccacaggattctcaaagttacggaaaaaagaaggatgcgatgtatggaaattttatgttgaagaaagacattgccatgctcaaagaggaattatatgcaataaaaaatgacagtctcagaaaggaaaagaaatatattcaggaaattaaaagcattacagaaataaatgctaactttgaaaagagtgtaagactcaatgaaaaaatgataacaaaaacagtggcccggtattcgcaacagcttaatgatctgaaagctgagaatgcaaggctgaattcagaattggagaaggaaaaacacaacaaagaaagactagaagctgaagttgaatccctccattctagcctggccactgctataaatgagtacaatgaaattgtggaaagaaaagacctagaactagttttatggagagcagatgatgtttctagacatgaaaaaatgggttctaatatttctcaactaacagataagaatgagttgcttactgaacaggtccataaagctcgggtgaagttcaataccttaaaaggtaagctccgtgagacaagagatgctctcagggaaaagacattggctttaggaagtgtacagctggacctaaggcaagcacagcatcgaataaaggaaatgaagcagatgcatccaaatggagaagctaaagaaagtcaatccattggaaagcagaactctttagaggagagaatacgtcaacaagaacttgaaaatctcttgcttgaacgacaactagaggatgctcgtaaggaaggcgataataaagagatagtcattaatatccacagagactgtcttgagaatggaaaggaagatcttctagaagaaagaaataaggaattaatgaaagaatataattatttaaaagaaaaactgcttcagtgtgaaaaagaaaaagcagaaagagaagtgattgtgagagaatttcaagaagaactggtcgatcaccttaaaacattttcaatatcagagtctccactggaaggtacatcacattgtcatattaatttgaatgagacatggacttcaaagaagaaattatttcaagtagaaattcaacctgaagaaaaacatgaagaattcagaaaactttttgaattaatatcattactgaactatactgcggaccaaataagaaagaaaaatcgtgaattagaagaagaggcaactggatataagaaatgcctagaaatgacaataaatatgttaaatgcatttgcaaatgaggacttcagttgccatggagacttaaatacagaccaactgaaaatggatattctgtttaagaagctaaaacagaagtttaatgatcttgtggccgagaaggaagctgtgtcttcagaatgtgtcaatttggccaaagacaatgaagttcttcatcaggagttattatctatgagaaatgtacaagagaaatgtgaaaaacttgagaaggataaaaagatgttggaagaagaagtattaaatcttaagacacatatggaaaaagatatggtagaacttggtaaactacaagaatataaatcggagctggatgaaagggcagtgcaggaaatagaaaaattagaagaaatccatttacagaaacaagcagaatatgaaaaacaattagagcagttaaacaaggataatacggcttcactaaaaaagaaggaactcacacttaaagatgtggaatgtaaattctccaaaatgaaaactgcttatgaagaggttacaactgaattagaagaatttaaggaagcctttgcaggagcagtgaaagctaacaattccatgtcaaaaaaattaatgaaatcggataagaaaatagcagtgatcagcaccaagctctttacggagaaacagcggatgaaatattttctcagcactcttcctacaaggccagaaccagagttaccttgtgttgaaaatcttaatagtatagaactcaacagaaaatatattcccaaaacggccataagaattcctacttcaaacccacagacttcaaataactgcaagaacttcttgactgaggttttgctatgttgagcacttgctcccgtctactttcttttgtagaatccactggtaagccacatctaatgaagagattaaccataaaatcttaaggaaaagttgtatgatttaaaagatcataaaactttattactgggctatttacatgaaattttaattgtttctcatataatataaaacatcataatctttactaaagtagaatattttcatgtcacatatggtgtatatttatatgttattttaaatgatgttttttagcctccttaagttttaagtggatcttgcaaatgaacaccagcgttattgagtttggcctactcaaattgcctgaatgtcagctgtttaaacagccaaacaaccaagtcatcattgatactttagtaaaggtcatcgagggcttctttgcattttacagtttttattaccatatgtagtaggagacttaaagagtatctgccaggtttgtccatactagtgttacggttttcttcttgtagctcaatagtattttgtgtggagatactttgaagctctgtaaatatctggttactcctcaaaacccactagatttagcatttcatggatgacttgtgtttgaacaagtattactgtgatggttgccagatgattgtttttcttattttcttctttgttctacatggagaaataaaaccaataaataaaggagaagggaaa

SEQ ID NO: 107619 - DNA, 2906 bp, Homo sapiens
  Payload ID: 1117
  Gene Symbol: ANKRD18A
  Gene Name: ankyrin repeat domain 18A
  ENST ID: ENST00000602295
  CDS Start-End: 1-1206
gaaaaagaaaaagcagaaagagaagtgattgtgagagaatttcaagaagaactggtcgatcaccttaaaacattttcaatatcagagtctccactggaaggtacatcacattgtcatattaatttgaatgagacatggacttcaaagaagaaattatttcaagtagaaattcaacctgaagaaaaacatgaagaattcagaaaactttttgaattaatatcattactgaactatactgcggaccaaataagaaagaaaaatcgtgaattagaagaagaggcaactggatataagaaatgcctagaaatgacaataaatatgttaaatgcatttgcaaatgaggacttcagttgccatggagacttaaatacagaccaactgaaaatggatattctgtttaagaagctaaaacagaagtttaatgatcttgtggccgagaaggaagctgtgtcttcagaatgtgtcaatttggccaaagacaatgaagttcttcatcaggagttattatctatgagaaatgtacaagagaaatgtgaaaaacttgagaaggataaaaagatgttggaagaagaagtattaaatcttaagacacatatggaaaaagatatggtagaacttggtaaactacaagaatataaatcggagctggatgaaagggcagtgcaggaaatagaaaaattagaagaaatccatttacagaaacaagcagaatatgaaaaacaattagagcagttaaacaaggataatacggcttcactaaaaaagaaggaactcacacttaaagatgtggaatgtaaattctccaaaatgaaaactgcttatgaagaggttacaactgaattagaagaatttaaggaagcctttgcaggagcagtgaaagctaacaattccatgtcaaaaaaattaatgaaatcggataagaaaatagcagtgatcagcaccaagctctttacggagaaacagcggatgaaatattttctcagcactcttcctacaaggccagaaccagagttaccttgtgttgaaaatcttaatagtatagaactcaacagaaaatatattcccaaaacggccataagaattcctacttcaaacccacagacttcaaataactgcaagaacttcttgactgagatggagctggaccgtgtagaacaaataattacaggaacaaagaaaagtatgttgccaaaatgtattaattaaatttaggtttattttagtaataaagtgtaaatagcaaatggcattccttttcattgttgggttagtagatactatattcagtatctttttcttacacacatctaatgaaagatgtgaaaacgaaaactttcacagtgaagagtatacttatgcatcattaattcatcatgttccatagcttaaaaaattcccaagaagtggatccatctcttttttaccagctctacaatttgttcacttttgccatcctcatggaactgtcagccagcacactgaaacgattctccaaaaacaaaggcatcagttggcttacatctgttctcaggaaaagttccaaaaatttcaccatgaaataaaaacactcacatcaatgtaactcttgtcaggttactcagccttgtctctcaccacttactgcattctgccctttgctctagcaccaaagtggacagaatagagctccgcagggctctttgttacctcaggatctttgccttcgcctcttccctctatctggcaagattttcctcgtccttcagtcatcaacctatgtatcccctccaccagaaagcccatgatattgacacaaaagtgggatagatgtcccttctgtatgttccagtagtgccctgctgtatacctgtcatggtatctatgactctatatggacattacctgccggtcttttaggttatagcatatgactattgggaggtggaccatgccatcttcatcttgtaattccagtgctggctctagtaccttagcacgtggctgttgagtacatgaatgaagaatgaaaaagctgtgatatttaaccacaattggaattaacgccatgtgtaaatgatttaatagtaattttgtattgtaattgcacgtacatatttctcattcttattaactctgataacgttctcaactccacattttaaacttacacttcgttaactgaaatgttttaggtaaagaacataatcctttctttttctttccaggttttgctatgttgagcacttgctcccgtctactttcttttgtagaatccactggtaagccacatctaatgaagagattaaccataaaatcttaaggaaaagttgtatgatttaaaagatcataaaactttattactgggctatttacatgaaattttaattgtttctcatataatataaaacatcataatctttactaaagtagaatattttcatgtcacatatggtgtatatttatatgttattttaaatgatgttttttagcctccttaagttttaagtggatcttgcaaatgaacaccagcgttattgagtttggcctactcaaattgcctgaatgtcagctgtttaaacagccaaacaaccaagtcatcattgatactttagtaaaggtcatcgagggcttctttgcattttacagtttttattaccatatgtagtaggagacttaaagagtatctgccaggtttgtccatactagtgttacggttttcttcttgtagctcaatagtattttgtgtggagatactttgaagctctgtaaatatctggttactcctcaaaacccactagatttagcatttcatggatgacttgtgtttgaacaagtattactgtgatggttgccagatgattgtttttcttattttcttctttgttctacatggagaaataaaaccaataaataaaggagaagggaaa

SEQ ID NO: 107620 - DNA, 3773 bp, Homo sapiens
  Payload ID: 1118
  Gene Symbol: ANKRD18B
  Gene Name: ankyrin repeat domain 18B
  Uniprot ID: A2A2Z9
  ENST ID: ENST00000290943
  CDS Start-End: 97-3132
gggggatctcgaatttggagctgggtgggggtggaaaggccacgaggagccgcggcgtctcaggagcgggtggtgggcatctgagaagtcgccaccatgaggaagctcctcagttttgggagacgcctgggccaggcgctcctgagctccatggaccaagagtatgcgggtcgggggtaccacattcgggactgggaactgcggaagatccacagggcggccatcaagggcgacgccgcagaggtggagcactgcctgacgcgcaggttccgggacttggacgtccgcgacagaaaagacaggactgttctacatttggcctgtgcccatggccgtgtgcaagtggtcactctcttgctggacagaaaatgccagatcaacatctgtgacagactaaacaggacacctttaatgaaggctgtacactgccaggaagaggcttgtgccattattctcctgaaacgtggcgccaatccaaacattaaggatatctacggcaacactgctctccattatgccgtgtataatgaggggacttcactggcagaaagactgctttcccaccatgcaaatattgaagcactaaacaaggagggaaacactccacttttgtttgctataaattccaggagacagcatatggtggaatttttattgaagaaccaggcaaatatacatgccgttgacaatttcaaaagaacagccctcatacttgcagtacagcataacttgtcaagtatcgtcaccctcctgcttcaacaaaatatacatatctcttctcaagacatgtttggccaaactgccgaggattatgctttttgttgtgatttgagaagcatccaacaacaaattttggaacataaaaataagatgcttaaaaatcatcttcgaaatgacaatcaagaaacagcagctatgaagcctgaaaatttgaaaaaaagaaaaaaaagaaaaaaattgaaaaaaagaaaagaaggtgcaaaagcagaacacaacttaaaagtggcttcagaggaaaagcaagaaaggcttgaaagaagtgaaaataaacagccgcaggattctcaaagttatggaaaaaagaaggatgagatgtttggaaattttatgttgaagagagacattgccatgctcaaagaggaattatatgcaataaaaaatgacagtctcagaaaggaaaagaaatatattcaggaaattaaaagtattacagaaataaatgctaactttgaaaagagtgtaagactcaatgaagaaatgataacaaaaaaagtggcccagtattcgcaacagcttaatgatctgaaagctgagaatgcaaggctgaattcaaaattggagaaggaaaaacacaacaaagaaagactagaagctgaagttgaatccctccattctaacttggccactgctataaatgagtacaatgaaattttggaaagaaaagacctagaactagttttatggagagcagatgatgtttctagacatgaaacaatgggttctaatatttctcaactaacagataagaatgagttgcttactgaacaggtccataaagctcgggtgaagttcaataccttaaaaggtaagctccgtgagacaagagatgctctcagggaaaagacattggctttagaaagtgtacagctggacctaaagcaagcgcagcatcgaataaaggaaatgaagcagatgcatccaaatggggaagctaaagaaagtcaatccattggaaagcagaactcttcagaggagagaatacgtcaacgagaacttgaaaatctcttgcttgaacgacaactagaggatgctcgtaaggaaggtgataataaagagatagtcattaatatccacagagactgtcttgagaatggaaaggaagatcttctagaagaaagaaataaggaattaatgaatgaatataattatttaaaagaaaaactgcttcagtatgaaaaagaaaaagcagaaagagaagtgattgtgagagaatttcaagaagaactggtcgatcatcttaaaaaattttcaatgtcagagtctccactggaaggtacatcacattgtcatattaatttggatgagacatggacttcaaagaagaaattatttcaagtagaaattcaacctgaagaaaaacatgaagaattcagaaaagtttttgaattaatatcattactgaactatactgcggatcaaataagaaagaaaaatcgtgaattagaagaagaggcaactggatataagaaatgcctagaaatgacaataaatatgttaaatgcatttgcaaatgaagacttcagttgccatggagacttaaatacagaccaactgaaaatggatattctgtttaagaagctaaaacagaagtttgatgatcttatggccgagaaggaagctgtatcttcaaaatgtgtcaatttggccaaagacaatgaagttcttcatcaggagttattatctatgggaaaagtacaagagaaatgtgaaaaacttgagaaggataaaaagatgttggaagaaaaagtattaaatcttaagacacatatggaaaaagatatggtagaacttggtaaagtacaagaatataaatcggagctggatgaaagggcaatgcaggcaatagaaaaattagaagaaatccatttacagaaacaagcagaatatgaaaaacaattagagcagttaaacaaggataatacggcttcactaaaaaagaaggaactcacacttaaagatgtggaatgtaaattctccaaaatgaaaacagcttatgaagatgttacaactgaattagaagagtataaggaagcctttgcagtagcattgaaagctaacagttccatgtcagaaaaaataacgaaatcggataagaaaatagctgtgatcagcaccaagctctttatggagaaagagcggatggaatattttctcagcactcttcctatgaggccagacccagagttaccttgtgttgaaaatcttaatagtatagaactcaacagaaaatatattcccaaaatggccataagaattcctacttcaaacccacagacttcaaataactgcaagaactccttgactgagcttttgctgcgttgggcccttgctcctatctactttcttctctagaatccactggtaagccacatctaatgaagagaatatttaaccataaaatcttaaggaaaagttgtatgatttaaaagatcataaaactttattactgggctatttacatgaaattttaattgtttctcataaaatataaaacatcacaatctttactaaagtagaatattttcatatcatatgatgtatatttatatgttattttaaatgatttttttagcctccttaagttttaagtggatcttgcaaatgaacaccagtgttattgagtttgacctactcaaattgcctgaatgtcagctgtttaaacagccaaacaaccaagtcatcattgatactgtagtaaaggtcatctttgcattttacactttttattaccatatatagtaggagacttaaagagtatctgccaggtttgtccatactagtgttatgattttctttttgtagttcaatagtattttgtgtggagatactttgaagctctgtaaatatctggttactcctcaaaacccactagatttagcatttcatggatgacttgtgtttgaacaagtattactgtgatggttgccagatgattatttttcttattttcttctttgttctacatggagaaataaaaccaataaataaaggag

SEQ ID NO: 107621 - DNA, 2898 bp, Homo sapiens
  Payload ID: 1118
  Gene Symbol: ANKRD18B
  Gene Name: ankyrin repeat domain 18B
  ENST ID: ENST00000357927
  CDS Start-End: 1-1206
gaaaaagaaaaagcagaaagagaagtgattgtgagagaatttcaagaagaactggtcgatcatcttaaaaaattttcaatgtcagagtctccactggaaggtacatcacattgtcatattaatttggatgagacatggacttcaaagaagaaattatttcaagtagaaattcaacctgaagaaaaacatgaagaattcagaaaagtttttgaattaatatcattactgaactatactgcggatcaaataagaaagaaaaatcgtgaattagaagaagaggcaactggatataagaaatgcctagaaatgacaataaatatgttaaatgcatttgcaaatgaagacttcagttgccatggagacttaaatacagaccaactgaaaatggatattctgtttaagaagctaaaacagaagtttgatgatcttatggccgagaaggaagctgtatcttcaaaatgtgtcaatttggccaaagacaatgaagttcttcatcaggagttattatctatgggaaaagtacaagagaaatgtgaaaaacttgagaaggataaaaagatgttggaagaaaaagtattaaatcttaagacacatatggaaaaagatatggtagaacttggtaaagtacaagaatataaatcggagctggatgaaagggcaatgcaggcaatagaaaaattagaagaaatccatttacagaaacaagcagaatatgaaaaacaattagagcagttaaacaaggataatacggcttcactaaaaaagaaggaactcacacttaaagatgtggaatgtaaattctccaaaatgaaaacagcttatgaagatgttacaactgaattagaagagtataaggaagcctttgcagtagcattgaaagctaacagttccatgtcagaaaaaataacgaaatcggataagaaaatagctgtgatcagcaccaagctctttatggagaaagagcggatggaatattttctcagcactcttcctatgaggccagacccagagttaccttgtgttgaaaatcttaatagtatagaactcaacagaaaatatattcccaaaatggccataagaattcctacttcaaacccacagacttcaaataactgcaagaactccttgactgagatggagctggactgtgcagaacaaataattacagaaacaaagaaaagtatgttgccaaaatgtattaattaaatttaggtttattttagtaataaagtgtaaatagcaaatggcattccttttcattgttgggttagtagatactacattcagtatctttttcttacacacatctaatgaaagatgtgaaaacaaaaactttcacagtgaagagtatacttatgcatcattaattcatcatgttccatagcttaaaaaattcccaagaagtggatccatctcttttttactgattctgcaatttcttcacttttgccgtcctcatggaactgtcagccagcacactgaaacgattctccaaaaacaaaagcatcaattggcttacatctgttctcaggaaaagttccagaaatttcaccatgaaataaaaacacccatgtcaatgtaattcttgtcaggttactcagccttgtctctcaccacttactgcattctgccctttgctctagcaccaaagtggacagagtagaactccgcagggctctttgttacctcaggatctttgccttcgcctcttccctctttctggcaagattttcctcatccttcagtcatcaacctatgtatcccctccaccagaaagcccatgatattgacacaaaagtgggatagatgtcccttctgtgtgttccagtagtgccccgctgtatacctgtcatgatatctatgactctatatggacattacctgccggtcttttaggttatagcatatgactattgggaggtggaccatgccatcttcatcttgtaattccagtgctggctctagtaccttagcacgtggctgttgagtgcatgaatgaagaatgaaaaagctgtgatatttaaccacaattagaattagtgccatgtgtaaatgatttaatagtaatcttgtattgtaattgcacgtacatatttctcattcttattaactctgataatgttctcaactctacattttaaacttacacttcgttaactgaaatgttttaggtaaagaacataatcctttctttttctttccagcttttgctgcgttgggcccttgctcctatctactttcttctctagaatccactggtaagccacatctaatgaagagaatatttaaccataaaatcttaaggaaaagttgtatgatttaaaagatcataaaactttattactgggctatttacatgaaattttaattgtttctcataaaatataaaacatcacaatctttactaaagtagaatattttcatatcatatgatgtatatttatatgttattttaaatgatttttttagcctccttaagttttaagtggatcttgcaaatgaacaccagtgttattgagtttgacctactcaaattgcctgaatgtcagctgtttaaacagccaaacaaccaagtcatcattgatactgtagtaaaggtcatctttgcattttacactttttattaccatatatagtaggagacttaaagagtatctgccaggtttgtccatactagtgttatgattttctttttgtagttcaatagtattttgtgtggagatactttgaagctctgtaaatatctggttactcctcaaaacccactagatttagcatttcatggatgacttgtgtttgaacaagtattactgtgatggttgccagatgattatttttcttattttcttctttgttctacatggagaaataaaaccaataaataaaggagaagggaaa

SEQ ID NO: 107622 - DNA, 668 bp, Homo sapiens
  Payload ID: 1118
  Gene Symbol: ANKRD18B
  Gene Name: ankyrin repeat domain 18B
  ENST ID: ENST00000465094
  CDS Start-End: 1-483
aaacaagcagaatatgaaaaacaattagagcagttaaacaaggataatacggcttcactaaaaaagaaggaactcacacttaaagatgtggaatgtaaattctccaaaatgaaaacagcttatgaagatgttacaactgaattagaagagtataaggaagcctttgcagtagcattgaaagctaacagttccatgtcagaaaaaataacgaaatcggataagaaaatagctgtgatcagcaccaagctctttatggagaaagagcggatggaatattttctcagcactcttcctatgaggccagacccagagttaccttgtgttgaaaatcttaatagtatagaactcaacagaaaatatattcccaaaatggccataagaattcctacttcaaacccacagacttcaaataactgcaagaactccttgactgaggttagttatatgaccatttctcttttgggtttcatttctctaatataattcttgtttataatttggtgaaatactgagttgttctgttgacttatgcatgttaagtaaagattataattagctgtgttaacacagaaaggaaatggaaactttacattttttaattccctggagctctcattttcaagagacacccatttgctaactttattcaataaatgtggttaaactga

SEQ ID NO: 107623 - DNA, 223 bp, Homo sapiens
  Payload ID: 1118
  Gene Symbol: ANKRD18B
  Gene Name: ankyrin repeat domain 18B
  ENST ID: ENST00000605687
  CDS Start-End: 1-223
acaaattttggaacataaaaataagatgcttaaaaatcatcttcgaaatgacaatcaagaaacagcagctatgaagcctgaaaatttgaaaaaaagaaaaaaaagaaaaaaattgaaaaaaagaaaagaaggtgcaaaagaacacaacttaaaagtggcttcagaggaaaagcaagaaaggcttgaaagaagtgaaaataaacagccgcaggattctcaaagt

SEQ ID NO: 107624 - DNA, 1350 bp, Homo sapiens
  Payload ID: 1119
  Gene Symbol: ANKRD2
  Gene Name: ankyrin repeat domain 2 (stretch responsive muscle)
  Uniprot ID: Q9GZV1
  ENST ID: ENST00000298808
  CDS Start-End: 210-1193
aaccagtcccaagtgctcaggacagaggctggacgggctccttcctgcacccctgctcttgggacacagtgccctccggctctaataggccaggagttgggggggcaactggctctgctccctggccctggctccccctgctccctggggctgcccgaggtgaaggtgacaggtgggggaggcaggtggagaattgggccagtgagctcatggcaaaggcgcccagctgggcaggggtgggtgctctggcctataaagcccccgaggccctgtggcctgcagaggcggttatggacggcaccatggaggactccgaggcggtgcagagggccacagcgctcatcgagcagcggctggcacaggaggaggagaatgagaaactccgaggagacgcacgccagaagctgcccatggacttgctggtgctggaggatgagaagcaccacggggctcagagtgcagccctgcagaaggtgaagggccaagagcgcgtgcgcaagacgtccctggacctgcggcgggagatcatcgatgtgggcgggatccagaacctcatcgagctgcggaagaaacgcaagcagaagaagcgggacgctctggccgcctcgcatgagccgcccccagagcccgaggagatcactggccctgtggatgaggagaccttcctgaaagctgcggtggaggggaaaatgaaggtcattgagaagttcctggctgacggggggtcagccgacacgtgcgaccagttccgtcggacagcactgcaccgagcttccctggaaggccacatggaaatcctggagaagcttctagataatggggccactgtggacttccaggatcggctggactgcacagccatgcattgggcctgccgcgggggccacttagaggtggtgaaacttctgcaaagccatggagcagacaccaatgtgagggataaggaaggggatactgccctgcatgacgctgtgaggctcaaccgctacaaaatcatcaaactgctgctcctgcatggggctgacatgatgaccaagaacctggcaggaaagaccccgacggacctggtgcagctctggcaggctgatacccggcacgccctggagcatcctgagccgggggctgagcataacgggctggaggggcctaatgatagtgggcgagagacccctcagcctgtgccagcccagtgaatgcgtgccccagcccagccagctacccagcccctctctgtgtgcagccggagggtcctaagaatggctcccggagctaactgagggcccagccttttttctgcatgatccaggagcacataccacaaactaccacaataaaaaagctgtttttgct

SEQ ID NO: 107625 - DNA, 1449 bp, Homo sapiens
  Payload ID: 1119
  Gene Symbol: ANKRD2
  Gene Name: ankyrin repeat domain 2 (stretch responsive muscle)
  Uniprot ID: Q9GZV1
  ENST ID: ENST00000307518
  CDS Start-End: 210-1292
aaccagtcccaagtgctcaggacagaggctggacgggctccttcctgcacccctgctcttgggacacagtgccctccggctctaataggccaggagttgggggggcaactggctctgctccctggccctggctccccctgctccctggggctgcccgaggtgaaggtgacaggtgggggaggcaggtggagaattgggccagtgagctcatggcaaaggcgcccagctgggcaggggtgggtgctctggcctataaagcccccgaggccctgtggcctgcagaggcggttatggacggcaccatggaggactccgaggcggtgcagagggccacagcgctcatcgagcagcggctggcacaggaggaggagaatgagaaactccgaggagacgcacgccagaagctgcccatggacttgctggtgctggaggatgagaagcaccacggggctcagagtgcagccctgcagaaggtgaagggccaagagcgcgtgcgcaagacgtccctggacctgcggcgggagatcatcgatgtgggcgggatccagaacctcatcgagctgcggaagaaacgcaagcagaagaagcgggacgctctggccgcctcgcatgagccgcccccagagcccgaggagatcactggccctgtggatgaggagaccttcctgaaagctgcggtggaggggaaaatgaaggtcattgagaagttcctggctgacggggggtcagccgacacgtgcgaccagttccgtcggacagcactgcaccgagcttccctggaaggccacatggaaatcctggagaagcttctagataatggggccactgtggacttccaggatcggctggactgcacagccatgcattgggcctgccgcgggggccacttagaggtggtgaaacttctgcaaagccatggagcagacaccaatgtgagggataagctgctgagcaccccgctgcacgtggcagtccggacagggcaggtggagattgtggagcactttctatccctgggcctggaaatcaatgccagagacagggaaggggatactgccctgcatgacgctgtgaggctcaaccgctacaaaatcatcaaactgctgctcctgcatggggctgacatgatgaccaagaacctggcaggaaagaccccgacggacctggtgcagctctggcaggctgatacccggcacgccctggagcatcctgagccgggggctgagcataacgggctggaggggcctaatgatagtgggcgagagacccctcagcctgtgccagcccagtgaatgcgtgccccagcccagccagctacccagcccctctctgtgtgcagccggagggtcctaagaatggctcccggagctaactgagggcccagccttttttctgcatgatccaggagcacataccacaaactaccacaataaaaaagctgtttttgct

SEQ ID NO: 107626 - DNA, 1451 bp, Homo sapiens
  Payload ID: 1119
  Gene Symbol: ANKRD2
  Gene Name: ankyrin repeat domain 2 (stretch responsive muscle)
  ENST ID: ENST00000370655
  CDS Start-End: 291-1292
aaccagtcccaagtgctcaggacagaggctggacgggctccttcctgcacccctgctcttgggacacagtgccctccggctctaataggccaggagttgggggggcaactggctctgctccctggccctggctccccctgctccctggggctgcccgaggtgaaggtgacaggtgggggaggcaggtggagaattgggccagtgagctcatggcaaaggcgcccagctgggcaggggtgggtgctctggcctataaagcccccgaggccctgtggcctgcagaggcggttatggacggcaccatggaggactccgaggcggtgcagagggccacagcgctcatcgagcagcggctggcacaggaggaggagaatgagaaactccgaggagacgcacgccagaagctgcccatggacttgctggtgctggaggatgagaagcaccacggggctcagagtgcagccctgcagaaggtgaagggccaagagcgcgtgcgcaagacgtccctggacctgcggcgggagatcatcgatgtgggcgggatccagaacctcatcgagctgcggaagaaacgcaagcagaagaagcgggacgctctggccgcctcgcatgagccgcccccagagcccgaggagatcactggccctgtggatgaggagaccttcctgaaagctgcggtggaggggaaaatgaaggtcattgagaagttcctggctgacggggggtcagccgacacgtgcgaccagttccgtcggacagcactgcaccgagcttccctggaaggccacatggaaatcctggagaagcttctagataatggggccactgtggacttccaggatcggctggactgcacagccatgcattgggcctgccgcgggggccacttagaggtggtgaaacttctgcaaagccatggagcagacaccaatgtgagggataagctgctgagcaccccgctgcacgtggcagtccggacagggcaggtggagattgtggagcactttctatccctgggcctggaaatcaatgccagagacagggaaggggatactgccctgcatgacgctgtgaggctcaaccgctacaaaatcatcaaactgctgctcctgcatggggctgacatgatgaccaagaacctggcaggaaagaccccgacggacctggtgcagctctggcaggctgatacccggcacgccctggagcatcctgagccgggggctgagcataacgggctggaggggcctaatgatagtgggcgagagacccctcagcctgtgccagcccagtgaatgcgtgccccagcccagccagctacccagcccctctctgtgtgcagccggagggtcctaagaatggctcccggagctaactgagggcccagccttttttctgcatgatccaggagcacataccacaaactaccacaataaaaaagctgtttttgctaa

SEQ ID NO: 107627 - DNA, 1072 bp, Homo sapiens
  Payload ID: 1119
  Gene Symbol: ANKRD2
  Gene Name: ankyrin repeat domain 2 (stretch responsive muscle)
  ENST ID: ENST00000455090
  CDS Start-End: 11-913
agaggcggttatggacggcaccatggaggactccgaggcggtgcagagggccacagcgctcatcgagcagcggctggcacaggaggaggagaatgagaaactccgaggagacgcacgccagaagctgcccatggacttgctggtgctggaggatgagaagcaccacggggctcagagtgcagccctgcagaaggtgaagggccaagagcgcgtgcgcaagacgtccctggacctgcggcgggagatcatcgatgtgggcgggatccagaacctcatcgagctgcggaagaaacgcaagcagaagaagcgggacgctctggccgcctcgcatgagccgcccccagagcccgaggagatcactggccctgtggatgaggagaccttcctgaaagctgcggtggaggggaaaatgaaggtcattgagaagttcctggctgacggggggtcagccgacacgtgcgaccagttccgtcggacagcactgcaccgagcttccctggaaggccacatggaaatcctggagaagcttctagataatggggccactgtggacttccaggatcggctggactgcacagccatgcattgggcctgccgcgggggccacttagaggtggtgaaacttctgcaaagccatggagcagacaccaatgtgagggataaggaaggggatactgccctgcatgacgctgtgaggctcaaccgctacaaaatcatcaaactgctgctcctgcatggggctgacatgatgaccaagaacctggcaggaaagaccccgacggacctggtgcagctctggcaggctgatacccggcacgccctggagcatcctgagccgggggctgagcataacgggctggaggggcctaatgatagtgggcgagagacccctcagcctgtgccagcccagtgaatgcgtgccccagcccagccagctacccagcccctctctgtgtgcagccggagggtcctaagaatggctcccggagctaactgagggcccagccttttttctgcatgatccaggagcacataccacaaactaccacaataaaaaagctgtttttgctaa

SEQ ID NO: 107628 - DNA, 3379 bp, Homo sapiens
  Payload ID: 1120
  Gene Symbol: ANKRD20A1
  Gene Name: ankyrin repeat domain 20 family, member A1
  Uniprot ID: Q5TYW2
  ENST ID: ENST00000562196
  CDS Start-End: 281-2752
caggcgcgcgcccaacggctttgcgaggctcactcggtctgagaggtcggaggctgcgagtgtcgctgctgaaggctgtggtggaccgggctggatcgcggattgtggagtagaccatagatttgaaatagcggagttggggttggatcggggctttggggttggataggggatttggggctgggtcggccggggtcggggaggggggtggtgaaaaggtgacagggagctgcccccgctcaagagccggtggttgggggtctgagaagaagtcaccaatatgaagttattcggcttcgggagccgcaggggccagacggcccagggctccatagaccacgtctacacgggttccggataccgaatccgggactccgaactgcagaagatccacagggcagctgtcaaaggcgacgccgcggaggtggagcgctgcctggcgcgcaggagcggagacctggacgccctggacaagcagcacagaactgctctacacttggcctgtaccagtggccatgtgcaagtggtcactctcctggttaacagaaaatgccagattgatgtctgtgacaaagaaaacagaacgcctttgatacaggctgtccattgccaggaagaggcttgtgccgttattctgctggaacatggcgccaatccaaaccttaaggatatctacggcaacactgctctccattatgccgtgtatagtgagagcacctcactggcagaaaaactgctttcccatggtgcacatattgaagcactggacaaggacaataataccccacttttatttgctataatttgcaagaaagagaaaatggtggaatttttattgaaaaagaaagcaagttcacatgccgttgataggctgagacggtcagctctcatgcttgctgtatactatgactcaccaggtattgtcaatatccttcttaagcaaaatattgatgtcttcgctcaagacatgtgtggacgagatgcagaagattatgctatttctcatcatttgacaaaaattcaacaacaaattttggaacataaaaagaagatacttaaaaaggagaaatcagatgttggaagttctgatgaatctgcagtcagcattttccatgaactgcgtgtggattcattgcctgcatcggatgacaaagacttgaatgttgctactaagcagtgtgtccccgagaaagtgtcagagcctttacctggatcttcgcatgaaaaaggaaacagaatagtcaatggacaaggagaagggcctcctgcaaaacatccttccttgaagcctagcactgaagtggaagatcctgctgtgaaaggagcagtacaaagaaagaatgtacagacattgagagcagaacaagccttaccagtggcttcagaggaagagcaagaaaggcatgaaagaagtgaaaagaagcaaccacaggtcaaagaaggaaataatacaaacaaaagtgaaaaaatacaactttcagaaaatatatgtgatagtacatcttctgctgctgctggcagattaacccaacaaagaaagattgggaaaacgtatcctcagcaatttcccaagaagctgaaggaagagcatgatagatgcaccttaaaacaagaaaatgaagaaaaaacaaatgttaatatgctgtacaaaaaaaatagagaagaattagaaaggaaagagaaacaatataagaaagaagttgaagcaaaacaacttgaaccaactgttcagtcactagagatgaaatcaaagactgcaagaaatactccaaattgggattttcataatcatgaagaaatgaaaggtctgatggatgaaaattgcattttgaaggcagatattgctatactcagacaggaaatatgtacaatgaaaaatgacaacttggaaaaagaaaataaatatcttaaggacattaaaattgttaaagaaacaaatgctgcccttgaaaagtatataaaactcaatgaggaaatgataacagaaacagcattccggtatcaacaagagcttaatgatctcaaggctgagaatacaaggctcaatgccgaactgttgaaggaaaaagaaagcaagaaaagactggaagctgacattgaatcttatcagtctagactggctgctgctataagcaaacacagtgaaagtgtgaaaacagaaagaaacctaaaacttgctttagagagaacacgagatgtttctgtacaagtagaaatgagttctgctatttccaaagtaaaagctgagaatgagtttcttactgaacaactttctgaaacacaaattaaattcaatgccttaaaagataagttccgtaagacaagagatagtctcagaaaaaagtcattggctttagaaactgtacaaaacgacctaagccaaacacagcagcaaacacaggaaatgaaagagatgtatcaaaatgcagaagctaaagtgaataattccactggaaagtggaactgtgtagaagagaggatatgtcacctccaacgtgaaaatgcgtggcttgtacagcaactagatgacgttcatcagaaagaggatcataaagagatagtaactaatatccaaagaggctttattgagagtggaaagaaagacctcgtgctagaagagaaaagtaagaagctaatgaatgaatgtgatcatttaaaagaaagtctctttcagtatgagagagagaaaacagaaggagtagtaagtatcaaggaagataaatattttcaaacttctagaaagacaatttaaacatttggttctggatacatgttgaacttagttgaatataaaaatctagattaaaagtgtgtttaccatactgtataattccatttacatgaagcatccagaaaagataaatgtatagggacaaaaagtagattcatgtttgcaaggggctggggctggaagctggtagtgactgctaatgggcatgaggaatcttacagtgatggaaatgctctaaagttggattgtagagatggctgcacaactcagtaaatgtactaaaaatcttttaacttaaaacagatacattctatagtatgtaaattatatttcaacaaagctgttttaataaaaaaaggaaaaatgtgtttactatatcggcttagaaacatgcctcatttctaggaaataaaagatagaggtgagagatgatttactttgagaaaagacattgtgtcacctatgaaattttattaggcacagagtcatattttaaggtagatagttctgtattgctgaaatagtaattttaatgtctttatgttgccacatgttaagaccataatgtagttataaatggaaatgtttacacctgaagtgagtattttcaaattaaaatttaattaagtgattttcttcgacacttaa

SEQ ID NO: 107629 - DNA, 586 bp, Homo sapiens
  Payload ID: 1120
  Gene Symbol: ANKRD20A1
  Gene Name: ankyrin repeat domain 20 family, member A1
  ENST ID: ENST00000620792
  CDS Start-End: 30-586
ggttgggggtctgagaagaagtcaccaatatgaagttattcggcttcgggagccgcaggggccagacggcccagggctccatagaccacgtctacacgggttccggataccgaatccgggactccgaactgcagaagatccacagggcagctgtcaaaggcgacgccgcggaggtggagcgctgcctggcgcgcaggagcggagacctggacgccctggacaagcagcacagaactgctctacacttggcctgtaccagtggccatgtgcaagtggtcactctcctggttaacagaaaatgccagattgatgtctgtgacaaagaaaacagaacgcctttgatacaggctgtccattgccaggaagaggcttgtgccgttattctgctggaacatggcgccaatccaaaccttaaggatatctacggcaacactgctctccattatgccgtgtatagtgagagcacctcactggcagaaaaactgctttcccatggtgcacatattgaagcactggacaagcagtgtgtccccgagaaagtgtcagagcctttacctggatcttcgcatgaaaaaggaaacagaat

SEQ ID NO: 107630 - DNA, 1398 bp, Homo sapiens
  Payload ID: 1120
  Gene Symbol: ANKRD20A1
  Gene Name: ankyrin repeat domain 20 family, member A1
  ENST ID: ENST00000619063
  CDS Start-End: 265-552
ggctttgcgaggctcactcggtctgagaggtcggaggctgcgagtgtcgctgctgaaggctgtggtggaccgggctggatcgcggattgtggagtagaccatagatttgaaatagcggagttggggttggatcggggctttggggttggataggggatttggggctgggtcggccggggtcggggaggggggtggtgaaaaggtgacagggagctgcccccgctcaagagccggtggttgggggtctgagaagaagtcaccaatatgaagttattcggcttcgggagccgcaggggccagacggcccagggctccatagaccacgtctacacgggttccggataccgaatccgggactccgaactgcagaagatccacagggcagctgtcaaaggcgacgccgcggaggtggagcgctgcctggcgcgcaggagcggagacctggacgccctggacaagcagcacagggaattctttcaaatcaaatcatcaaacactctaaaagtgggcaaagtacctttttccagatctacaagttacttatatacataggaaaaaatccttcgcatttctggtataagaatttaaactaaaagaggaatgaaacagttttctatccacaatatttgtgaggatgttttatactgctgcttaaagttgctgattacttttcaaagtactcatttgaaaatgaactgctctacacttggcctgtaccagtggccatgtgcaagtggtcactctcctggttaacagaaaatgccagattgatgtctgtgacaaagaaaacagaacgcctttgatacaggctgtccattgccaggaagaggcttgtgccgttattctgctggaacatggcgccaatccaaaccttaaggatatctacggcaacactgctctccattatgccgtgtatagtgagagcacctcactggcagaaaaactgctttcccatggtgcacatattgaagcactggacaaggacaataataccccacttttatttgctataatttgcaagaaagagaaaatggtggaatttttattgaaaaagaaagcaagttcacatgccgttgataggctgagacggtcagctctcatgcttgctgtatactatgactcaccaggtattgtcaatatccttcttaagcaaaatattgatgtcttcgctcaagacatgtgtggacgagatgcagaagattatgctatttctcatcatttgacaaaaattcaacaacaaattttggaacataaaaagaagatacttaaaaaggagaaatcagatgttggaagttctgatgaatctgcagtcaggtaggattttatagatttaaaaaattatgttaactaagaaaatatagatggaagaaatgagtatctgttgagtgttgtattctg

SEQ ID NO: 107631 - DNA, 3511 bp, Homo sapiens
  Payload ID: 1121
  Gene Symbol: ANKRD20A2
  Gene Name: ankyrin repeat domain 20 family, member A2
  Uniprot ID: Q5SQ80
  ENST ID: ENST00000377601
  CDS Start-End: 113-2584
ggggatttggggctgggtcggccggggtcggggagggggttggtgaaaaggtgacagggagctgccctcgctcaagagccggtggttgggggtctgagaagaagtcaccaatatgaagttattcggcttcgggagccgcaggggccagacggcccagggctccatagaccacgtctacacgggttccggataccgaatccgggactccgaactgcagaagatccacagggcagctgtcaaaggcgacgccgcggaggtggagcgctgcttggcgcgcaggagcggagacctggacgccctggacaagcagcacagaactgctctacacttggcctgtgccagtggccatgtgcaagtggtcactctcctggttaacagaaaatgccagattgatgtctgtgacaaagaaaacagaacgcctttgatacaggctgtccattgccaggaagaggcttgtgccgttattctgctggaacatggcgccaatccaaaccttaaggatatctacggcaacactgctctccattatgccgtgtatagtgagagcacctcactggcagaaaaactgctttcccatggtgcacatattgaagcactggacaaggacaataataccccacttttatttgctataatttgcaagaaagagaaaatggtggaatttttattgaaaaggaaagcaagttcacatgccgttgataggctgagacggtcagctctcatgcttgctgtatactatgactcaccaggtattgtcaatatccttcttaagcaaaatattgatgtcttcgctcaagacatgtgtggacgagatgcagaagattatgctatttctcatcatttgacaaaaattcaacaacaaattttggaacataaaaagaagatacttaaaaaggagaaatcagatgttggaagttctgatgaatctgcagtcagcattttccatgaactgcgtgtggattcattgcctgcatcggatgacaaagacttgaatgttgctactaagcagtgtgtccccgagaaagtgtcagagcctttacctggatcttcgcatgaaaaaggaaacagaatagtcaatggacaaggagaagggcctcctgcaaaacatccttccttgaagcctagcactgaagtagaagatcctgctgtgaaaggagcagtacaaagaaagaatgtacagacattgagagcagaacaagccttaccagtggcttcagaggaagagcaagaaaggcatgaaagaagtgaaaagaagcaaccacaggtcaaagaaggaaataatacaaacaaaagtgaaaaaatacaactttcagaaaatatatgtgatagtacatcttctgctgctgctggcagattaacccaacaaagaaagattgggaaaacgtatcctcagcaatttcccaagaagctgaaggaagagcatgatagatgcaccttaaaacaagaaaatgaagaaaaaacaaatgttaatatgctgtacaaaaaaaatagagaagaattagaaaggaaagagaaacaatataagaaagaagttgaagcaaaacaacttgaaccaactgttcagtcactagagatgaaatcaaagactgcaagaaatactccaaatcgggattttcataatcatgaagaaatgaaaggtctgatggatgaaaattgcattttgaaggcagatattgctatactcagacaggaaatatgtacaatgaaaaatgacaacttggaaaaagaaaataaatatcttaaggacattaaaattgttaaagaaacaaatgctgcccttgaaaagtatataaaactcaatgaggaaatgataacagaaacagcattccggtatcaacaagagcttaatgatctcaaggctgagaatacaaggctcaatgccgaactgttgaaggaaaaagaaagcaagaaaagactggaagctgacattgaatcttatcagtctagactggctgctgctataagcaaacacagtgaaagtgtgaaaacagaaagaaacctaaaacttgctttagagagaacacgagatgtttctgtacaagtagaaatgagttctgctatttccaaagtaaaagatgagaatgagtttcttactgaacaactttctgaaacacaaattaaattcaatgccttaaaagataagttccgtaagacaagagatagtctcagaaaaaagtcattggctttagaaactgtacaaaacgacctaagccaaacacagcagcaaacacaggaaatgaaagagatgtatcaaaatgcagaagctaaagtgaataattccactggaaagtggaactgtgtagaagagaggatatgtcacctccaacgtgaaaatgcgtggcttgtacagcaactagatgacgttcatcagaaagaggatcataaagagatagtaactaatatccaaagaggctttattgagagtggaaagaaagacctcgtgctagaagagaaaagtaagaagctaatgaatgaatgtgatcatttaaaagaaagtctctttcagtatgagagagagaaaacagaaggagtagtaagtatcaaggaagataaatattttcaaacttctagaaagaaaatttaaacatttggttctggatacatgttgaacttagttgaatataaaaatctagattaaaagtgtgtttaccatactgtataattccatttacatgaagcatccagaaaagataaatgtatagggacaaaaagtagattcatgtttgcaaggggctggggctggaagctggtagtgactgctaatgggcatgaggaatcttacagtgatggaaatgctctaaagttggattgtagagatggctgcacaactcagtaaatgtactaaaaatcttttaacttaaaacagatacattctatagtatgtaaattatatttcaacaaagctgttttaataaaaaaaggaaaaatgtgtttactatatcggcttagaaacatgcctcatttctaggaaataaaagatagaggtgagagatgatttactttgagaaaagacattgtgtcacctatgaaattttattaggcacagagtcatattttaaggtagatagttctgtattgctgaaatagtaattttaatgtctttatgttgccacatgttaagaccataatgtagttataaatggaaatgtttacacctgaagtgagtattttcaaattaaaatttaattaagtgattttcttcgacacttaattctagattccccagatgaattgaagtgtattgctgtgtcttgtaataccttgctttaactagctttttatgtattttagttggtatagctttgttattattcatattaacaaatctgaaaatatgtcaaattacgtgtttttatgaccatgtaatgttttaaaggcacctacttgttataaaatcataatttaggataaatgtggtaaaacttagcaaaactatatttggtttagttttcccactggtatttatagtttactttgaatatttatattaataattagctcataattttta

SEQ ID NO: 107632 - DNA, 520 bp, Homo sapiens
  Payload ID: 1121
  Gene Symbol: ANKRD20A2
  Gene Name: ankyrin repeat domain 20 family, member A2
  ENST ID: ENST00000611747
  CDS Start-End: 81-509
gagggggttggtgaaaaggtgacagggagctgccctcgctcaagagccggtggttgggggtctgagaagaagtcaccaatatgaagttattcggcttcgggagccgcaggggccagacggcccagggctccatagaccacgtctacacgggttccggataccgaatccgggactccgaactgcagaagatccacagggcagctgtcaaaggcgacgccgcggaggtggagcgctgcttggcgcgcaggagcggagacctggacgccctggacaagcagcacaggctgtccattgccaggaagaggcttgtgccgttattctgctggaacatggcgccaatccaaaccttaaggatatctacggcaacactgctctccattatgccgtgtatagtgagagcacctcactggcagaaaaactgctttcccatggtgcacatattgaagcactggacaaggtataggtcaatcaactttctttccaaaatatttgttttaacattgacataggtaagggtcaa

SEQ ID NO: 107633 - DNA, 1398 bp, Homo sapiens
  Payload ID: 1122
  Gene Symbol: ANKRD20A3
  Gene Name: ankyrin repeat domain 20 family, member A3
  ENST ID: ENST00000614733
  CDS Start-End: 265-552
ggctttgcgaggctcactcggtctgagaggtcggaggctgcgagtgtcgctgctgaaggctgtggtggaccgggctggatcgcggattgtggagtagattatagatttgaaatagcggagttggggttggatcggggctttggggttggataggggatttggggctgggtcggccggggtcggggaggggggtggtgaaaaggtgacagggagctgccctcgctcaagagccggtggttgggggtctgagaagaagtcaccaatatgaagttattcggcttcgggagccgcaggggccagacggcccagggctccatagaccacgtctacacgggttccggataccgaatccgggactccgaactgcagaagatccacagggcagctgtcaaaggcgacgccgcggaggtggagcgctgcctggcgcgcaggagcggagacctggacgccctggacaagcagcacaggaaattctttcaaatcaaatcatcaaacactctaaaagtgggcaaagtacctttttccagatctacaagttacttatatacataggaaaaaatccttcgcatttctggtataagaatttaaactaaaagaggaatgaaacagttttctatccacaatatttgtgaggatgttttatactgctgcttgaagttgctgattacttttcaaagtactcatttgaaaatgaactgctctacacttggcctgtgccagtggccatgtgcaagtggtcactctcctggttaacagaaaatgccagattgatgtctgtgacaaagaaaacagaacgcctttgatacaggctgtccattgccaggaagaggcttgtgccgttattctgctggaacatggcgccaatccaaaccttaaggatatctacggcaacactgctctccattatgccgtgtatagtgagagcacctcactggcagaaaaactgctttcccatggtgcacatattgaagcactggacaaggacaataataccccacttttatttgctataatttgcaagaaagagaaaatggtggaatttttattgaaaaggaaagcaagttcacatgccgttgataggctgagacggtcagctctcatgcttgctgtatactatgactcaccaggtattgtcaatatccttcttaagcaaaatattgatgtcttcgctcaagacatgtgtggacgagatgcagaagattatgctatttctcatcatttgacaaaaattcaacaacaaattttggaacataaaaagaagatacttaaaaaggagaaatcagatgttggaagttctgatgaatctgcagtcaggtaggattttatagatttaaaaaattatgttaactaagaaaatatagatggaagaaacgaatatctgttgagtgttgtattctg

SEQ ID NO: 107634 - DNA, 3964 bp, Homo sapiens
  Payload ID: 1122
  Gene Symbol: ANKRD20A3
  Gene Name: ankyrin repeat domain 20 family, member A3
  Uniprot ID: Q5VUR7
  ENST ID: ENST00000611388
  CDS Start-End: 113-2584
ggggatttggggctgggtcggccggggtcggggaggggggtggtgaaaaggtgacagggagctgccctcgctcaagagccggtggttgggggtctgagaagaagtcaccaatatgaagttattcggcttcgggagccgcaggggccagacggcccagggctccatagaccacgtctacacgggttccggataccgaatccgggactccgaactgcagaagatccacagggcagctgtcaaaggcgacgccgcggaggtggagcgctgcctggcgcgcaggagcggagacctggacgccctggacaagcagcacagaactgctctacacttggcctgtgccagtggccatgtgcaagtggtcactctcctggttaacagaaaatgccagattgatgtctgtgacaaagaaaacagaacgcctttgatacaggctgtccattgccaggaagaggcttgtgccgttattctgctggaacatggcgccaatccaaaccttaaggatatctacggcaacactgctctccattatgccgtgtatagtgagagcacctcactggcagaaaaactgctttcccatggtgcacatattgaagcactggacaaggacaataataccccacttttatttgctataatttgcaagaaagagaaaatggtggaatttttattgaaaaggaaagcaagttcacatgccgttgataggctgagacggtcagctctcatgcttgctgtatactatgactcaccaggtattgtcaatatccttcttaagcaaaatattgatgtcttcgctcaagacatgtgtggacgagatgcagaagattatgctatttctcatcatttgacaaaaattcaacaacaaattttggaacataaaaagaagatacttaaaaaggagaaatcagatgttggaagttctgatgaatctgcagtcagcattttccatgaactgcgtgtggattcattgcctgcatcggatgacaaagacttgaatgttgctactaagcagtgtgtccccgagaaagtgtcagagcctttacctggatcttcgcatgaaaaaggaaacagaatagtcaatggacaaggagaagggcctcctgcaaaacatccttccttgaagcctagcactgaagtagaagatcctgctgtgaaaggagcagtacaaagaaagaatgtacagacattgagagcagaacaagccttaccagtggcttcagaggaagagcaagaaaggcatgaaagaagtgaaaagaagcaaccacaggtcaaagaaggaaataatacaaacaaaagtgaaaaaatacaactttcagaaaatatatgtgatagtacatcttctgctgctgctggcagattaacccaacaaagaaagattgggaaaacgtatcctcagcaatttcccaagaagctgaaggaagagcatgatagatgcaccttaaaacaagaaaatgaagaaaaaacaaatgttaatatgctgtacaaaaaaaatagagaagaattagaaaggaaagagaaacaatataagaaagaagttgaagcaaaacaacttgaaccaactgttcagtcactagagatgaaatcaaagactgcaagaaatactccaaatcgggattttcataatcatgaagaaatgaaaggtctgatggatgaaaattgcattttgaaggcagatattgctatactcagacaggaaatatgtacaatgaaaaatgacaacttggaaaaagaaaataaatatcttaaggacattaaaattgttaaagaaacaaatgctgcccttgaaaagtatataaaactcaatgaggaaatgataacagaaacagcattccggtatcaacaagagcttaattatctcaaggctgagaatacaaggctcaatgccgaactgttgaaggaaaaagaaagcaagaaaagactggaagctgacattgaatcttatcagtctagactggctgctgctataagcaaacacagtgaaagtgtgaaaacagaaagaaacctaaaacttgctttagagagaacacgagatgtttctgtacaagtagaaatgagttctgctatttccaaagtaaaagatgagaatgagtttcttactgaacaactttctgaaacacaaattaaattcaatgccttaaaagataagttccgtaagacaagagatagtctcagaaaaaagtcattggctttagaaactgtacaaaacgacctaagccaaacacagcagcaaacacaggaaatgaaagagatgtatcaaaatgcagaagctaaagtgaataattccactggaaagtggaactgtgtagaagagaggatatgtcacctccaacgtgaaaatgcgtggcttgtacagcaactagatgacgttcatcagaaagaggatcataaagagatagtaactaatatccaaagaggctttattgagagtggaaagaaagacctcgtgctagaagagaaaagtaagaagctaatgaatgaatgtgatcatttaaaagaaagtctctttcagtatgagagagagaaaacagaaggagtagtaagtatcaaggaagataaatattttcaaacttctagaaagacaatttaaacatttggttctggatacatgttgaacttagttgaatataaaaatctagattaaaagtgtgtttaccatactgtataattccatttacatgaagcatccagaaaagataaatgtatagggacaaaaagtagattcatgtttgcaaggggctggggctggaagctggtagtgactgctaatgggcatgaggaatcttacagtgatggaaatgctctaaagttggattgtagagatggctgcacaactcagtaaatgtactaaaaatcttttaacttaaaacagatacattctatagtatgtaaattatatttcaacaaagctgttttaataaaaaaaggaaaaatgtgtttactatatcggcttagaaacatgcctcatttctaggaaataaaagatagaggtgagagatgatttactttgagaaaagacattgtgtcacctatgaaattttattaggcacagagtcatattttaaggtagatagttctgtattgctgaaatagtaattttaatgtctttatgttgccacatgttaagaccataatgtagttataaatggaaatgtttacacctgaagtgagtattttcaaattaaaatttaattaagtgattttcttcgacacttaattctagattccccagatgaattgaagtgtattgctgtgtcttgtaataccttgctttaactagctttttatgtattttagttggtatagctttgttattattcatattaacaaatctgaaaatatgtcaaattacgtgtttttatgaccatgtaatgttttaaaggcacctacttgttataaaatcataatttaggataaatgtggtaaaacttagcaaaactatatttggtttagttttcccactggtatttatagtttactttgaatatttatattaataattagctcataatttttattgcaaggctcaatgactgtcattggaatataattttgttcagtacaaagatacttgtagctgtctgtgatttacgagttaggcactacatctccattttcagactgaggggtggcaggcttcacatacagtgggaatggagtaattacaggagggagttgtaggagctttgaagtcagagagggaggtagaggcctttttacctagggcctcaaaggccattggaattttacttttattctgagataggaatctgttggaaggatttgaacaggtgattgaatatgttaggaactttgaggctgagttgagcttctgagatgattgaatgttggaatgaatctgttgtgtaagtaagagaataccaatttggcaggaagagaacatattctgcatccctcactgaattcagtaataaataaaaatgtgtacatgtgattaaaagaaggtgaa

SEQ ID NO: 107635 - DNA, 4137 bp, Homo sapiens
  Payload ID: 1123
  Gene Symbol: ANKRD20A4
  Gene Name: ankyrin repeat domain 20 family, member A4
  Uniprot ID: Q4UJ75
  ENST ID: ENST00000357336
  CDS Start-End: 282-2753
gcaggcgcgcgcccaacggctttgcgaggctcactcggtctgagaggtcggaggctgcgagtgtcgctgctgaaggctgtggtggaccgggctggatcgcggattgtggagtagattatagatttgaaatagcggagttggggttggatcggggctttggggttggataggggatttggggctgggtcggccggggtcggggaggggggtggtgaaaaggtgacagggagctgccctcgctcaagagccggtggttgggggtctgagaagaagtcaccaatatgaagttattcggcttcgggagccgcaggggccagacggcccagggctccatagaccacgtctacacgggttccggataccgaatccgggactccgaactgcagaagatccacagggcagctgtcaaaggcgacgccgcggaggtggagcgctgcttggcgcgcaggagcggagaactggacgccctggacaagcagcacagaactgctctacacttggcctgtgccagtggccatgtgcaagtggtcactctcctggttaacagaaaatgccagattgatgtctgtgacaaagaaaacagaacgcctttgatacaggctgtccattgccaggaagaggcttgtgccgttattctgctggaacatggcgccaatccaaaccttaaggatatctacggcaacactgctctccattatgccgtgtatagtgagagcacctcactggcagaaaaactgctttcccatggtgcacatattgaagcactggacaaggacaataataccccacttttatttgctataatttgcaagaaagagaaaatggtggaatttttattgaaaaagaaagcaagttcacatgccgttgataggctgagacggtcagctctcatgcttgctgtatactatgactcaccaggtattgtcaatatccttcttaagcaaaatattgatgtcttcgctcaagacatgtgtggacgagatgcagaagattatgctatttctcatcatttgacaaaaattcaacaacaaattttggaacataaaaagaagatacttaaaaaggagaaatcagatgttggaagttctgatgaatctgcagtcagcattttccatgaactgcgtgtggattcattgcctgcatcggatgacaaagacttgaatgttgctactaagcagtgtgtccccgagaaagtgtcagagcctttacctggatcttcgcatgaaaaaggaaacagaatagtcaatggacaaggagaagggcctcctgcaaaacatccttccttgaagcctagcactgaagtggaagatcctgctgtgaaaggagcagtacaaagaaagaatgtacagacattgagagcagaacaagccttaccagtggcttcagaggaagagcaacaaaggcatgaaagaagtgaaaagaagcaaccacaggtcaaagaaggaaataatacaaacaaaagtgaaaaaatacaactttcagaaaatatatgtgatagtacatcttctgctgctgctggcagattaacccaacaaagaaagattgggaaaacgtatcctcagcaatttcccaagaagctgaaggaagagcatgatagatgcaccttaaaacaagaaaatgaagaaaaaacaaatgttaatatgctgtacaaaaaaaatagagaagaattagaaaggaaagagaaacaatataagaaagaagttgaagcaaaacaacttgaaccaactgttcagtcactagagatgaaatcaaagactgcaagaaatactccaaattgggattttcataatcatgaagaaatgaaaggtctgatggatgaaaattgcattttgaaggcagatattgctatactcagacaggaaatatgtacaatgaaaaatgacaacttggaaaaagaaaataaatatcttaaggacattaaaattgttaaagaaacaaatgctgcccttgaaaagtatataaaactcaatgaggaaatgataacagaaacagcattccggtatcaacaagagcttaatgatctcaaggctgagaatacaaggctcaatgccgaactgttgaaggaaaaagaaagcaagaaaagactggaagctgacattgaatcttatcagtctagactggctgctgctataagcaaacacagtgaaagtgtgaaaacagaaagaaacctaaaacttgctttagagagaacacaagatgtttctgtacaagtagaaatgagttctgctatttccaaagtaaaagatgagaatgagtttcttactgaacaactttctgaaacacaaattaaattcaatgccttaaaagataagttccgtaagacaagagatagtctcagaaaaaagtcattggctttagaaactgtacaaaacaacctaagccaaacacagcagcaaacacaggaaatgaaagagatgtatcaaaatgcagaagctaaagtgaataattccactggaaagtggaactgtgtagaagagaggatatgtcacctccaacgtgaaaatgcgtggcttgtacagcaactagatgacgttcatcagaaagaggatcataaagagatagtaactaatatccaaagaggctttattgagagtggaaagaaagacttcgtgctagaagagaaaagtaagaagctaatgaatgaatgtgatcatttaaaagaaagtctctttcagtatgagagagagaaaacagaagtagtagtaagtatcaaggaagataaatattttcaaacttctagaaagaaaatttaaacatttggttctggatacatgttgaacttagttgaatataaaaatctagattaaaagtgtgtttaccatactgtataattccatttacatgaagcatccagaaaagataaatgtatagggacaaaaagtagattcatgtttgcaaggggctggggctggaagctggtagtgactgctaatgggcatgaggaatcttacagtgatggaaatgctctaaagttggattgtagagatggctgcacaactcagtaaatgtactaaaaatcttttaactttaagttaaaacagatacattctatagtatgtaaattatatttcaacaaagctgttttaataaaaaaaggaaaaatgtgtttactatatcggcttagaaacatgcctcatttctaggaaataaaagatagaggtgagagatgatttactttgagaaaagacattgtgtcacctatgaaattttattaggcacagagtcatattttaaggtagatagttctgtactgctgaaatagtaattttaatgtctttatgttgccacatgttaagaccataatgtagttataaatggaaatgtttacacctgaagtgagtattttcaaattaaaatttaattaagtgattttcttcgacacttaattctagattccccagatgaattgaagtgtattgctgtgtcttgtaataccttgctttaactagctttttatgtattttagttggtatagctttgttattattcatattaacaaatctgaaaatatgtcaaattacgtatttttatgaccacgtaatgttttaaaggcacctactggttataaaatcataatttaggataaatgtggtaaaacttagcaaaactatatttggtttagttttcccactggtatttatagtttactttgaatatttatattaataattagctcataatttttattgcaaggctcaatgactgtcattggaatataattttgttcagtacaaagatacttgtagctgtctgtgatttacgagttaggcactacatctccattttcagactgaggggtggcaggcttcacatacagtgggaatggagtaattacaggagggagttgtaggagctttgaagtcagagagggaggtagaggcctttttacctagggcatcaaaggccattggaattttacttttattctgagataggaatctgttggaaggatttgaacaggtgattgaatatgttaggaactttgaggctgagttgagcttctgagatgattgaatgttggaatgaatctgttgtgtaaaagagaataccaatttggcaggaagagaacatattctgcatccctcactgaattcagtaataaataaaaatgtgtacatgtgattaaaagaaggtgaa

SEQ ID NO: 107636 - DNA, 520 bp, Homo sapiens
  Payload ID: 1123
  Gene Symbol: ANKRD20A4
  Gene Name: ankyrin repeat domain 20 family, member A4
  ENST ID: ENST00000615302
  CDS Start-End: 81-509
gaggggggtggtgaaaaggtgacagggagctgccctcgctcaagagccggtggttgggggtctgagaagaagtcaccaatatgaagttattcggcttcgggagccgcaggggccagacggcccagggctccatagaccacgtctacacgggttccggataccgaatccgggactccgaactgcagaagatccacagggcagctgtcaaaggcgacgccgcggaggtggagcgctgcttggcgcgcaggagcggagaactggacgccctggacaagcagcacaggctgtccattgccaggaagaggcttgtgccgttattctgctggaacatggcgccaatccaaaccttaaggatatctacggcaacactgctctccattatgccgtgtatagtgagagcacctcactggcagaaaaactgctttcccatggtgcacatattgaagcactggacaaggtataggtcaatcaactttctttccaaaatatttgttttaacattgacataggtaagggtcaa

SEQ ID NO: 107637 - DNA, 1596 bp, Homo sapiens
  Payload ID: 1124
  Gene Symbol: ANKRD22
  Gene Name: ankyrin repeat domain 22
  Uniprot ID: Q5VYY1
  ENST ID: ENST00000371930
  CDS Start-End: 212-787
attgggctgggctctctggaaggtgtgctgctgcctgagctgctggaaaagcactgacaggtgtttgctagaaaagcactcctggagcttgccaccagcttggacttctagggactttcctctcagccaggaaggattttgatattcatcagaaatacctccagaagattcaaggagctgtagaggtgaagtaagcctgtgaaggaccagcatgggaatcctatactctgagcccatctgccaagcagcctatcagaatgactttggacaagtgtggcggtgggtgaaagaagacagcagctatgccaacgttcaagatggctttaatggagacacgcccctgatctgtgcttgcaggcgagggcatgtgagaatcgtttccttccttttaagaagaaatgctaatgtcaacctcaaaaaccagaaagagagaacctgcttgcattatgctgtgaagaaaaaatttaccttcattgattatctactaattatcctcttaatgcctgttctgcttattgggtatttcctcatggtatcaaagacaaagcagaatgaggctcttgtacgaatgctacttgatgctggcgtcgaagttaatgctacagattgttatggctgtaccgcattacattatgcctgtgaaatgaaaaaccagtctcttatccctctgctcttggaagcccgtgcagaccccacaataaagaataagcatggtgagagctcactggatattgcacggagattaaaattttcccagattgaattaatgctaaggaaagcattgtaatccttgtgaccacaccgatggagatacagaaaaagttaacgactggattctatcttcattttagacttttggtctgtgggccatttaacctggatgccaccattttatggggataatgatgcttaccatggttaatgttttggaagagctttttatttatagcattgtttactcagtcaagttcaccatggccgtaatccttctaagggaaacactaaagttgttgtagtctccacttcagtcagaaactgatgtttcagctaggcacagtggtacatgcctgtaatcccagctacttgggaggctgaggtgggaggatcacttgaactcaggagtttgagagcagccagggcaacacagcgagaccctgtctcaaaaaaaaaaaaaaaaaaaaaagccctggtgttccaaactcagtctttcctgaagaagaggatctgagttatcttctgaaacagcgttctcccttcccagttgtatcactcttataaaaagactgtccagtctatgtcatgccctaggagacaaactgttcctcccagccccctttgagtattgagcagaagaatcaaattattaaatacgtatgtttgtacagaatggtatttgtgtatgtgtgtgggcttagagattcacaagtaaatattcctttggtgaaggaatttcaataaaaacatctatcaagtgtcagcggtgagtgtgtttacaccacagaaattggcaaattgacaaatcagagtttgtttttgtttttttgttttttactttccataaagttcgtttaccagcataccactagagatttcggt

SEQ ID NO: 107638 - DNA, 2597 bp, Homo sapiens
  Payload ID: 1125
  Gene Symbol: ANKRD23
  Gene Name: ankyrin repeat domain 23
  Uniprot ID: Q86SG2
  ENST ID: ENST00000318357
  CDS Start-End: 43-960
ttcagctcttctcactggggggtgtgaggaacaggggggaccatggacttcatcagcattcagcagttggtaagtggagaaagagttgaagggaaagtgttgggatttggacatggagttcctgaccctggagcctggcctagtgactggaggaggggcccccaagaggctgtggcccgggagaagctgaaattggaagaagagaagaagaagaaacttgaaagatttaacagtaccagatttaatctggataacctggctgacttggaaaacttggttcaaagacggaaaaagcgactgagacacagagtcccccccaggaaacctgagcccctggttaagccgcagtcccaggcccaggtggagcctgtgggcctggagatgttcctgaaggcagctgctgagaaccaggagtacctgattgacaagtacttgacagacggaggggaccccaatgcccatgacaagctccaccgcaccgccttgcactgggcctgtctgaagggtcacagccagctggtgaacaagctgctggtggcaggtgccacagtggacgcgcgagacttgctggacaggacacctgtgttctgggcctgccgcggaggacatctggtcatcctcaaacagctgcttaaccagggagcccgggtcaatgcccgggacaagatcgggagcacccccctgcacgtggcagtgcgcacccggcaccccgactgcctggagcacctcatcgagtgtggcgcccacctgaacgcacaggataaggaaggggacacggctctgcacgaggccgtgcggcacggcagctacaaagccatgaagctactgctgctctatggggccgagctgggggtgcggaacgcggcctccgtgaccccggtgcagctggctcgagactggcagcgcggcatccgggaggccctgcaggcccacgtggcgcatccccgcacccggtgctgaccgcagcaccgccccccgccgcgcctttcgcactgccaccattccatcctgtgccccgcccccgcgtctgcacctctgtggttcctgccctcagccctggttcctccctctctggcctgtgccgcctcagcagccctggcagaactgaagagcggcaccgggcccagcaggcaaagagagaggcctccctggcttcgagtgtcaggggagccgcgttccctcccagggctggagcagaggaccacaaggcagcagaaagcgcgggtccagatgagggccaggaaggggaggagagtgagggccaagaacgagccttaagggagcagtcccaagctggagccacccagggctgggtctgggagtcctcagtgtccacttgtcccaggttagggggcttgccttgctctctccagggccagtctgtgtgtgtggggactcagcccgtggccggcagatgccatccaggatgtacaaggtgcagccaaggcaggccatgcaggggccgggcctgtctgcagctggtggatgcctgtgggcatggctttctctggggaccccattcctgtcagtagcaaccctggcagtgtccggagcggctctagacaactttggtcataggaactctggaggtgggttctggtcatctgaggtggctactcaacaggtttgaggccccacagcaacagaagtccaggacccactaggttgcctcagaagccctaagactgatgagctggagcgcgcatttgagagaagcctcgcacccactgtgtactggccccgctcaggccggcctggcacaccgttgcctgctggcggctctcatggggaagcgcctgggcactggggattgcttgtggcccactcaactcttggggcagtggcccgtaaccctagtttgcctgaggcccttatgtccccttatgttcctggtactggagcttgagctcttgcctggaacgctgcagctgcacccaccctgcttgatcccacctgggaggccaggacactgaggagctctgaacccagcccacagggaagcagaggaaggtgagcccccgccgccccccagcccttcccatcccttccctgctccctggtggtctaaggacccaagctccctagacttcctcttccaccgtctgtacgtttcaaattacactggtgtaggcctgtactgctggtggggctgggcccctaaacgccagaaagtgaatcttaagaagctctgccctaaactgagaaccacatgctgagggaagggctgaaaggtgaaggctcagcctccctcacatgggtcctgggttacattaggtaccgggctgattgataggcatttggccatggttccttttcgtctacctttgggggccttctcaggcccagaacaaggctgttgttactatgtggaaaagctgaccagtgctgcacactaggggcacacacctttccatgagcagctcctgccctgtggcgacagccagcgtgcacccagacgctggtgccatggcgaagcaggcgttcaagaccatggagaagacaactcctcatctagaaaatgaggacacctcagtgacaaacacacctttttataccaatcagtatcctctgttcattaaaactggctatccattaca

SEQ ID NO: 107639 - DNA, 2455 bp, Homo sapiens
  Payload ID: 1125
  Gene Symbol: ANKRD23
  Gene Name: ankyrin repeat domain 23
  Uniprot ID: Q86SG2
  ENST ID: ENST00000331001
  CDS Start-End: 30-821
actggggggtgtgaggaacaggggggaccatggacttcatcagcattcagcagttggtaagtggagaaagagttgaagggaaagtgttgggatttggacatggagttcctgaccctggagcctggcctagtgactggaggaggggcccccaagaggctgtggcccgggagaagctgaaattggaagaagagaagaagaagaaacttgaaagatttaacagtaccagatttaatctggataacctggctgacttggaaaacttggttcaaagacggaaaaagcgactgagacacagagtcccccccaggaaacctgagcccctggttaagctccaccgcaccgccttgcactgggcctgtctgaagggtcacagccagctggtgaacaagctgctggtggcaggtgccacagtggacgcgcgagacttgctggacaggacacctgtgttctgggcctgccgcggaggacatctggtcatcctcaaacagctgcttaaccagggagcccgggtcaatgcccgggacaagatcgggagcacccccctgcacgtggcagtgcgcacccggcaccccgactgcctggagcacctcatcgagtgtggcgcccacctgaacgcacaggataaggaaggggacacggctctgcacgaggccgtgcggcacggcagctacaaagccatgaagctactgctgctctatggggccgagctgggggtgcggaacgcggcctccgtgaccccggtgcagctggctcgagactggcagcgcggcatccgggaggccctgcaggcccacgtggcgcatccccgcacccggtgctgaccgcagcaccgccccccgccgcgcctttcgcactgccaccattccatcctgtgccccgcccccgcgtctgcacctctgtggttcctgccctcagccctggttcctccctctctggcctgtgccgcctcagcagccctggcagaactgaagagcggcaccgggcccagcaggcaaagagagaggcctccctggcttcgagtgtcaggggagccgcgttccctcccagggctggagcagaggaccacaaggcagcagaaagcgcgggtccagatgagggccaggaaggggaggagagtgagggccaagaacgagccttaagggagcagtcccaagctggagccacccagggctgggtctgggagtcctcagtgtccacttgtcccaggttagggggcttgccttgctctctccagggccagtctgtgtgtgtggggactcagcccgtggccggcagatgccatccaggatgtacaaggtgcagccaaggcaggccatgcaggggccgggcctgtctgcagctggtggatgcctgtgggcatggctttctctggggaccccattcctgtcagtagcaaccctggcagtgtccggagcggctctagacaactttggtcataggaactctggaggtgggttctggtcatctgaggtggctactcaacaggtttgaggccccacagcaacagaagtccaggacccactaggttgcctcagaagccctaagactgatgagctggagcgcgcatttgagagaagcctcgcacccactgtgtactggccccgctcaggccggcctggcacaccgttgcctgctggcggctctcatggggaagcgcctgggcactggggattgcttgtggcccactcaactcttggggcagtggcccgtaaccctagtttgcctgaggcccttatgtccccttatgttcctggtactggagcttgagctcttgcctggaacgctgcagctgcacccaccctgcttgatcccacctgggaggccaggacactgaggagctctgaacccagcccacagggaagcagaggaaggtgagcccccgccgccccccagcccttcccatcccttccctgctccctggtggtctaaggacccaagctccctagacttcctcttccaccgtctgtacgtttcaaattacactggtgtaggcctgtactgctggtggggctgggcccctaaacgccagaaagtgaatcttaagaagctctgccctaaactgagaaccacatgctgagggaagggctgaaaggtgaaggctcagcctccctcacatgggtcctgggttacattaggtaccgggctgattgataggcatttggccatggttccttttcgtctacctttgggggccttctcaggcccagaacaaggctgttgttactatgtggaaaagctgaccagtgctgcacactaggggcacacacctttccatgagcagctcctgccctgtggcgacagccagcgtgcacccagacgctggtgccatggcgaagcaggcgttcaagaccatggagaagacaactcctcatctagaaaatgaggacacctcagtgacaaacacacctttttataccaatcagtatcctctgttcattaaaactggctatccatt

SEQ ID NO: 107640 - DNA, 2156 bp, Homo sapiens
  Payload ID: 1125
  Gene Symbol: ANKRD23
  Gene Name: ankyrin repeat domain 23
  Uniprot ID: Q86SG2
  ENST ID: ENST00000418232
  CDS Start-End: 14-931
aacaggggggaccatggacttcatcagcattcagcagttggtaagtggagaaagagttgaagggaaagtgttgggatttggacatggagttcctgaccctggagcctggcctagtgactggaggaggggcccccaagaggctgtggcccgggagaagctgaaattggaagaagagaagaagaagaaacttgaaagatttaacagtaccagatttaatctggataacctggctgacttggaaaacttggttcaaagacggaaaaagcgactgagacacagagtcccccccaggaaacctgagcccctggttaagccgcagtcccaggcccaggtggagcctgtgggcctggagatgttcctgaaggcagctgctgagaaccaggagtacctgattgacaagtacttgacagacggaggggaccccaatgcccatgacaagctccaccgcaccgccttgcactgggcctgtctgaagggtcacagccagctggtgaacaagctgctggtggcaggtgccacagtggacgcgcgagacttgctggacaggacacctgtgttctgggcctgccgcggaggacatctggtcatcctcaaacagctgcttaaccagggagcccgggtcaatgcccgggacaagatcgggagcacccccctgcacgtggcagtgcgcacccggcaccccgactgcctggagcacctcatcgagtgtggcgcccacctgaacgcacaggataaggaaggggacacggctctgcacgaggccgtgcggcacggcagctacaaagccatgaagctactgctgctctatggggccgagctgggggtgcggaacgcggcctccgtgaccccggtgcagctggctcgagactggcagcgcggcatccgggaggccctgcaggcccacgtggcgcatccccgcacccggtgctgaccgcagcaccgccccccgccgcgcctttcgcactgccaccattccatcctgtgccccgcccccgcgtctgcacctctgtggttcctgccctcagccctggttcctccctctctggcctgtgccgcctcagcagccctggcagaactgaagagcggcaccgggcccagcaggcaaagagagaggcctccctggcttcgagtgtcaggggagccgcgttccctcccagggctggagcagaggaccacaaggcagcagaaagcgcgggtccagatgagggccaggaaggggaggagagtgagggccaagaacgagccttaagggagcagtcccaagctggagccacccagggctgggtctgggagtcctcagtgtccacttgtcccaggttagggggcttgccttgctctctccagggccagtctgtgtgtgtggggactcagcccgtggccggcagatgccatccaggatgtacaaggtgcagccaaggcaggccatgcaggggccgggcctgtctgcagctggtggatgcctgtgggcatggctttctctggggaccccattcctgtcagtagcaaccctggcagtgtccggagcggctctagacaactttggtcataggaactctggaggtgggttctggtcatctgaggtggctactcaacaggtttgaggccccacagcaacagaagtccaggacccactaggttgcctcagaagccctaagactgatgagctggagcgcgcatttgagagaagcctcgcacccactgtgtactggccccgctcaggccggcctggcacaccgttgcctgctggcggctctcatggggaagcgcctgggcactggggattgcttgtggcccactcaactcttggggcagtggcccgtaaccctagtttgcctgaggcccttatgtccccttatgttcctggtactggagcttgagctcttgcctggaacgctgcagctgcacccaccctgcttgatcccacctgggaggccaggacactgaggagctctgaacccagcccacagggaagcagaggaagctcctgccctgtggcgacagccagcgtgcacccagacgctggtgccatggcgaagcaggcgttcaagaccatggagaagacaactcctcatctagaaaatgaggacacctcagtgacaaacacacctttttataccaatcagtatcctctgttcattaaaactggctatccatta

SEQ ID NO: 107641 - DNA, 3711 bp, Homo sapiens
  Payload ID: 1126
  Gene Symbol: ANKRD24
  Gene Name: ankyrin repeat domain 24
  Uniprot ID: Q8TF21
  ENST ID: ENST00000262970
  CDS Start-End: 1-3711
atgcagccggcggcctgcgctggtgagggagccgggcccccggcgccgcgtcctcctcatcctccaggcgacaaggtcaggaggggccggggcggcgccccttccctcagcccccagcccccagccccctacctgggtcttcccattccatcccgtgggggagggggctggcgaggagggcaagggggagggggcggcaccagggagggcgggaccgggcgggcgggcggggcggggagctccggcagcgcccagccccgccctccggccgctccccgcggtccctccagaccctctggccgccgcctcctcttggaaccccgtgcgccccccgcgccccgcgccccggacgccatgaagcagctgtgtctgtgcgcagccgcctccttcgcgagtcaagactggggcaagagtgacgagaggctgctacaagccgtggaaaacaacgatgcacctcgggtggccgccctcatcgcccgcaaggggctggtgcccacgaagctagaccccgagggcaagtccgcgttccacctggcggccatgcggggtgcggccagctgtctggaggtgatgatagctcatggcagcaatgtcatgagcgcggacggggcaggttacaatgccctccacctggccgccaaatacgggcacccacagtgcttgaagcaactactgcaggcttcctgcgtggtggacgtcgtggacagcagcgggtggactgccctacaccatgcagcggctggtggctgtctctcctgctcagaggtgctctgctcctttaaggcacatctaaacccccaagatcggtcaggcgcaacacccctcattatagcagctcagatgtgtcacacagacctgtgccgtctcctactgcagcaaggggctgccgcgaacgatcaggacctgcaaggcaggacggccctgatgctggcctgtgagggggccagccccgaaacagtggaggtcctgctgcagggcggagcccagccgggcatcaccgatgcgctggggcaggacgcggctcactatggcgccctggcgggggacaaactcatcctgcaccttctgcaagaggcggcccagcgcccctccccacccagcgccctcacagaggatgattcaggcgaggcgtcatctcagaactctatgtccagccatggaaagcagggggcccccaagaagcggaaggcgcctccacctcccgccagcattcccatgccggatgatcgagatgcctatgaggagatcgtgaggctgcggcaggagaggggccgcctcctgcagaagatccggggcctggaacagcacaaggaacggaggcagcaggagtccccggaggccagctccctgcacatcctggagagacaggtgcaagagctacagcagttgctggtggagagacaagaggagaaggagagcctgggacgggaggtggagagtttgcagagccggctgtccctgctggagaacgagcgggagaatactagctatgacgtaaccaccctgcaggatgaggagggtgagctgcctgaccttccaggggccgaggtgctgctgtccagacaactcagtccgtcggcccaggaacacctggcctcgctgcaggaacaggtggctgtgctcaccagacagaaccaggaactgatggagaaggtccagatcctggagaactttgagaaggacgagacacagatggaagtggaagctttggcagaggtcatccctcttgccctctatgactctctccgggccgagtttgaccagctacgcaggcagcacgctgaggccctgcaggccctgaggcagcaggagacacgagaggtccccagagaagagggggcagcctgtggggagagtgaggttgctggagccacggccaccaaaaacgggccaacccacatggagctaaatggctcagtggctccagaaaccaaagttaacggagccgagaccatagatgaggaggctgcaggagatgaaaccatggaagccaggactatggaagctgaggccacgggagccgaggccacgggagctgaggccacaggagccaaggtcacagaaacaaaacccacaggggctgaggtcagagaaatggagaccacagaagaagaagcaaacatggaaactaagcccacaggagctcaggccacagacacagagaccacgggagtggaggccatgggggtggaggccacaaaaacaaaagcagaggaagcagaaatgcaggcctacggagtgggtgctgggcaagcagagcccccagtcacagggaccacaaacatggaggccacgggctctagggccacagggatggaatccacaggagtcagtgccacaggtgtggagaacccaggggtagaggccacggtcccggggatctctgctggccccatcctacatcctggtgccgcagaggcctcggaaaagcttcaagtagagctggagaccaggatccgtggcttggaggaggctctccggcagcgggagcgggaggcagctgcggagctggaggcggccctggggaagtgcgaggccgcggaggccgaggcaggccggctgcgagagcgtgtccgcgaggccgagggcagcggggccagcgggggcggtggcggtgacaccacacagctgcgggcggccctggagcaggcccgggaggacctccgagaccgggactcccgcctgcgggagctggaggcggcctcggcctgcctggatgaggctcgggccagccggctgctggcggaggaggaggcgcggggcctgcgggccgagctggcccagcgggaggaggcgcggctggagcagagccgggagctggaggttctgcgggagcagctggccacggccagggccacgggggagcagcagcgcacggcggccgcggaactgggccgggcacgggacgccgctgaggcccgagtggctgagctgcctgcggcctgcgaggaggcgcggcagggcctggccgagctgcgggaggcctccgaggccctccgccagtccgtggtgccggcctctgagcaccgccggctgcaggaggaggccctggagctgcggggccgggcagccagtctggagcaggaggtggtggccacgggcaaggaggccgcccggctgcgcgcggagctggagcgggagcgtgtgtgcagcgtggcgctctcggagcacgaacgcatcgtgggcaccctgcaggccaacgtggcccagctggaggggcagctggaggagctgggacggcggcatgagaagaccagcgcagaggtcttccaggtgcagcgtgaggccctgttcatgaagagtgagcgacacgcagccgaggcacagctggccacagcagagcagcagctacgggggctacggaccgaggcggaaagggctcgccaggcccagagccgggcccaggaggctctggacaaggccaaggagaaggacaagaagatcacagaactctccaaagaagtcttcaatcttaaggaagccttgaaggagcagccggccgccctcgccacccctgaggtggaggctctccgtgaccaggtgaaggatttacagcagcagctgcaggaagctgccagggaccactccagcgtggtggctttgtacagaagccacctcctatatgccattcagggccagatggatgaagatgtgcagcggattctcagccagattctgcagatgcagagactccaggctcagggccgctga

SEQ ID NO: 107642 - DNA, 3906 bp, Homo sapiens
  Payload ID: 1126
  Gene Symbol: ANKRD24
  Gene Name: ankyrin repeat domain 24
  Uniprot ID: Q8TF21
  ENST ID: ENST00000318934
  CDS Start-End: 157-3597
ctaggggccaggactggtcaggaaggaggaagcggtccttttgaggagggcgaggcaacggaccctgccgcccaccaggactggtgtccctcaccttacccccacccttgccctcctcaggtggcctgtggagaggagaaacacagggcaccaactatgaagactctcagggcgcgatttaagaagacagagctgcggctcagccccactgaccttggctcctgcccgccctgcggcccctgccccatcccgaagccggcagccagaggcaggcgccagagtcaagactggggcaagagtgacgagaggctgctacaagccgtggaaaacaacgatgcacctcgggtggccgccctcatcgcccgcaaggggctggtgcccacgaagctagaccccgagggcaagtccgcgttccacctggcggccatgcggggtgcggccagctgtctggaggtgatgatagctcatggcagcaatgtcatgagcgcggacggggcaggttacaatgccctccacctggccgccaaatacgggcacccacagtgcttgaagcaactactgcaggcttcctgcgtggtggacgtcgtggacagcagcgggtggactgccctacaccatgcagcggctggtggctgtctctcctgctcagaggtgctctgctcctttaaggcacatctaaacccccaagatcggtcaggcgcaacacccctcattatagcagctcagatgtgtcacacagacctgtgccgtctcctactgcagcaaggggctgccgcgaacgatcaggacctgcaaggcaggacggccctgatgctggcctgtgagggggccagccccgaaacagtggaggtcctgctgcagggcggagcccagccgggcatcaccgatgcgctggggcaggacgcggctcactatggcgccctggcgggggacaaactcatcctgcaccttctgcaagaggcggcccagcgcccctccccacccagcgccctcacagaggatgattcaggcgaggcgtcatctcagaactctatgtccagccatggaaagcagggggcccccaagaagcggaaggcgcctccacctcccgccagcattcccatgccggatgatcgagatgcctatgaggagatcgtgaggctgcggcaggagaggggccgcctcctgcagaagatccggggcctggaacagcacaaggaacggaggcagcaggagtccccggaggccagctccctgcacatcctggagagacaggtgcaagagctacagcagttgctggtggagagacaagaggagaaggagagcctgggacgggaggtggagagtttgcagagccggctgtccctgctggagaacgagcgggagaatactagctatgacgtaaccaccctgcaggatgaggagggtgagctgcctgaccttccaggggccgaggtgctgctgtccagacaactcagtccgtcggcccaggaacacctggcctcgctgcaggaacaggtggctgtgctcaccagacagaaccaggaactgatggagaaggtccagatcctggagaactttgagaaggacgagacacagatggaagtggaagctttggcagaggtcatccctcttgccctctatgactctctccgggccgagtttgaccagctacgcaggcagcacgctgaggccctgcaggccctgaggcagcaggagacacgagaggtccccagagaagagggggcagcctgtggggagagtgaggttgctggagccacggccaccaaaaacgggccaacccacatggagctaaatggctcagtggctccagaaaccaaagttaacggagccgagaccatagatgaggaggctgcaggagatgaaaccatggaagccaggactatggaagctgaggccacgggagccgaggccacgggagctgaggccacaggagccaaggtcacagaaacaaaacccacaggggctgaggtcagagaaatggagaccacagaagaagaagcaaacatggaaactaagcccacaggagctcaggccacagacacagagaccacgggagtggaggccatgggggtggaggccacaaaaacaaaagcagaggaagcagaaatgcaggcctacggagtgggtgctgggcaagcagagcccccagtcacagggaccacaaacatggaggccacgggctctagggccacagggatggaatccacaggagtcagtgccacaggtgtggagaacccaggggtagaggccacggtcccggggatctctgctggccccatcctacatcctggtgccgcagaggcctcggaaaagcttcaagtagagctggagaccaggatccgtggcttggaggaggctctccggcagcgggagcgggaggcagctgcggagctggaggcggccctggggaagtgcgaggccgcggaggccgaggcaggccggctgcgagagcgtgtccgcgaggccgagggcagcggggccagcgggggcggtggcggtgacaccacacagctgcgggcggccctggagcaggcccgggaggacctccgagaccgggactcccgcctgcgggagctggaggcggcctcggcctgcctggatgaggctcgggccagccggctgctggcggaggaggaggcgcggggcctgcgggccgagctggcccagcgggaggaggcgcggctggagcagagccgggagctggaggttctgcgggagcagctggccacggccagggccacgggggagcagcagcgcacggcggccgcggaactgggccgggcacgggacgccgctgaggcccgagtggctgagctgcctgcggcctgcgaggaggcgcggcagggcctggccgagctgcgggaggcctccgaggccctccgccagtccgtggtgccggcctctgagcaccgccggctgcaggaggaggccctggagctgcggggccgggcagccagtctggagcaggaggtggtggccacgggcaaggaggccgcccggctgcgcgcggagctggagcgggagcgtgtgtgcagcgtggcgctctcggagcacgaacgcatcgtgggcaccctgcaggccaacgtggcccagctggaggggcagctggaggagctgggacggcggcatgagaagaccagcgcagaggtcttccaggtgcagcgtgaggccctgttcatgaagagtgagcgacacgcagccgaggcacagctggccacagcagagcagcagctacgggggctacggaccgaggcggaaagggctcgccaggcccagagccgggcccaggaggctctggacaaggccaaggagaaggacaagaagatcacagaactctccaaagaagtcttcaatcttaaggaagccttgaaggagcagccggccgccctcgccacccctgaggtggaggctctccgtgaccaggtgaaggatttacagcagcagctgcaggaagctgccagggaccactccagcgtggtggctttgtacagaagccacctcctatatgccattcagggccagatggatgaagatgtgcagcggattctcagccagattctgcagatgcagagactccaggctcagggccgctgagaaaggccaggcccagtggctacactgaccacacccacgcagggacctcacccccctgcaggccccttgcagaccggcttcacttggcttcacttggccctatccaggcccatgcacttggagaccagcctggttccctgcccgaccacccccagctggctccatcaccccacctggtctctgcacgcacacactggtcagtctggacccgggccgtgactgcccctcccccaccaccggagactgtgattccctgtgtcctccacatccagacgccagcccaggaataaaggcattctgtgcacaggg

SEQ ID NO: 107643 - DNA, 2524 bp, Homo sapiens
  Payload ID: 1126
  Gene Symbol: ANKRD24
  Gene Name: ankyrin repeat domain 24
  ENST ID: ENST00000597689
  CDS Start-End: 6-2524
caactatgaagactctcagggcgcgatttaagaagacagagagtcaagactggggcaagagtgacgagaggctgctacaagccgtggaaaacaacgatgcacctcgggtggccgccctcatcgcccgcaaggggctggtgcccacgaagctagaccccgagggcaagtccgcgttccacctggcggccatgcggggtgcggccagctgtctggaggtgatgatagctcatggcagcaatgtcatgagcgcggacggggcaggttacaatgccctccacctggccgccaaatacgggcacccacagtgcttgaagcaactactgcaggcttcctgcgtggtggacgtcgtggacagcagcgggtggactgccctacaccatgcagcggctggtggctgtctctcctgctcagaggtgctctgctcctttaaggcacatctaaacccccaagatcggtcaggcgcaacacccctcattatagcagctcagatgtgtcacacagacctgtgccgtctcctactgcagcaaggggctgccgcgaacgatcaggacctgcaaggcaggacggccctgatgctggcctgtgagggggccagccccgaaacagtggaggtcctgctgcagggcggagcccagccgggcatcaccgatgcgctggggcaggacgcggctcactatggcgccctggcgggggacaaactcatcctgcaccttctgcaagaggcggcccagcgcccctccccacccagcgccctcacagaggatgattcaggcgaggcgtcatctcagaactctatgtccagccatggaaagcagggggcccccaagaagcggaaggcgcctccacctcccgccagcattcccatgccggatgatcgagatgcctatgaggagatcgtgaggctgcggcaggagaggggccgcctcctgcagaagatccggggcctggaacagcacaaggaacggaggcagcaggagtccccggaggccagctccctgcacatcctggagagacaggtgcaagagctacagcagttgctggtggagagacaagaggagaaggagagcctgggacgggaggtggagagtttgcagagccggctgtccctgctggagaacgagcgggagaatactagctatgacgtaaccaccctgcaggatgaggagggtgagctgcctgaccttccaggggccgaggtgctgctgtccagacaactcagtccgtcggcccaggaacacctggcctcgctgcaggaacaggtggctgtgctcaccagacagaaccaggaactgatggagaaggtccagatcctggagaactttgagaaggacgagacacagatggaagtggaagctttggcagaggtcatccctcttgccctctatgactctctccgggccgagtttgaccagctacgcaggcagcacgctgaggccctgcaggccctgaggcagcaggagacacgagaggtccccagagaagagggggcagcctgtggggagagtgaggttgctggagccacggccaccaaaaacgggccaacccacatggagctaaatggctcagtggctccagaaaccaaagttaacggagccgagaccatagatgaggaggctgcaggagatgaaaccatggaagccaggactatggaagctgaggccacgggagccgaggccacgggagctgaggccacaggagccaaggtcacagaaacaaaacccacaggggctgaggtcagagaaatggagaccacagaagaagaagcaaacatggaaactaagcccacaggagctcaggccacagacacagagaccacgggagtggaggccatgggggtggaggccacaaaaacaaaagcagaggaagcagaaatgcaggcctacggagtgggtgctgggcaagcagagcccccagtcacagggaccacaaacatggaggccacgggctctagggccacagggatggaatccacaggagtcagtgccacaggtgtggagaacccaggggtagaggccacggtcccggggatctctgctggccccatcctacatcctggtgccgcagaggcctcggaaaagcttcaagtagagctggagaccaggatccgtggcttggaggaggctctccggcagcgggagcgggaggcagctgcggagctggaggcggccctggggaagtgcgaggccgcggaggccgaggcaggccggctgcgagagcgtgtccgcgaggccgagggcagcggggccagcgggggcggtggcggtgacaccacacagctgcgggcggccctggagcaggcccgggaggacctccgagaccgggactcccgcctgcgggagctggaggcggcctcggcctgcctggatgaggctcgggccagccggctgctggcggaggaggaggcgcggggcctgcgggccgagctggcccagcgggaggaggcgcggctggagcagagccgggagctggaggttctgcgggagcagctggccacggccagggccacgggggagcagcagcgcac

SEQ ID NO: 107644 - DNA, 4026 bp, Homo sapiens
  Payload ID: 1126
  Gene Symbol: ANKRD24
  Gene Name: ankyrin repeat domain 24
  Uniprot ID: Q8TF21
  ENST ID: ENST00000600132
  CDS Start-End: 277-3717
gtggcctggaggactcatttaagaatcatgtgttgagtacctactttgtactgggcacactggagagcaaaggtggtaccatctatgccctggtggctgcgggtggacacaaacatgtgaccaggggccaggactggtcaggaaggaggaagcggtccttttgaggagggcgaggcaacggaccctgccgcccaccaggactggtgtccctcaccttacccccacccttgccctcctcaggtggcctgtggagaggagaaacacagggcaccaactatgaagactctcagggcgcgatttaagaagacagagctgcggctcagccccactgaccttggctcctgcccgccctgcggcccctgccccatcccgaagccggcagccagaggcaggcgccagagtcaagactggggcaagagtgacgagaggctgctacaagccgtggaaaacaacgatgcacctcgggtggccgccctcatcgcccgcaaggggctggtgcccacgaagctagaccccgagggcaagtccgcgttccacctggcggccatgcggggtgcggccagctgtctggaggtgatgatagctcatggcagcaatgtcatgagcgcggacggggcaggttacaatgccctccacctggccgccaaatacgggcacccacagtgcttgaagcaactactgcaggcttcctgcgtggtggacgtcgtggacagcagcgggtggactgccctacaccatgcagcggctggtggctgtctctcctgctcagaggtgctctgctcctttaaggcacatctaaacccccaagatcggtcaggcgcaacacccctcattatagcagctcagatgtgtcacacagacctgtgccgtctcctactgcagcaaggggctgccgcgaacgatcaggacctgcaaggcaggacggccctgatgctggcctgtgagggggccagccccgaaacagtggaggtcctgctgcagggcggagcccagccgggcatcaccgatgcgctggggcaggacgcggctcactatggcgccctggcgggggacaaactcatcctgcaccttctgcaagaggcggcccagcgcccctccccacccagcgccctcacagaggatgattcaggcgaggcgtcatctcagaactctatgtccagccatggaaagcagggggcccccaagaagcggaaggcgcctccacctcccgccagcattcccatgccggatgatcgagatgcctatgaggagatcgtgaggctgcggcaggagaggggccgcctcctgcagaagatccggggcctggaacagcacaaggaacggaggcagcaggagtccccggaggccagctccctgcacatcctggagagacaggtgcaagagctacagcagttgctggtggagagacaagaggagaaggagagcctgggacgggaggtggagagtttgcagagccggctgtccctgctggagaacgagcgggagaatactagctatgacgtaaccaccctgcaggatgaggagggtgagctgcctgaccttccaggggccgaggtgctgctgtccagacaactcagtccgtcggcccaggaacacctggcctcgctgcaggaacaggtggctgtgctcaccagacagaaccaggaactgatggagaaggtccagatcctggagaactttgagaaggacgagacacagatggaagtggaagctttggcagaggtcatccctcttgccctctatgactctctccgggccgagtttgaccagctacgcaggcagcacgctgaggccctgcaggccctgaggcagcaggagacacgagaggtccccagagaagagggggcagcctgtggggagagtgaggttgctggagccacggccaccaaaaacgggccaacccacatggagctaaatggctcagtggctccagaaaccaaagttaacggagccgagaccatagatgaggaggctgcaggagatgaaaccatggaagccaggactatggaagctgaggccacgggagccgaggccacgggagctgaggccacaggagccaaggtcacagaaacaaaacccacaggggctgaggtcagagaaatggagaccacagaagaagaagcaaacatggaaactaagcccacaggagctcaggccacagacacagagaccacgggagtggaggccatgggggtggaggccacaaaaacaaaagcagaggaagcagaaatgcaggcctacggagtgggtgctgggcaagcagagcccccagtcacagggaccacaaacatggaggccacgggctctagggccacagggatggaatccacaggagtcagtgccacaggtgtggagaacccaggggtagaggccacggtcccggggatctctgctggccccatcctacatcctggtgccgcagaggcctcggaaaagcttcaagtagagctggagaccaggatccgtggcttggaggaggctctccggcagcgggagcgggaggcagctgcggagctggaggcggccctggggaagtgcgaggccgcggaggccgaggcaggccggctgcgagagcgtgtccgcgaggccgagggcagcggggccagcgggggcggtggcggtgacaccacacagctgcgggcggccctggagcaggcccgggaggacctccgagaccgggactcccgcctgcgggagctggaggcggcctcggcctgcctggatgaggctcgggccagccggctgctggcggaggaggaggcgcggggcctgcgggccgagctggcccagcgggaggaggcgcggctggagcagagccgggagctggaggttctgcgggagcagctggccacggccagggccacgggggagcagcagcgcacggcggccgcggaactgggccgggcacgggacgccgctgaggcccgagtggctgagctgcctgcggcctgcgaggaggcgcggcagggcctggccgagctgcgggaggcctccgaggccctccgccagtccgtggtgccggcctctgagcaccgccggctgcaggaggaggccctggagctgcggggccgggcagccagtctggagcaggaggtggtggccacgggcaaggaggccgcccggctgcgcgcggagctggagcgggagcgtgtgtgcagcgtggcgctctcggagcacgaacgcatcgtgggcaccctgcaggccaacgtggcccagctggaggggcagctggaggagctgggacggcggcatgagaagaccagcgcagaggtcttccaggtgcagcgtgaggccctgttcatgaagagtgagcgacacgcagccgaggcacagctggccacagcagagcagcagctacgggggctacggaccgaggcggaaagggctcgccaggcccagagccgggcccaggaggctctggacaaggccaaggagaaggacaagaagatcacagaactctccaaagaagtcttcaatcttaaggaagccttgaaggagcagccggccgccctcgccacccctgaggtggaggctctccgtgaccaggtgaaggatttacagcagcagctgcaggaagctgccagggaccactccagcgtggtggctttgtacagaagccacctcctatatgccattcagggccagatggatgaagatgtgcagcggattctcagccagattctgcagatgcagagactccaggctcagggccgctgagaaaggccaggcccagtggctacactgaccacacccacgcagggacctcacccccctgcaggccccttgcagaccggcttcacttggcttcacttggccctatccaggcccatgcacttggagaccagcctggttccctgcccgaccacccccagctggctccatcaccccacctggtctctgcacgcacacactggtcagtctggacccgggccgtgactgcccctcccccaccaccggagactgtgattccctgtgtcctccacatccagacgccagcccaggaataaaggcattctgtgcacaggg

SEQ ID NO: 107645 - DNA, 736 bp, Homo sapiens
  Payload ID: 1126
  Gene Symbol: ANKRD24
  Gene Name: ankyrin repeat domain 24
  ENST ID: ENST00000595928
  CDS Start-End: 1-491
ctccccgcggtccctccagaccctctggccgccgcctcctcttggaaccccgtgcgccccccgcgccccgcgccccggacgccatgaagcagctgtgtctgtgcgcagccgcctccttcgcgagtcaagactggggcaagagtgacgagaggctgctacaagccgtggaaaacaacgatgcacctcgggtggccgccctcatcgcccgcaaggggctggtgcccacgaagctagaccccgagggcaagtccgcgttccacctggcggccatgcggggtgcggccagctgtctggaggtgatgatagctcatggcagcaatgtcatgagcgcggacggggcaggttacaatgccctccacctggccgccaaatacgggcacccacagtgcttgaagcaactactgcagagacagggtctcactgtgttggcccagcggctggtggctgtctctcctgctcagaggtgctctgctcctttaaggcacatctaaacccccaagatcggtcaggcgcaacacccctcattatagcagctcagatgtgtcacacagacctgtgccgtctcctactgcagcaaggggctgccgcgaacgatcaggacctgcaaggcaggacggccctgatgctggcctgtgagggggccagccccgaaacagtggaggtcctgctgcagggcggagcccagccgggcatcaccgatgcgctggggcaggacgcggctcactatggcgccctg

SEQ ID NO: 107646 - DNA, 6591 bp, Homo sapiens
  Payload ID: 1127
  Gene Symbol: ANKRD26
  Gene Name: ankyrin repeat domain 26
  Uniprot ID: Q9UPS8
  ENST ID: ENST00000376087
  CDS Start-End: 167-5299
gtctagcgggatcgcttgcttggtaacccggagggagagattggaaaccgcggagtttcctttgggaggctgcggccagccggggctgacttgttatgttgggctccggaggccgttaagagccgagagagacatgaggtgtctctgaagcccggtcgcctgggccatgaagaagatttttagtaagaagggcgagtcgcccttgggctccttcgcgcggcggcagaggagcagcgcgggaggcgggggcgagccgggggagggcgcctactcgcagcccggctaccacgtccgagaccgagatctcggcaagatccacaaagctgccagcgcgggtaatgtggcgaaagtgcagcagatccttttgctcaggaagaatggcttgaacgatagagacaagatgaacaggacggctctacatttggcctgtgccaatggtcatccagaagtagtaactctcctggtggacagaaaatgccagctcaatgtctgtgacaacgaaaacaggacagctctgatgaaggctgtacaatgccaggaagagaaatgtgcaactattctgctagaacatggtgctgatccaaatcttgcggatgtccatggcaacactgctcttcactatgctgtctataatgaggacatatcagtagcaacaaagctgcttttgtatgatgcaaatattgaagcaaaaaacaaggatgacctcacaccacttttacttgcagtaagtggaaaaaagcagcaaatggtggaatttttaataaagaaaaaagcaaatgtaaatgcagtagataagttggaaagcagtcaccaactaatttcagaatataaagaagaaaggatacctaaacattcttctcaaaatagtaattcagtggatgaaagctctgaagactccttaagcaggctttctggcaaaccgggtgttgatgattcatggcctacctcagatgacgaagacctcaattttgatactaagaatgtcccaaaaccaagcttagcaaagctaatgactgcttctcagcaatccaggaaaaatttagaagcaacatatggcactgtgagaacaggaaatagaactttgtttgaggatagagattccgatagtcaagatgaagttgtggttgaaagccttcctacaacatcaatcaaagtccagtgcttttctcatcctacctatcaatcacctgaccttcttccaaaaccttcccacaagtcgttagcaaaccctggtcttatgaaggaagaaccaacaaagccaggcattgcaaaaaaagaaaatggtattgatattattgaaagtgctccactagagcaaacaaataatgacaatttgacttatgttgatgaagtgcacaaaaataatagaagtgatatgatgtccgcattaggattaggacaagaggaagatatagaatcaccttgggattctgagagtatctctgagaattttccacagaagtatgttgatcctttagctggggctgcagacggaaaagaaaaaaatataggaaatgaacaagcagaagatgtgttttatataccttcttgcatgagtggatcaagaaactttaagatggctaaactagaggatacaagaaatgtaggcatgccagtagcccacatggagtctcctgagagatatcttcacttgaagcctaccattgaaatgaaagattctgttccaaataaagcaggaggaatgaaggatgtacaaacatccaaagcagctgaacatgacttagaagtagcatcagaagaagagcaagaaagggaagggagtgaaaataaccagccacaggttgaagaagaaaggaaaaaacacagaaataatgaaatggaagtatcagcaaacatacatgatggtgctactgatgatgctgaagatgatgatgatgatgatggattaattcaaaaaagaaagagtggagaaactgatcatcagcaatttcccaggaaggaaaataaagagtatgctagtagtggtcctgccttgcaaatgaaggaagtaaagagcactgaaaaagaaaaacggacctcgaaagaatctgtgaattcaccagtgtttgggaaggccagtttactaactggtggcctgctacaagtggatgatgacagcagtttaagtgaaatagatgaggatgaaggaaggcctactaagaaaacatctaatgaaaagaacaaggtcaaaaaccaaatacagtctatggatgatgttgatgacttaactcagtcatctgaaacagcctcagaggattgtgagctaccccactctagttacaagaattttatgttgctcattgaacaacttggaatggagtgtaaagattctgttagcctattgaaaatccaggatgcagctctttcatgtgaaagattattagaacttaaaaaaaatcactgtgaactacttacagtaaaaattaaaaaaatggaagacaaggttaatgtactacaaagggagctatctgaaacaaaagaaataaaatcacagttagagcatcaaaaagttgaatgggaacgagaactgtgctctttgagatttagcttaaaccaagaagaagagaagagaagaaatgctgatacgttgtatgaaaaaattagggaacagttaagaagaaaagaagagcaatataggaaagaagttgaagtgaaacaacagcttgaactgagtctccaaacactggagatggaattgaggactgtaaaaagtaatttgaatcaggtcgttcaagagcgaaatgacgctcagaggcaactttctcgagaacagaatgccagaatgttacaagatggaattctgaccaatcacctttccaaacaaaaggagattgaaatggctcaaaagaaaatgaattctgagaattctcatagtcatgaagaagaaaaagacctatcgcataaaaatagcatgttgcaggaagaaattgctatgctaagactagaaatagacacaataaaaaatcaaaaccaggaaaaagaaaagaaatgttttgaggaccttaaaattgtaaaagaaaagaatgaagaccttcagaagactataaaacagaatgaggaaacattaacacaaacaatatcccagtataatggacggcttagtgttctgacagctgagaatgcaatgctaaattctaaactggagaatgaaaagcaaagcaaggaaagactggaagcagaagttgaatcataccattctagattggctgctgctatacatgatcgtgatcaaagtgagacatcaaaaagagaactagaacttgctttccagagagcaagagatgaatgttctcgtttacaggacaaaatgaattttgatgtgtctaacctaaaagataacaatgagattctttctcaacaactatttaaaactgaaagtaaactcaatagcctagaaattgagttccatcacacgagagatgccctcagagaaaagactttgggtttagaacgggtacaaaaggacctaagccaaacacagtgtcaaatgaaggaaatggaacaaaagtatcaaaatgaacaagttaaagtgaataaatacattggaaagcaggagtctgtagaggagagattgtctcaactacaaagtgagaatatgttgcttcgacaacaactggatgatgcccacaacaaggctgacaataaagagaagacagtgattaatatccaagaccagtttcatgctattgtgcaaaaacttcaagctgagagtgaaaagcaaagtcttctgctagaagaaagaaataaggagttaatcagtgaatgtaatcacttaaaagaaagacagtatcaatatgaaaatgaaaaggcagaaagagaagttgttgtgagacaacttcaacaagaactagctgataccctaaaaaaacaatctatgtcagaggcttcactggaggttacgtcacgttatcgtattaatttagaagatgagacacaggatttaaagaagaaattaggtcaaatcagaaatcaattgcaagaagcacaggatcgacatacagaagctgtcagatgtgctgagaagatgcaagatcacaagcaaaagcttgaaaaagataatgccaagttaaaagttacagtcaaaaagcaaatggacaaaattgaggagcttcagaaaaacctgttaaatgcaaatttgtctgaagatgaaaaggaacaattaaagaaacttatggaattaaaacagtcactggaatgtaatttggatcaagaaatgaagaaaaatgttgaattagaaagagagataactggatttaagaacctcttaaaaatgacaagaaagaagttaaatgaatatgaaaatggagaatttagtttccatggagatttaaaaactagtcaatttgaaatggatattcagattaataagctaaaacataagattgatgatcttacagcagaactggagactgcaggttcaaaatgtctacatctggatacaaagaaccaaattcttcaagaggagttgttatctatgaaaacagtacaaaagaaatgtgaaaaactacagaagaataaaaagaagttggaacaagaagtgatcaacctgagaagtcatatagaaaggaatatggtagaacttggtcaagtcaaacagtataaacaggagattgaagaaagagcaagacaggaaatagcagaaaaattaaaagaagtcaatctatttttacaggcacaagcagcatctcaagaaaacttagagcagtttagagagaataattttgcttcaatgaaaagtcagatggaactcagaattaaagatctggaatctgaactctccaaaataaaaacttctcaagaagactttaataaaaccgaactggaaaaatataagcaactctatctagaagaattaaaagttagaaaatctttgtcaagtaaactaaccaaaactaatgagaggctagcagaggtcaacaccaaacttcttgtggaaaaacagcagagcagatctttgttcaccactctcactaccaggccagtcatggagccaccttgtgtgggaaatcttaataatagtttagatctcaacagaaaacttattccaagagaaaacttagtgatctctacctcaaatccacgggcttcaaataatagcatggagaactacttgagcaagatgcagcaggagttggaaaaaaatataactagagaactcaaagaagctgctgctgaattggaatctggatcaatagcttcccctctagggtctactgatgagtcaaatctaaatcaagatctagtttggaaagcatcaagagaatatgtacaggttttaaagaaaaattatatgatctgaaagataagattttattactgggctgtttatgtgacattttgtttctcattaaatattaatatatgacatgtaaaaatattaaaggaacgtatttttgtatcatatatgtcagatcaaaatttatatagtattttaaacaatgttacttggcttctttaacttttaagtggattttgccaatgaaaaccaggaatattgagttttacatactcaaactgcccaaatgtgagctgtttaaacagccaaaccactaagttgtcattaatactttagtgcagttaattgatggcttatttgtattttgtaatttttatcactatatgtagtggtagatgtctaattggacttagacatcattttgttgtgcaggaactgtggtcattgttcatgtttggatgtattacaattgttacagtgccatcaaatttacataattttaattttaagcactgatttatatagctgttctcagggagaaacaagatttgcctgattcaccttttctgtttgtttatttatttttaattaaccttttggaaatagccttcagtttagagaaaatttcgaagttttagtacaaagactttctcctccgaacaatttgagagtaaattgctgacattatgtcatcacccctgattactttagtgggcattcctacaagtcaggacattctacataactacagtgcaaaccttgcaatcagaaagtcaacattaatacattctagtttgttacttctctgtaatgtcctttatagcaaaaggatcccattctaatccatggcttgtatttagttgttgtatctgttagatctttcagtctggaacagttcctcagtctttccttgaccttcatgaccttgaatattttgaagagtaaagtctggtaatataagaatgtccctcaattgggtttcatggtgattagatttagattatatgattttttggcaggagtatcacagaagtgacccagtgatcttctcattgcatcttacctgtgaccctacagttttgatttgccctgttactggtaatgttagcattgatcactaacagtggtatctgctgaatttctcctctgtaatgttattttttcaccttgtggttaattagtattttacagggaggtaatttgagactatgtacatatctctactccccatcgaaccctcaatttattcatttgcttgtatcaaataaaccatggattcatggtttattttattcagtgagttataattcattaatattgttattaaaaatttgtttttcttttaagaaatgtta

SEQ ID NO: 107647 - DNA, 761 bp, Homo sapiens
  Payload ID: 1127
  Gene Symbol: ANKRD26
  Gene Name: ankyrin repeat domain 26
  ENST ID: ENST00000445828
  CDS Start-End: 1-640
gtttagagagaataattttgcttcaatgaaaagtcagatggaactcagaattaaagatctggaatctgaactctccaaaataaaaacttctcaagaagactttaataaaaccgaactggaaaaatataagcaactctatctagaagaattaaaagttagaaaatctttgtcaagtaaactaaccaaaactaatgagaggctagcagaggtcaacaccaaacttcttgtggaaaaacagcagagcagatctttgttcaccactctcactaccaggccagtcatggagccaccttgtgtgggaaatcttaataatagtttagatctcaacagaaaacttattccaagagaaaacttagtgatctctacctcaaatccacgggcttcaaataatagcatggagaactacttgagcaagatgcagcaggagttggaaaaaaatataactagagaactcaaagaagctgctgctgaattggaatctggatcaatagcttcccctctagggtctactgatgagtcaaatctaaatcaagatctagtttggaaagcatcaagagaatatggaccttctgatgaaacccctcatgactatgttctgatgactgaccaatgtctcacttccaggacagacctgcaatagatgccactggataatgctgagatagactggtgcaggacaaaggacagaactcaaagtcatccctctgctgacctgagacaaatgtgtatctgagtgcttcctccgccctattgtctatgtc

SEQ ID NO: 107648 - DNA, 6827 bp, Homo sapiens
  Payload ID: 1127
  Gene Symbol: ANKRD26
  Gene Name: ankyrin repeat domain 26
  ENST ID: ENST00000436985
  CDS Start-End: 173-5353
acttgtgtctagcgggatcgcttgcttggtaacccggagggagagattggaaaccgcggagtttcctttgggaggctgcggccagccggggctgacttgttatgttgggctccggaggccgttaagagccgagagagacatgaggtgtctctgaagcccggtcgcctgggccatgaagaagatttttagtaagaagggcgagtcgcccttgggctccttcgcgcggcggcagaggagcagcgcgggaggcgggggcgagccgggggagggcgcctactcgcagcccggctaccacgtccgagaccgagatctcggcaagatccacaaagctgccagcgcgggtaatgtggcgaaagtgcagcagatccttttgctcaggaagaatggcttgaacgatagagacaagatgaacaggacggctctacatttggcctgtgccaatggtcatccagaagtagtaactctcctggtggacagaaaatgccagctcaatgtctgtgacaacgaaaacaggacagctctgatgaaggctgtacaatgccaggaagagaaatgtgcaactattctgctagaacatggtgctgatccaaatcttgcggatgtccatggcaacactgctcttcactatgctgtctataatgaggacatatcagtagcaacaaagctgcttttgtatgatgcaaatattgaagcaaaaaacaaggatgacctcacaccacttttacttgcagtaagtggaaaaaagcagcaaatggtggaatttttaataaagaaaaaagcaaatgtaaatgcagtagataagttggaaagcagtcaccaactaatttcagaatataaagaagaaaggatacctaaacattcttctcaaaatagtaattcagtggatgaaagctctgaagactccttaagcagtttattttattttattttttttgagacaaagtcttgcactgttgcccaggctggagtgctacagcatgatctcagctcactgcaatctctgcttcctgggttcacacaattcttctgcctccacctcccaagtagctgggaccacaggctttctggcaaaccgggtgttgatgattcatggcctacctcagatgacgaagacctcaattttgatactaagaatgtcccaaaaccaagcttagcaaagctaatgactgcttctcagcaatccaggaaaaatttagaagcaacatatggcactgtgagaacaggaaatagaactttgtttgaggatagagattccgatagtcaagatgaagttgtggttgaaagccttcctacaacatcaatcaaagtccagtgcttttctcatcctacctatcaatcacctgaccttcttccaaaaccttcccacaagtcgttagcaaaccctggtcttatgaaggaagaaccaacaaagccaggcattgcaaaaaaagaaaatggtattgatattattgaaagtgctccactagagcaaacaaataatgacaatttgacttatgttgatgaagtgcacaaaaataatagaagtgatatgatgtccgcattaggattaggacaagaggaagatatagaatcaccttgggattctgagagtatctctgagaattttccacagaagtatgttgatcctttagctggggctgcagacggaaaagaaaaaaatataggaaatgaacaagcagaagagtctcctgagagatatcttcacttgaagcctaccattgaaatgaaagattctgttccaaataaagcaggaggaatgaaggatgtacaaacatccaaagcagctgaacatgacttagaagtagcatcagaagaagagcaagaaagggaagggagtgaaaataaccagccacaggttgaagaagaaaggaaaaaacacagaaataatgaaatggaagtatcagcaaacatacatgatggtgctactgatgatgctgaagatgatgatgatgatgatggattaattcaaaaaagaaagagtggagaaactgatcatcagcaatttcccaggaaggaaaataaagagtatgctagtagtggtcctgccttgcaaatgaaggaagtaaagagcactgaaaaagaaaaacggacctcgaaagaatctgtgaattcaccagtgtttgggaaggccagtttactaactggtggcctgctacaagtggatgatgacagcagtttaagtgaaatagatgaggatgaaggaaggcctactaagaaaacatctaatgaaaagaacaaggtcaaaaaccaaatacagtctatggatgatgttgatgacttaactcagtcatctgaaacagcctcagaggattgtgagctaccccactctagttacaagaattttatgttgctcattgaacaacttggaatggagtgtaaagattctgttagcctattgaaaatccaggatgcagctctttcatgtgaaagattattagaacttaaaaaaaatcactgtgaactacttacagtaaaaattaaaaaaatggaagacaaggttaatgtactacaaagggagctatctgaaacaaaagaaataaaatcacagttagagcatcaaaaagttgaatgggaacgagaactgtgctctttgagatttagcttaaaccaagaagaagagaagagaagaaatgctgatacgttgtatgaaaaaattagggaacagttaagaagaaaagaagagcaatataggaaagaagttgaagtgaaacaacagcttgaactgagtctccaaacactggagatggaattgaggactgtaaaaagtaatttgaatcaggtcgttcaagagcgaaatgacgctcagaggcaactttctcgagaacagaatgccagaatgttacaagatggaattctgaccaatcacctttccaaacaaaaggagattgaaatggctcaaaagaaaatgaattctgagaattctcatagtcatgaagaagaaaaagacctatcgcataaaaatagcatgttgcaggaagaaattgctatgctaagactagaaatagacacaataaaaaatcaaaaccaggaaaaagaaaagaaatgttttgaggaccttaaaattgtaaaagaaaagaatgaagaccttcagaagactataaaacagaatgaggaaacattaacacaaacaatatcccagtataatggacggcttagtgttctgacagctgagaatgcaatgctaaattctaaactggagaatgaaaagcaaagcaaggaaagactggaagcagaagttgaatcataccattctagattggctgctgctatacatgatcgtgatcaaagtgagacatcaaaaagagaactagaacttgctttccagagagcaagagatgaatgttctcgtttacaggacaaaatgaattttgatgtgtctaacctaaaagataacaatgagattctttctcaacaactatttaaaactgaaagtaaactcaatagcctagaaattgagttccatcacacgagagatgccctcagagaaaagactttgggtttagaacgggtacaaaaggacctaagccaaacacagtgtcaaatgaaggaaatggaacaaaagtatcaaaatgaacaagttaaagtgaataaatacattggaaagcaggagtctgtagaggagagattgtctcaactacaaagtgagaatatgttgcttcgacaacaactggatgatgcccacaacaaggctgacaataaagagaagacagtgattaatatccaagaccagtttcatgctattgtgcaaaaacttcaagctgagagtgaaaagcaaagtcttctgctagaagaaagaaataaggagttaatcagtgaatgtaatcacttaaaagaaagacagtatcaatatgaaaatgaaaaggcagaaagagaagttgttgtgagacaacttcaacaagaactagctgataccctaaaaaaacaatctatgtcagaggcttcactggaggttacgtcacgttatcgtattaatttagaagatgagacacaggatttaaagaagaaattaggtcaaatcagaaatcaattgcaagaagcacaggatcgacatacagaagctgtcagatgtgctgagaagatgcaagatcacaagcaaaagcttgaaaaagataatgccaagttaaaagttacagtcaaaaagcaaatggacaaaattgaggagcttcagaaaaacctgttaaatgcaaatttgtctgaagatgaaaaggaacaattaaagaaacttatggaattaaaacagtcactggaatgtaatttggatcaagaaatgaagaaaaatgttgaattagaaagagagataactggatttaagaacctcttaaaaatgacaagaaagaagttaaatgaatatgaaaatggagaatttagtttccatggagatttaaaaactagtcaatttgaaatggatattcagattaataagctaaaacataagattgatgatcttacagcagaactggagactgcaggttcaaaatgtctacatctggatacaaagaaccaaattcttcaagaggagttgttatctatgaaaacagtacaaaagaaatgtgaaaaactacagaagaataaaaagaagttggaacaagaagtgatcaacctgagaagtcatatagaaaggaatatggtagaacttggtcaagtcaaacagtataaacaggagattgaagaaagagcaagacaggaaatagcagaaaaattaaaagaagtcaatctatttttacaggcacaagcagcatctcaagaaaacttagagcagtttagagagaataattttgcttcaatgaaaagtcagatggaactcagaattaaagatctggaatctgaactctccaaaataaaaacttctcaagaagactttaataaaaccgaactggaaaaatataagcaactctatctagaagaattaaaagttagaaaatctttgtcaagtaaactaaccaaaactaatgagaggctagcagaggtcaacaccaaacttcttgtggaaaaacagcagagcagatctttgttcaccactctcactaccaggccagtcatggagccaccttgtgtgggaaatcttaataatagtttagatctcaacagaaaacttattccaagagaaaacttagtgatctctacctcaaatccacgggcttcaaataatagcatggagaactacttgagcaagatgcagcaggagttggaaaaaaatataactagagaactcaaagaagctgctgctgaattggaatctggatcaatagcttcccctctagggtctactgatgagtcaaatctaaatcaagatctagtttggaaagcatcaagagaatatgtacaggttttaaagaaaaattatatgatctgaaagataagattttattactgggctgtttatgtgacattttgtttctcattaaatattaatatatgacatgtaaaaatattaaaggaacgtatttttgtatcatatatgtcagatcaaaatttatatagtattttaaacaatgttacttggcttctttaacttttaagtggattttgccaatgaaaaccaggaatattgagttttacatactcaaactgcccaaatgtgagctgtttaaacagccaaaccactaagttgtcattaatactttagtgcagttaattgatggcttatttgtattttgtaatttttatcactatatgtagtggtagatgtctaattggacttagacatcattttgttgtgcaggaactgtggtcattgttcatgtttggatgtattacaattgttacagtgccatcaaatttacataattttaattttaagcactgatttatatagctgttctcagggagaaacaagatttgcctgattcaccttttctgtttgtttatttatttttaattaaccttttggaaatagccttcagtttagagaaaatttcgaagttttagtacaaagactttctcctccgaacaatttgagagtaaattgctgacattatgtcatcacccctgattactttagtgggcattcctacaagtcaggacattctacataactacagtgcaaaccttgcaatcagaaagtcaacattaatacattctagtttgttacttctctgtaatgtcctttatagcaaaaggatcccattctaatccatggcttgtatttagttgttgtatctgttagatctttcagtctggaacagttcctcagtctttccttgaccttcatgaccttgaatattttgaagagtaaagtctggtaatataagaatgtccctcaattgggtttcatggtgattagatttagattatatgattttttggcaggagtatcacagaagtgacccagtgatcttctcattgcatcttacctgtgaccctacagttttgatttgccctgttactggtaatgttagcattgatcactaacagtggtatctgctgaatttctcctctgtaatgttattttttcaccttgtggttaattagtattttacagggaggtaatttgagactatgtacatatctctactccccatcgaaccctcaatttattcatttgcttgtatcaaataaaccatggattcatggtttattttattcagtgagttataattcattaatattgttattaaaaatttgtttttcttttaagaaatgttatattttgacaacttcagacttacagaaagattataagaggtagtacaaataatttttggatattattccccaaatgttaacattttactgcatttactttatcctttctcccccttctcctcctgtctttctagatgaatatgaatataggtacttaatacagattttttttctaaactgtt

SEQ ID NO: 107649 - DNA, 4450 bp, Homo sapiens
  Payload ID: 1128
  Gene Symbol: ANKRD27
  Gene Name: ankyrin repeat domain 27 (VPS9 domain)
  Uniprot ID: Q96NW4
  ENST ID: ENST00000306065
  CDS Start-End: 160-3312
ggagtaaggggtgggctatagggccagatcgccgcgcgagggtggtgggcatcgaggtcccagcagcggacgagggaggtgccgccgtcgcccaggatgggctgggaatgaagcgatgtagccttttaagagatttgctctgacccatctgaagtccatatggctctgtatgatgaagacctcctgaaaaatcctttctatctggctctgcaaaagtgccgccctgacttgtgcagcaaagtggcccaaatccatggcattgtcttagtaccctgcaaaggaagcctgtcgagcagcatccagtctacttgtcagtttgagtcctacattttgatacctgtggaagagcattttcagaccttaaatggaaaggatgtctttattcaagggaacaggattaaattaggagctggttttgcctgtcttctctcagtgcccattctctttgaagaaactttctacaatgaaaaagaagagagtttcagcatcctgtgtatagcccatcctttggaaaagagagagagttcagaagagcctttggcaccctcagatcccttttccctgaaaaccattgaagatgtgagagagttcttgggaagacactccgagcgatttgacaggaacatcgcctctttccatcgaacattccgagaatgcgagagaaagagcctccgtcaccacatagactcagcgaatgctctctacaccaaatgcctccagcagcttctgagggactctcacctgaaaatgctcgccaagcaggaggcccagatgaacctgatgaagcaggcagtggagatatacgtccatcatgaaatttacaacctgatctttaaatacgtggggaccatggaggcaagtgaggatgcggcctttaacaaaatcacaagaagccttcaagatcttcagcagaaagatattggtgtgaaaccggagttcagctttaacatacctcgtgccaaaagagagctggctcagctgaacaaatgcacctccccacagcagaagcttgtctgcttgcgaaaagtggtgcagctcattacacagtctccaagccagagagtgaacctggagaccatgtgtgctgatgatctgctatcagtcctgttatacttgcttgtgaaaacggagatccctaattggatggcaaatttgagttacatcaaaaacttcaggtttagcagcttggcaaaggatgaactgggatactgcctgacctcattcgaagctgccattgaatatattcggcaaggaagcctctctgctaaaccccctgagtctgagggatttggagacaggctgttccttaagcagagaatgagcttactctctcagatgacttcgtctcccaccgactgcctgtttaagcacattgcatcaggtaaccagaaagaagtggagagacttctgagccaagaggaccatgataaagataccgtccaaaagatgtgtcaccctctctgcttctgcgatgactgtgagaaactcgtctctgggaggttgaatgatccctcagttgtcactccattctccagagacgacagggggcacacccctctccatgtggctgctgtctgtgggcaggcatccctcatcgacctcctggtttccaagggcgccatggtaaatgccacagactaccatggagccactccgctccacctggcctgtcagaagggctaccagagcgtgacgctgctgctgctgcactacaaggccagcgcggaagtgcaggacaacaatgggaatacgccactccacctggcctgcacctacggccacgaggactgtgtgaaggctctggtttactacgacgtggagtcgtgcagacttgacattggcaatgagaaaggagacacccctctacacattgctgcccgctggggctaccaaggcgtcatagagacattgctgcagaacggagcgtccaccgagatccagaacagactgaaggagacgcccctcaagtgtgcattaaactcaaagattctgtctgtaatggaagcctatcacctgtccttcgagaggaggcagaagtcgtccgaggcccctgtgcagtccccgcagcgctccgtggactccatcagccaagagtcctccacttccagcttctcctccatgtcagccagctcaaggcaggaggagaccaagaaggactacagagaggtagaaaaacttttgagagcagttgctgatggagatctagaaatggtgcgttacctgttggaatggacagaggaggacctggaggatgcggaggacactgtcagtgcagcggaccccgaattctgtcacccgttgtgccagtgccccaagtgtgccccagctcagaagaggctggcgaaggttcctgccagtgggcttggtgtgaacgtgaccagccaggacggctcctccccgctgcatgtcgccgccctgcacggccgggcggacctcatccccctcctgctgaagcacggggccaacgcaggtgccaggaacgcagaccaagccgtcccgctccacctggcctgccagcagggccactttcaggtggtgaagtgtctgttagattcgaatgcaaaacccaataagaaggacctcagtggaaacacgcccctcatttacgcctgctccggtggccatcacgagcttgtggcactgctgctacagcacggggcctccattaacgcttctaacaataagggcaacacagcgctgcacgaggctgtgattgaaaagcacgtcttcgtggtagagctgcttctgctccacggagcgtcagttcaggtgctgaacaagcggcagcgcacggctgtagactgtgctgaacagaattcaaaaataatggaattgcttcaggtggtaccaagctgtgttgcttcattagatgatgtggctgaaactgaccgcaaggagtatgtcactgttaagatcaggaaaaaatggaactcaaaactgtatgatctaccagatgagccttttacaagacagttttactttgtccactcagctggtcagtttaagggaaagacttcaagggagattatggcaagagatagaagtgtccctaatttaaccgaaggttctttgcatgagccagggaggcaaagtgtcacactgagacagaataacctgccagctcagagtggatctcatgctgctgagaaaggcaacagcgactggccagagaggcctggactgacacagactggccctggacacagacggatgctgcggagacacacggtagaggatgcggtcgtgtcccagggcccggaggctgctggccccctctccactccccaagaggttagtgcttcccggtcctaacaggaatgaggagttgttgaacccactgctaggaagcaaggatgcaacaagatgatgctgagcgtgaacacatctgagaactaaatgtgcttccatgagactggcttgagaagtcttcagcaccaagttcctgaaagcttttctgtggcaggaaagaatgcaacaaaaaagttaaccaccaccatctctctcctcttcaaagctaatgaatacaattgaaacagacaaaaattccagtagcatccagatccttaagccagaggtgcatgcttctttttaagtatgagggtttgttggtcacagtgggagaggtttcaccaccgcattctgacctcctcctcccaaaaggtgctaaacctctctgacctgtgtacattcacaaaccacagctagaattcctccacctaggattaagctggagagaagtaagtaatttaggtttcatggtactgtagaggccaggctgaaatgtcatatctgaaggaagaaagcagcagctggacaatgtttctttgcaaagcaacactcgaaccaaaagatgcctcaatcccattttgatattcattttagtgaaaggatgcatcagacctgttccacatcatgcacatgggaaagggtggttatcattttccttctaacaagtaggtacagatattcggttactacacgtgcacctgtagcagtatttctagaaacatccctttttgttgagaacctcccttgaatgtctgtcacactcacacctgacgggatggttactggattagagagtagatttggcacatcttttcttagtcttttgattcaaattcaaaacttaacagcacaaaccaggtcagagttactttcggttagaatttattgccatttattcctttttataaatttctatagattatactgttatttttatgttattggcctagagctacacgtatatgggtttgtcctgagtccgttttcaaatgaccttgtgatagggaaatggttttgtccatgttcttggaaatacttgtgtatgtacagaaggaagggagggattatttttctacaaagtaatttatgatttctaattttctaatgtgccttggatatgtgccaaatgatggaaaagaaacagtaaactttatgattcttg

SEQ ID NO: 107650 - DNA, 628 bp, Homo sapiens
  Payload ID: 1128
  Gene Symbol: ANKRD27
  Gene Name: ankyrin repeat domain 27 (VPS9 domain)
  ENST ID: ENST00000591100
  CDS Start-End: 106-628
tggaggcaagtgaggatgcggcctttaacaaaatcacaagaagccttcaagatcttcagcagaaagatattggtgtgaaaccggagttcagtgaacctggagaccatgtgtgctgatgatctgctatcagtcctgttatacttgcttgtgaaaacggagatccctaattggatggcaaatttgagttacatcaaaaacttcaggtttagcagcttggcaaaggatgaactgggatactgcctgacctcattcgaagctgccattgaatatattcggcaaggaagcctctctgctaaaccccctgagtctgagggatttggagacaggctgttccttaagcagagaatgagcttactctctcagatgacttcgtctcccaccgactgcctgtttaagcacattgcatcaggtaaccagaaagaagtggagagacttctgagccaagaggaccatgataaagataccgtccaaaagatgtgtcaccctctctgcttctgcgatgactgtgagaaactcgtctctgggaggttgaatgatccctcagttgtcactccattctccagagacgacagggggcacacccctctccatgtggctgctgtctgtgggcaggcatccctcatcgacc

SEQ ID NO: 107651 - DNA, 1067 bp, Homo sapiens
  Payload ID: 1128
  Gene Symbol: ANKRD27
  Gene Name: ankyrin repeat domain 27 (VPS9 domain)
  ENST ID: ENST00000590519
  CDS Start-End: 843-1067
gcggccgccgcggcgcgtgcagcgggaacgcggcgcccagctccagcgcgcgtcgcatgtccgcttccagcaggtccaggcagcccgagaaggccacccagagccgctcgaactcggcgcgctcgtcggcggccaggccccggtcgcgcagcacagcagtcagccgggcgcaggtggacaccgccagctcctgcgccttctggcgcgtcttttgcagctcctgccgcaggttctgcgagtccgccgagccaccgacggtcagcaccaggtggtggtagcacgcagtcgtcttgttgagcccgtccagcagcgccttgcactcctccctcgccatcgcggtgggctccggctgggcccggccgcccgcgcccgttagcctccccctcagcgcggcaggatgtggctaacccccatcccggccttgggccgcgcggcacgaacgctcttcatggtccgtgactcgctcggcgctaccgccaacgtccacggagcccgcccgggaccctcgacgtgcgcctctgcggacggggcgcgcagagggagccccgttagcggtcccccgctccctcgtccatcctccccaggcgcactccgagtcacacgtcgtgtctctgcaccgccctggcctccacggtggctccctgcgaagctgagggtgcggtccccatcctccgtgggtgccaactccggggcaagcaggctgcagagccgcgcgctccgccttaggcgctgccaagggcggccgggtagggtttcctaggacccgcccaccccgctcgtcccggccggagctgccaccccctggatcagtggagatttgctctgacccatctgaagtccatatggctctgtatgatgaagacctcctgaaaaatcctttctatctggctctgcaaaagtgccgccctgacttgtgcagcaaagtggcccaaatccatggcattgtcttagtaccctgcaaaggaagcctgtcgagcagcatccagtctacttgtcagtttgagtcctacattttgatacctgtggaagagcattttcagaccttaaatggaaaggatgtctttatt

SEQ ID NO: 107652 - DNA, 3301 bp, Homo sapiens
  Payload ID: 1128
  Gene Symbol: ANKRD27
  Gene Name: ankyrin repeat domain 27 (VPS9 domain)
  ENST ID: ENST00000587352
  CDS Start-End: 130-1299
gccgcgcgagggtggtgggcatcgaggtcccagcagcggacgagggaggtgccgccgtcgcccaggatgggctgggaatgaagcgatgtagccttttaagagatttgctctgacccatctgaagtccatatggctctgtatgatgaagacctcctgaaaaatcctttctatctggctctgcaaaagtgccgccctgacttgtgcagcaaagtggcccaaatccatggcattgtcttagtaccctgcaaaggaagcctgtcgagcagcatccagtctacttgtcagtttgagtcctacattttgatacctgtggaagagcattttcagaccttaaatggaaaggatgtctttattcaagggaacaggattaaattaggagctggttttgcctgtcttctctcagtgcccattctctttgaagaaactttctacaatgaaaaagaagagagtttcagcatcctgtgtatagcccatcctttggaaaagagagagagttcagaagagcctttggcaccctcagatcccttttccctgaaaaccattgaagatgtgagagagttcttgggaagacactccgagcgatttgacaggaacatcgcctctttccatcgaacattccgagaatgcgagagaaagagcctccgtcaccacatagactcagcgaatgctctctacaccaaatgcctccagcagcttctgagggactctcacctgaaaatgctcgccaagcaggaggcccagatgaacctgatgaagcaggcagtggagatatacgtccatcatgaaatttacaacctgatctttaaatacgtggggaccatggaggcaagtgaggatgcggcctttaacaaaatcacaagaagccttcaagatcttcagcagaaagatattggtgtgaaaccggagttcagctttaacatacctcgtgccaaaagagagctggctcagctgaacaaatgcacctccccacagcagaagcttgtctgcttgcgaaaagtggtgcagctcattacacagtctccaagccagagagtgaacctggagaccatgtgtgctgatgatctgctatcagtcctgttatacttgcttgtgaaaacggagatccctaattggatggcaaatttgagttacatcaaaaacttcaggtttagcagcttggcaaaggatgaactgggatactgcctgacctcattcgaagctgccattgaatatattcggcaaggaagcctctctgctaaaccccctgtaagatctcacccctgccctggccttcctttgtgggcatcatggttcccttgatagggtgctggggttggtatgtgggcagacggattcttaaattgcctcccaggaatggggcctcagctgtttgagggctgtgagtcttaaaaatcactcagtgaagagaacaccaagccctcaattggtggtaaaaattggtgggttatcattgggatttacattgttaatatcctacttcattagtccccatcctctccaaagacatgtgggtgcaaagggaagccagaagtagggaatttggatttcttgaccttgatagtcaagaagtgatgtcacgggatccctggactgtcgcttttccagccggaaacctctgtggctggtggctcctttgcctgagttttgttcgggcctgctgggctcatttcacgctcttggcctggcaggctgcgctcggcttgtgctactggcctggatcccatgcctgccaagggcgagccaggtgtggagtggcgaggggtatgtgagcaagtgcagggtctggccactgcacacaaccaggtgtgccgactgaggtggggtgggcagctccaagttgcttgtacagggtcctgctccatgcaaggctgcagctagagcaggcgtactgtaggccgcttccacggtgggcactggggaacacagtggggcctggaagcttggagacaccaggaactgcagagccccaaagagggtgtcatagccctggctcggggaactcctaggttgggctccctgaagggccagagctcttctctcctctcgtcacctgcaatgtagtgagtcgggagcatgttttagctctctttatgttacagctctttcagtcctgccatttggtgggtcccgagttcttgtcccatgtcgaggaagaatgaggtacgtagactagtggagggtgagcaaggcagagaggagctttactgaacggcagaatagctctcaggagacccacagtgggcagcttctttccacaggcaggtcgtcctgacgagttaaagaggcctgacgtaggtagctccttcctgcagttggtagtcccgacatctgtctgagtctggctgagtccggggttttttatggctcagaagggagggagtatgtgctgattggtccataggtgggcctggagaaagcaccatgagttctcagtctgggtcgtggactccacttgggactgacagcccggcccccaggctttaggctgtccctgtcttgaaggtggggcttcactgggcacctgcacctttccacccagaagcgtgtctgccttctgccaccatcaacatgctggccagtgcatccaggctgtttgtgccaaggggcatctgcaggcctgcactgagctgccctcagcccctaccttgactactctcccatgctcatcagcgcccaaaatcttggaggggtctgaggcatcaggaggctggtgtgtcagtgtcacaccaagcatgtgcacacatggctgggttgcaacagtacccgggcttggcctcagctttgctctgaaattgaagtcggtgccaggagtggggaggagcgggagcaggcacttacgagcctgcggcggcagggatgcttcctgggcccctgagagtgcagagattcctggatccagagctgcggctgggcggctgcagctgcgcctgggagtgcagggctcccgccctgccagctcagtaggagatgggggctcctgcctgttcctggctcctgttggccctgcagagtgcacaaacctggccgcgcttcctccactgcagcttacgtctttgcagcagccactcccgatgggctgccactgccatctgtgagaccattaatgtgtgcaatttgaggactcagtggccttgccattgtttccttggtttttattgagcattggctggggtcggcgaggggatgtgattatatttctatgtgaatcgtgagaatcttgaaccatggttgtcctgctggcctgttttactacataccaatgagtaaaatgtgatcatacagaaatcacaaagttgaaatc

SEQ ID NO: 107653 - DNA, 773 bp, Homo sapiens
  Payload ID: 1128
  Gene Symbol: ANKRD27
  Gene Name: ankyrin repeat domain 27 (VPS9 domain)
  ENST ID: ENST00000588700
  CDS Start-End: 153-401
ggggtgggctatagggccagatcgccgcgcgagggtggtgggcatcgaggtcccagcagcggacgagggaggtgccgccgtcgcccaggatgggctgggaatgaagcgatgtagccttttaagagatttgctctgacccatctgaagtccatatggctctgtatgatgaagacctcctgaaaaatcctttctatctggctctgcaaaagtgccgccctgacttgtgcagcaaagtggcccaaatccatggcattgtcttagtaccctgcaaaggaagcctgtcgagcagcatccagtctacttgtcagtttgagtcctacattttgatacctgtggaagagcattttcagaccttaaatggaaagaagagcctttggcaccctcagatcccttttccctgaaaaccattgaagatgtgagagagttcttgggaagacactccgagcgatttgacaggaacatcgcctctttccatcgaacattccgagaatgcgagagaaagagcctccgtcaccacatagactcagcgaatgctctctacaccaaatgcctccagcagcttctgagggactctcacctgaaaatgctcgccaagcaggaggcccagatgaacctgatgaagcaggcagtggagatatacgtccatcatgaaatttacaacctgatctttaaatacgtggggaccatggaggcaagtgaggatgcggcctttaacaaaatcacaagaagccttcaagatcttcagcagaaagatattggtgtgaaaccggagt

SEQ ID NO: 107654 - DNA, 743 bp, Homo sapiens
  Payload ID: 1128
  Gene Symbol: ANKRD27
  Gene Name: ankyrin repeat domain 27 (VPS9 domain)
  ENST ID: ENST00000586463
  CDS Start-End: 652-743
gggctatagggccagatcgccgcgcgagggtggtgggcatcgaggtcccagcagcggacgagggaggtgccgccgtcgcccaggatgggctgggaatgaagcgatgtagccttttaagtcttagtaccctgcaaaggaagcctgtcgagcagcatccagtctacttgtcagtttgagtcctacattttgatacctgtggaagagcattttcagaccttaaatggaaaggatgtctttattcaagggaacaggattaaattaggagctggttttgcctgtcttctctcagtgcccattctctttgaagaaactttctacaatgaaaaagaagagagtttcagcatcctgtgtatagcccatcctttggaaaagagagagagttcagaagagcctttggcaccctcagatcccttttccctgaaaaccattgaagatgtgagagagttcttgggaagacactccgagcgatttgacaggaacatcgcctctttccatcgaacattccgagaatgcgagagaaagagcctccgtcaccacatagactcagcgaatgctctctacaccaaatgcctccagcagcttctgagggactctcacctgatatacgtccatcatgaaatttacaacctgatctttaaatacgtggggaccatggaggcaagtgaggatgcggcctttaacaaaatcacaagaagccttcaagatcttcagcagaaagatattggtgtgaaaccggagttcag

SEQ ID NO: 107655 - DNA, 557 bp, Homo sapiens
  Payload ID: 1128
  Gene Symbol: ANKRD27
  Gene Name: ankyrin repeat domain 27 (VPS9 domain)
  ENST ID: ENST00000586693
  CDS Start-End: 108-557
cgaggtcccagcagcggacgagggaggtgccgccgtcgcccaggatgggctgggaatgaagcgatgtagccttttaagagatttgctctgacccatctgaagtccatatggctctgtatgatgaagacctcctgaaaaatcctttctatctggctctgcaaaagtgccgccctgacttgtgcagcaaagtggcccaaatccatggcattgtcttagtaccctgcaaaggaagcctgtcgagcagcatccagtctacttgtcagtttgagtcctacattttgatacctgtggaagagcattttcagaccttaaatggaaaggatgtctttattcaagggaacaggattaaattaggagctggttttgcctgtcttctctcagtgcccattctctttgaagaaactttctacaatgaaaaagaagagagtttcagcatcctgtgtatagcccatcctttggaaaagagagagagttcagagcctttggcaccctcagatcccttttccctgaaaaccattgaagatgtgagagagttcttgggaagacactccgagcga

SEQ ID NO: 107656 - DNA, 3300 bp, Homo sapiens
  Payload ID: 1128
  Gene Symbol: ANKRD27
  Gene Name: ankyrin repeat domain 27 (VPS9 domain)
  ENST ID: ENST00000622502
  CDS Start-End: 130-654
gccgcgcgagggtggtgggcatcgaggtcccagcagcggacgagggaggtgccgccgtcgcccaggatgggctgggaatgaagcgatgtagccttttaagagatttgctctgacccatctgaagtccatatggctctgtatgatgaagacctcctgaaaaatcctttctatctggctctgcaaaagtgccgccctgacttgtgcagcaaagtggcccaaatccatggcattgtcttagtaccctgcaaaggaagcctgtcgagcagcatccagtctacttgtcagtttgagtcctacattttgatacctgtggaagagcattttcagaccttaaatggaaaggatgtctttattcaagggaacaggattaaattaggagctggttttgcctgtcttctctcagtgcccattctctttgaagaaactttctacaatgaaaaagaagagagtttcagcatcctgtgtatagcccatcctttggaaaagagagagagttcagaagagcctttggcaccctcagatcccttttccctgaaaaccattgaagatgtgagagagttcttgggaagacactccgagcgatttgacaggaacatcgcctctttccatcgaacattccgagaatgcgagagaaagagctccgtcaccacatagactcagcgaatgctctctacaccaaatgcctccagcagcttctgagggactctcacctgaaaatgctcgccaagcaggaggcccagatgaacctgatgaagcaggcagtggagatatacgtccatcatgaaatttacaacctgatctttaaatacgtggggaccatggaggcaagtgaggatgcggcctttaacaaaatcacaagaagccttcaagatcttcagcagaaagatattggtgtgaaaccggagttcagctttaacatacctcgtgccaaaagagagctggctcagctgaacaaatgcacctccccacagcagaagcttgtctgcttgcgaaaagtggtgcagctcattacacagtctccaagccagagagtgaacctggagaccatgtgtgctgatgatctgctatcagtcctgttatacttgcttgtgaaaacggagatccctaattggatggcaaatttgagttacatcaaaaacttcaggtttagcagcttggcaaaggatgaactgggatactgcctgacctcattcgaagctgccattgaatatattcggcaaggaagcctctctgctaaaccccctgtaagatctcacccctgccctggccttcctttgtgggcatcatggttcccttgatagggtgctggggttggtatgtgggcagacggattcttaaattgcctcccaggaatggggcctcagctgtttgagggctgtgagtcttaaaaatcactcagtgaagagaacaccaagccctcaattggtggtaaaaattggtgggttatcattgggatttacattgttaatatcctacttcattagtccccatcctctccaaagacatgtgggtgcaaagggaagccagaagtagggaatttggatttcttgaccttgatagtcaagaagtgatgtcacgggatccctggactgtcgcttttccagccggaaacctctgtggctggtggctcctttgcctgagttttgttcgggcctgctgggctcatttcacgctcttggcctggcaggctgcgctcggcttgtgctactggcctggatcccatgcctgccaagggcgagccaggtgtggagtggcgaggggtatgtgagcaagtgcagggtctggccactgcacacaaccaggtgtgccgactgaggtggggtgggcagctccaagttgcttgtacagggtcctgctccatgcaaggctgcagctagagcaggcgtactgtaggccgcttccacggtgggcactggggaacacagtggggcctggaagcttggagacaccaggaactgcagagccccaaagagggtgtcatagccctggctcggggaactcctaggttgggctccctgaagggccagagctcttctctcctctcgtcacctgcaatgtagtgagtcgggagcatgttttagctctctttatgttacagctctttcagtcctgccatttggtgggtcccgagttcttgtcccatgtcgaggaagaatgaggtacgtagactagtggagggtgagcaaggcagagaggagctttactgaacggcagaatagctctcaggagacccacagtgggcagcttctttccacaggcaggtcgtcctgacgagttaaagaggcctgacgtaggtagctccttcctgcagttggtagtcccgacatctgtctgagtctggctgagtccggggttttttatggctcagaagggagggagtatgtgctgattggtccataggtgggcctggagaaagcaccatgagttctcagtctgggtcgtggactccacttgggactgacagcccggcccccaggctttaggctgtccctgtcttgaaggtggggcttcactgggcacctgcacctttccacccagaagcgtgtctgccttctgccaccatcaacatgctggccagtgcatccaggctgtttgtgccaaggggcatctgcaggcctgcactgagctgccctcagcccctaccttgactactctcccatgctcatcagcgcccaaaatcttggaggggtctgaggcatcaggaggctggtgtgtcagtgtcacaccaagcatgtgcacacatggctgggttgcaacagtacccgggcttggcctcagctttgctctgaaattgaagtcggtgccaggagtggggaggagcgggagcaggcacttacgagcctgcggcggcagggatgcttcctgggcccctgagagtgcagagattcctggatccagagctgcggctgggcggctgcagctgcgcctgggagtgcagggctcccgccctgccagctcagtaggagatgggggctcctgcctgttcctggctcctgttggccctgcagagtgcacaaacctggccgcgcttcctccactgcagcttacgtctttgcagcagccactcccgatgggctgccactgccatctgtgagaccattaatgtgtgcaatttgaggactcagtggccttgccattgtttccttggtttttattgagcattggctggggtcggcgaggggatgtgattatatttctatgtgaatcgtgagaatcttgaaccatggttgtcctgctggcctgttttactacataccaatgagtaaaatgtgatcatacagaaatcacaaagttgaaatc

SEQ ID NO: 107657 - DNA, 6074 bp, Homo sapiens
  Payload ID: 1129
  Gene Symbol: ANKRD28
  Gene Name: ankyrin repeat domain 28
  Uniprot ID: O15084
  ENST ID: ENST00000383777
  CDS Start-End: 341-3040
gactgtgtcttcacaacgttagacctctcttcagctgcattgctggctgcctagagccctagactaatgagctagagttaatgccaaagacagcaaatggttgacacctttacacagagcagttgcatcttgtagtgaggaagcagttcaggtacttttgaagcattctgcagatgttaatgctcgagacaaaaattggcaaacccctttacatatagctgctgctaataaagctgtaaagtgtgctgaagctttggtacctcttctgagtaatgtaaacgtatctgatcgagcagggaggactgcattacatcatgcagctttcagtggacatggtgagatggtcaaactactcttgtctagaggtgccaatattaatgcttttgacaagaaagataggcgtgctatccattgggcagcatatatgggtcacattgaagtagtgaaattgcttgtgtcgcatggagctgaagtgacatgcaaggataaaaagtcttatacacctcttcatgcagcagcctctagtggaatgatcagcgtagtcaagtaccttctagatcttggagttgatatgaatgaaccaaatgcctatggaaatacacctcttcatgtagcctgctataatggacaagatgttgtagtgaatgaacttatagactgtggtgctattgtgaatcaaaagaatgaaaaaggatttactcctttgcactttgctgctgcatcaacacatggagcattgtgtttagagcttctagttggcaatggggccgatgtcaatatgaagagtaaagatgggaaaaccccactacacatgactgctctccacggtagattctcccgatcacaaaccattatccagagtggagctgtaatcgactgtgaggataagaatggaaatacccctttgcacatagcagcacggtatggccatgagctgctgatcaacactcttattacaagtggtgctgacactgcaaagcgtggcatacatggaatgttccccctccatttggcagccttaagcggcttttcagattgctgcagaaaacttctttcttcaggatttgatatagataccccagatgattttggcaggacttgtctacatgcagctgcagctggagggaatttggagtgcctaaaccttctgctgaatactggtgcagactttaataaaaaggacaaatttgggagatctccactgcactacgctgctgccaactgcaattaccagtgcctgtttgctcttgtgggatcaggagcaagtgtgaatgaccttgatgaaagaggctgcacacccctgcactatgcagctacatcagacacagatggcaagtgcctggaatacttattaagaaacgatgcaaatccagggatccgtgataagcaaggatacaacgcagttcattattcagctgcttatggtcaccgtctatgtcttcagctgattgcaagtgaaactcctctagatgttttaatggaaacctcaggaacagacatgctgagtgattcagataatagagcaacaataagccctttacacttggctgcctatcatggtcaccatcaagcactggaagtgttggtacagtctttgttagatcttgatgtcagaaatagtagtggaagaacacccctagatcttgcagcttttaagggccatgttgaatgtgtggatgtactcattaatcagggagcctcaatcttagtaaaagattacattttgaagaggacacctattcatgcagcagcaacaaatggtcattcagaatgcttacggctattaataggaaatgcagaaccacagaatgcagtggatattcaagatggaaatggacagacgcctctgatgctatctgttctcaacgggcacacagactgtgtttactcattgctgaacaaaggagcaaatgtagatgccaaagataagtggggaaggacagcgttgcatagaggggcagttacaggccatgaagaatgtgtagatgcattacttcaacatggtgctaagtgcttacttcgggatagcaggggccggacgcctatacacctgtctgctgcctgtggacacattggtgttcttggagcccttttgcagtcagcagcatctatggatgcaaatccagccacagcagacaatcatggatatacggcacttcactgggcttgctacaatggtcacgagacatgtgtagaactgcttttagaacaggaagttttccagaaaacggaaggaaatgcttttagtccattgcattgtgccgtgataaatgacaacgaaggtgctgctgagatgttaattgatacattaggtgccagcattgtgaacgccacagattcaaaaggaagaactcctctccatgcagccgccttcacagaccatgtagagtgtttacagctgctgctcagccataatgctcaagtcaattctgtggactctacagggaaaacacctcttatgatggctgcagaaaatggacaaacaaatacagttgagatgctggttagcagtgctagtgcagaactgactttacaagataacagtaaaaatactgccctccatttggcttgtagcaagggtcatgaaactagtgccttgttaatactggaaaagataacagatagaaacctcatcaatgcaaccaacgcagccttgcaaacacctctgcatgttgctgcccgaaatgggctaacaatggtggttcaggaacttttgggaaaaggagcaagtgtgcttgcagtagatgaaaatggctataccccagctttggcctgtgctcccaataaggatgtggctgattgcctggctctcattttggccaccatgatgcctgtctcatcaagtagtcctttatcatccttaacattcaatgccattaaccgttataccaacacctcaaaaacagtcagctttgaagctttgcccatcatgaggaatgaacctagctcctattgcagtttcaataacattggaggggaacaggagtacttatacactgacgtggatgagctcaacgactccgattctgagacctactgagaggctgaggaggagggagttctcacagtaaagcttcaaactgtgctttttcaggaaaaaggcactttgatattcacgtagaaattcaacctaagaggaaagatcccacagtgagccaatgttaagagatctgatggcattaggaggaagagttttaaaggcaagttttacaaaaggaacttctagaatcttgaaatagacctgactgaggaaaacacattgatgtcagaattctttgtggaattgtttaatttggttttgcagtgccaggaacaattggggacactgtgcactctaacctgcttacacaagcaacactattgtaacagaagaaataaagacactagatttaaattttatcaataaaattacaactaaatttaaaggcaataaaagtttggtacagtaggcattatgtgcacagcaaattgcaaaaggaccaaataactgaaaggtttttttaataaaatgccattttgtggaaactggagtagattaaatgaaacattacctaaaccaaactgcaatatttctggaaatgaagctgagatttggttttaaatgttgagtttttttgggttttgttttttttttaagaaaacatctgaaagccttccaatgctgtattaaaccatgagagaaagcagatgtatttttacatttttttcttttacagaactatttcaaatttccaatttttatactattagaattaaaaaccagctgactgggtgcaatacgggtgaaaatacttgtgacatagacattgagatggattggggtcaggctgttgccctgttttgaatggtttgggtttaaaatagtactatttttgtttgaaaatgtaaagaatttcctagaaaaaaattcatgaaatcaaaaagtagactatttcaccctattgcagctaagtggtcctggggcatggagtcttcaacctctctatgaatggcacaccttagtcacttatgttacttttgtgtccccaccatgggttgggggattttttgtttattctgatctatgagttttgaaaaagtgaataatcaaaaggaaaataattccttgttgttcataaattaagcatcactaaagtctcttgaaaggcatttctgtattgggcaagatttaaaatactaaagccttaggtcctattcatatttaaagtagcatgtttgtaacctgttactatttggagagagaagcagttgcctgccaaattgaagactacctttcaaatagcaaaagagagagagaaggctgatatttcggcttttaaataaagatttgtgtggttctgcttttactgtaactgtcactttcccagtgaaaatgatttcatatacattgagggtcttacaggtatgggtaaagttctataaattgcaacaaaatgatacccaatttcattttatcctttttgtattgtgaaactggaaactttatgacattgtaaattatcagctggtttttctgaatataaagtgtgaaaacacagaacagtattttgatctatttgataattttgtgggttttttgaagaattaatgagcatgtacatagaaatagtgactgcttgaatactgtatttacttgcactctttcagtacatcaagattcctgtatattttagagtataataaaacacagatgtgagttgtatttaatgaataatgtatttgtatctgtgcatattatctacaaatctataaagtttctagggcattgactactagattttaagcattttttctaaaatatttacagaaattataaatctaatcccccatcttttctttataatataaagaagtcataatgaacccttcctaattattagtagtaggaaggtgaatatgcattttaatgacagtggactacattttctattgtaccttttgaaaaaaaaaaaaatcaagcagattctaaaagtatacatatgtgtgctttctctttccttttaggaattctcttctgaattccctgagggaattttctagaatctcagaattgaaagagacctgaggttcatccagtctctaacctcttaacaaatgcaggagtcccttctacaagggtgatctttccaccttgaacacttccaagtgactctacctcaccaagcagtccattcagttgttgagcagctctaactgttagaaaggtcttccttagatggagttgaagcctccctcccggtaacttctgtctttgggcctgggtctgtcctccaagagaaccctgagaatgttggaaggatgaatctcgcacattctgccatgtcttctcttttacaggctgtttgacttctctgctgaagtgatttccagaaggactcatttgacacactattagatttaccacatctaatgaaatccaaggtgtagctataaagtgacaagctgtttttaatttatcacatacaccagaacttctatcctgcatcacttatatgtaaatgatgctgttaccaaaaacattaaggtagttcttgcgaatgccaccccactaagaaaactatttcattacttttgtaatccatctgtgagagtctgccccccagcttaaccacttcctttggtctgcacccaatgaagggaaaccccaaagtactgtctcaaatggtatttgaactacgccagtattgttggaataagtacattaattacttgaatgaatgaacacagcaccgtagaaatttcctttatggttacaccttgtatgtctaaagcattcaggccctgttctgtagtgtttcttatcctcacacagagtagaaaagcctgtttgctttatttaacttatacataaaagatgacatctgaaatatctgatgtgtattataataccagcttctgctctagaactactttgggtgaaatggtggtaatagcaaatgacctcctttaacaagacactcatctcaaacaatgccatttagttcaggagatctctaagtgtagctgtaaattttggggttaatttggcttatattggaccttttaaaagaaataaagttttttaatgcaataaa

SEQ ID NO: 107658 - DNA, 6564 bp, Homo sapiens
  Payload ID: 1129
  Gene Symbol: ANKRD28
  Gene Name: ankyrin repeat domain 28
  Uniprot ID: O15084
  ENST ID: ENST00000399451
  CDS Start-End: 369-3530
gcggccgcgggggctgccagggtatttcgggaagggggcgtgaggaggcggcggcggcagcggcgggtagggcaggcagcagagggaaggagaaagaaaggaaggaagagggcggggagtcctcagaggaggaggcgggaccggccgggcacctcacctctcggcggcggcggcggcggcggcggcggcgggcggccggggaggcggcgccgccccctgcccgcaggtcttctcagcgcagtcggccgcggacccgctggtcccgggcagcggccaaggctactggggcgggagcagtgggccggtcggcggcggcagcggcagcggcggaggaggaggaggctggagtgggcgcggaggcgaccgccatggcgttcctcaaactccgtgaccagccatcactggtgcaagctatatttaacggagatcctgatgaagttcgagcactaatatttaagaaagaagatgttaactttcaggacaatgaaaagcgaaccccattgcacgccgcagcttaccttggagatgcagaaatcattgaacttcttattttatctggagctagagttaatgccaaagacagcaaatggttgacacctttacacagagcagttgcatcttgtagtgaggaagcagttcaggtacttttgaagcattctgcagatgttaatgctcgagacaaaaattggcaaacccctttacatatagctgctgctaataaagctgtaaagtgtgctgaagctttggtacctcttctgagtaatgtaaacgtatctgatcgagcagggaggactgcattacatcatgcagctttcagtggacatggtgagatggtcaaactactcttgtctagaggtgccaatattaatgcttttgacaagaaagataggcgtgctatccattgggcagcatatatgggtcacattgaagtagtgaaattgcttgtgtcgcatggagctgaagtgacatgcaaggataaaaagtcttatacacctcttcatgcagcagcctctagtggaatgatcagcgtagtcaagtaccttctagatcttggagttgatatgaatgaaccaaatgcctatggaaatacacctcttcatgtagcctgctataatggacaagatgttgtagtgaatgaacttatagactgtggtgctattgtgaatcaaaagaatgaaaaaggatttactcctttgcactttgctgctgcatcaacacatggagcattgtgtttagagcttctagttggcaatggggccgatgtcaatatgaagagtaaagatgggaaaaccccactacacatgactgctctccacggtagattctcccgatcacaaaccattatccagagtggagctgtaatcgactgtgaggataagaatggaaatacccctttgcacatagcagcacggtatggccatgagctgctgatcaacactcttattacaagtggtgctgacactgcaaagcgtggcatacatggaatgttccccctccatttggcagccttaagcggcttttcagattgctgcagaaaacttctttcttcaggatttgatatagataccccagatgattttggcaggacttgtctacatgcagctgcagctggagggaatttggagtgcctaaaccttctgctgaatactggtgcagactttaataaaaaggacaaatttgggagatctccactgcactacgctgctgccaactgcaattaccagtgcctgtttgctcttgtgggatcaggagcaagtgtgaatgaccttgatgaaagaggctgcacacccctgcactatgcagctacatcagacacagatggcaagtgcctggaatacttattaagaaacgatgcaaatccagggatccgtgataagcaaggatacaacgcagttcattattcagctgcttatggtcaccgtctatgtcttcagctgattgcaagtgaaactcctctagatgttttaatggaaacctcaggaacagacatgctgagtgattcagataatagagcaacaataagccctttacacttggctgcctatcatggtcaccatcaagcactggaagtgttggtacagtctttgttagatcttgatgtcagaaatagtagtggaagaacacccctagatcttgcagcttttaagggccatgttgaatgtgtggatgtactcattaatcagggagcctcaatcttagtaaaagattacattttgaagaggacacctattcatgcagcagcaacaaatggtcattcagaatgcttacggctattaataggaaatgcagaaccacagaatgcagtggatattcaagatggaaatggacagacgcctctgatgctatctgttctcaacgggcacacagactgtgtttactcattgctgaacaaaggagcaaatgtagatgccaaagataagtggggaaggacagcgttgcatagaggggcagttacaggccatgaagaatgtgtagatgcattacttcaacatggtgctaagtgcttacttcgggatagcaggggccggacgcctatacacctgtctgctgcctgtggacacattggtgttcttggagcccttttgcagtcagcagcatctatggatgcaaatccagccacagcagacaatcatggatatacggcacttcactgggcttgctacaatggtcacgagacatgtgtagaactgcttttagaacaggaagttttccagaaaacggaaggaaatgcttttagtccattgcattgtgccgtgataaatgacaacgaaggtgctgctgagatgttaattgatacattaggtgccagcattgtgaacgccacagattcaaaaggaagaactcctctccatgcagccgccttcacagaccatgtagagtgtttacagctgctgctcagccataatgctcaagtcaattctgtggactctacagggaaaacacctcttatgatggctgcagaaaatggacaaacaaatacagttgagatgctggttagcagtgctagtgcagaactgactttacaagataacagtaaaaatactgccctccatttggcttgtagcaagggtcatgaaactagtgccttgttaatactggaaaagataacagatagaaacctcatcaatgcaaccaacgcagccttgcaaacacctctgcatgttgctgcccgaaatgggctaacaatggtggttcaggaacttttgggaaaaggagcaagtgtgcttgcagtagatgaaaatggctataccccagctttggcctgtgctcccaataaggatgtggctgattgcctggctctcattttggccaccatgatgcctgtctcatcaagtagtcctttatcatccttaacattcaatgccattaaccgttataccaacacctcaaaaacagtcagctttgaagctttgcccatcatgaggaatgaacctagctcctattgcagtttcaataacattggaggggaacaggagtacttatacactgacgtggatgagctcaacgactccgattctgagacctactgagaggctgaggaggagggagttctcacagtaaagcttcaaactgtgctttttcaggaaaaaggcactttgatattcacgtagaaattcaacctaagaggaaagatcccacagtgagccaatgttaagagatctgatggcattaggaggaagagttttaaaggcaagttttacaaaaggaacttctagaatcttgaaatagacctgactgaggaaaacacattgatgtcagaattctttgtggaattgtttaatttggttttgcagtgccaggaacaattggggacactgtgcactctaacctgcttacacaagcaacactattgtaacagaagaaataaagacactagatttaaattttatcaataaaattacaactaaatttaaaggcaataaaagtttggtacagtaggcattatgtgcacagcaaattgcaaaaggaccaaataactgaaaggtttttttaataaaatgccattttgtggaaactggagtagattaaatgaaacattacctaaaccaaactgcaatatttctggaaatgaagctgagatttggttttaaatgttgagtttttttgggttttgttttttttttaagaaaacatctgaaagccttccaatgctgtattaaaccatgagagaaagcagatgtatttttacatttttttcttttacagaactatttcaaatttccaatttttatactattagaattaaaaaccagctgactgggtgcaatacgggtgaaaatacttgtgacatagacattgagatggattggggtcaggctgttgccctgttttgaatggtttgggtttaaaatagtactatttttgtttgaaaatgtaaagaatttcctagaaaaaaattcatgaaatcaaaaagtagactatttcaccctattgcagctaagtggtcctggggcatggagtcttcaacctctctatgaatggcacaccttagtcacttatgttacttttgtgtccccaccatgggttgggggattttttgtttattctgatctatgagttttgaaaaagtgaataatcaaaaggaaaataattccttgttgttcataaattaagcatcactaaagtctcttgaaaggcatttctgtattgggcaagatttaaaatactaaagccttaggtcctattcatatttaaagtagcatgtttgtaacctgttactatttggagagagaagcagttgcctgccaaattgaagactacctttcaaatagcaaaagagagagagaaggctgatatttcggcttttaaataaagatttgtgtggttctgcttttactgtaactgtcactttcccagtgaaaatgatttcatatacattgagggtcttacaggtatgggtaaagttctataaattgcaacaaaatgatacccaatttcattttatcctttttgtattgtgaaactggaaactttatgacattgtaaattatcagctggtttttctgaatataaagtgtgaaaacacagaacagtattttgatctatttgataattttgtgggttttttgaagaattaatgagcatgtacatagaaatagtgactgcttgaatactgtatttacttgcactctttcagtacatcaagattcctgtatattttagagtataataaaacacagatgtgagttgtatttaatgaataatgtatttgtatctgtgcatattatctacaaatctataaagtttctagggcattgactactagattttaagcattttttctaaaatatttacagaaattataaatctaatcccccatcttttctttataatataaagaagtcataatgaacccttcctaattattagtagtaggaaggtgaatatgcattttaatgacagtggactacattttctattgtaccttttgaaaaaaaaaaaaatcaagcagattctaaaagtatacatatgtgtgctttctctttccttttaggaattctcttctgaattccctgagggaattttctagaatctcagaattgaaagagacctgaggttcatccagtctctaacctcttaacaaatgcaggagtcccttctacaagggtgatctttccaccttgaacacttccaagtgactctacctcaccaagcagtccattcagttgttgagcagctctaactgttagaaaggtcttccttagatggagttgaagcctccctcccggtaacttctgtctttgggcctgggtctgtcctccaagagaaccctgagaatgttggaaggatgaatctcgcacattctgccatgtcttctcttttacaggctgtttgacttctctgctgaagtgatttccagaaggactcatttgacacactattagatttaccacatctaatgaaatccaaggtgtagctataaagtgacaagctgtttttaatttatcacatacaccagaacttctatcctgcatcacttatatgtaaatgatgctgttaccaaaaacattaaggtagttcttgcgaatgccaccccactaagaaaactatttcattacttttgtaatccatctgtgagagtctgccccccagcttaaccacttcctttggtctgcacccaatgaagggaaaccccaaagtactgtctcaaatggtatttgaactacgccagtattgttggaataagtacattaattacttgaatgaatgaacacagcaccgtagaaatttcctttatggttacaccttgtatgtctaaagcattcaggccctgttctgtagtgtttcttatcctcacacagagtagaaaagcctgtttgctttatttaacttatacataaaagatgacatctgaaatatctgatgtgtattataataccagcttctgctctagaactactttgggtgaaatggtggtaatagcaaatgacctcctttaacaagacactcatctcaaacaatgccatttagttcaggagatctctaagtgtagctgtaaattttggggttaatttggcttatattggaccttttaaaagaaataaagttttttaatgcaataaa

SEQ ID NO: 107659 - DNA, 592 bp, Homo sapiens
  Payload ID: 1129
  Gene Symbol: ANKRD28
  Gene Name: ankyrin repeat domain 28
  ENST ID: ENST00000439830
  CDS Start-End: 67-111
cggtcggcggcggcagcggcagcggcggaggaggaggaggctggagtgggcgcggaggcgaccgccatggcgttcctcaaactccgtgaccaggcctgtgattggaattgaaacagtacaactgcctccaccagaggaaaatagtatgggaattcctattatgccatcactggtgcaagctatatttaacggagatcctgatgaagttcgagcactaatatttaagaaagaagatgttaactttcaggacaatgaaaagcgaaccccattgcacgccgcagcttaccttggagatgcagaaatcattgaacttcttattttatctggagctagagttaatgccaaagacagcaaatggttgacacctttacacagagcagttgcatcttgtagtgaggaagcagttcaggtacttttgaagcattctgcagatgttaatgctcgagacaaaaattggcaaacccctttacatatagctgctgctaataaagctgtaaagtgtgctgaagctttggtacctcttctgagtaatgtaaacgtatctgatcgagcagggaggactgcattacatcatgcagctttcagtggacat

SEQ ID NO: 107660 - DNA, 2485 bp, Homo sapiens
  Payload ID: 1129
  Gene Symbol: ANKRD28
  Gene Name: ankyrin repeat domain 28
  ENST ID: ENST00000451422
  CDS Start-End: 182-2350
attgttgttttggaggaggtagaagatgaatctcctgcattcatttctaaattgccacaggaaaataaatccctacattctccaccttctggaaatgtattggtaagatatccatcactggtgcaagctatatttaacggagatcctgatgaagttcgagcactaatatttaagaaagaagatgttaactttcaggacaatgaaaagcgaaccccattgcacgccgcagcttaccttggagatgcagaaatcattgaacttcttattttatctggaagcagttcaggtacttttgaagcattctgcagatgttaatgctcgagacaaaaattggcaaacccctttacatatagctgctgctaataaagctgtaaagtgtgctgaagctttggtacctcttctgagtaatgtaaacgtatctgatcgagcagggaggactgcattacatcatgcagctttcagtggacatggtgagatggtcaaactactcttgtctagaggtgccaatattaatgcttttgacaagaaagataggcgtgctatccattgggcagcatatatgggtcacattgaagtagtgaaattgcttgtgtcgcatggagctgaagtgacatgcaaggataaaaagtcttatacacctcttcatgcagcagcctctagtggaatgatcagcgtagtcaagtaccttctagatcttggagttgatatgaatgaaccaaatgcctatggaaatacacctcttcatgtagcctgctataatggacaagatgttgtagtgaatgaacttatagactgtggtgctattgtgaatcaaaagaatgaaaaaggatttactcctttgcactttgctgctgcatcaacacatggagcattgtgtttagagcttctagttggcaatggggccgatgtcaatatgaagagtaaagatgggaaaaccccactacacatgactgctctccacggtagattctcccgatcacaaaccattatccagagtggagctgtaatcgactgtgaggataagaatggaaatacccctttgcacatagcagcacggtatggccatgagctgctgatcaacactcttattacaagtggtgctgacactgcaaagcgtggcatacatggaatgttccccctccatttggcagccttaagcggcttttcagattgctgcagaaaacttctttcttcaggatttgatatagataccccagatgattttggcaggacttgtctacatgcagctgcagctggagggaatttggagtgcctaaaccttctgctgaatactggtgcagactttaataaaaaggacaaatttgggagatctccactgcactacgctgctgccaactgcaattaccagtgcctgtttgctcttgtgggatcaggagcaagtgtgaatgaccttgatgaaagaggctgcacacccctgcactatgcagctacatcagacacagatggcaagtgcctggaatacttattaagaaacgatgcaaatccagggatccgtgataagcaaggatacaacgcagttcattattcagctgcttatggtcaccgtctatgtcttcagctgattgcaagtgaaactcctctagatgttttaatggaaacctcaggaacagacatgctgagtgattcagataatagagcaacaataagccctttacacttggctgcctatcatggtcaccatcaagcactggaagtgttggtacagtctttgttagatcttgatgtcagaaatagtagtggaagaacacccctagatcttgcagcttttaagggccatgttgaatgtgtggatgtactcattaatcagggagcctcaatcttagtaaaagattacattttgaagaggacacctattcatgcagcagcaacaaatggtcattcagaatgcttacggctattaataggaaatgcagaaccacagaatgcagtggatattcaagatggaaatggacagacgcctctgatgctatctgttctcaacgggcacacagactgtgtttactcattgctgaacaaaggagcaaatgtagatgccaaagataagtggggaaggacagcgttgcatagaggggcagttacaggccatgaagaatgtgtagatgcattacttcaacatggtgctaagtgcttacttcgggatagcaggggccggacgcctatacacctgtctgctgcctgtggacacattggtgttcttggagcccttttgcagtcagcagcatctatggatgcaaatccagccacagcagacaatcatggatatacggcacttcactgggcttgctacaatgaactcctctccatgcagccgccttcacagaccatgtagagtgtttacagctgctgctcagccataatgctcaagtcaattctgtggactctacagggaaaacacctcttatgatggctgcagaaaatggacaaacaaatacagttgagatgctggttagcagtgctagtgcag

SEQ ID NO: 107661 - DNA, 4408 bp, Homo sapiens
  Payload ID: 1129
  Gene Symbol: ANKRD28
  Gene Name: ankyrin repeat domain 28
  Uniprot ID: O15084
  ENST ID: ENST00000412318
  CDS Start-End: 20-3181
gggcgcggaggcgaccgccatggcgttcctcaaactccgtgaccagccatcactggtgcaagctatatttaacggagatcctgatgaagttcgagcactaatatttaagaaagaagatgttaactttcaggacaatgaaaagcgaaccccattgcacgccgcagcttaccttggagatgcagaaatcattgaacttcttattttatctggagctagagttaatgccaaagacagcaaatggttgacacctttacacagagcagttgcatcttgtagtgaggaagcagttcaggtacttttgaagcattctgcagatgttaatgctcgagacaaaaattggcaaacccctttacatatagctgctgctaataaagctgtaaagtgtgctgaagctttggtacctcttctgagtaatgtaaacgtatctgatcgagcagggaggactgcattacatcatgcagctttcagtggacatggtgagatggtcaaactactcttgtctagaggtgccaatattaatgcttttgacaagaaagataggcgtgctatccattgggcagcatatatgggtcacattgaagtagtgaaattgcttgtgtcgcatggagctgaagtgacatgcaaggataaaaagtcttatacacctcttcatgcagcagcctctagtggaatgatcagcgtagtcaagtaccttctagatcttggagttgatatgaatgaaccaaatgcctatggaaatacacctcttcatgtagcctgctataatggacaagatgttgtagtgaatgaacttatagactgtggtgctattgtgaatcaaaagaatgaaaaaggatttactcctttgcactttgctgctgcatcaacacatggagcattgtgtttagagcttctagttggcaatggggccgatgtcaatatgaagagtaaagatgggaaaaccccactacacatgactgctctccacggtagattctcccgatcacaaaccattatccagagtggagctgtaatcgactgtgaggataagaatggaaatacccctttgcacatagcagcacggtatggccatgagctgctgatcaacactcttattacaagtggtgctgacactgcaaagcgtggcatacatggaatgttccccctccatttggcagccttaagcggcttttcagattgctgcagaaaacttctttcttcaggatttgatatagataccccagatgattttggcaggacttgtctacatgcagctgcagctggagggaatttggagtgcctaaaccttctgctgaatactggtgcagactttaataaaaaggacaaatttgggagatctccactgcactacgctgctgccaactgcaattaccagtgcctgtttgctcttgtgggatcaggagcaagtgtgaatgaccttgatgaaagaggctgcacacccctgcactatgcagctacatcagacacagatggcaagtgcctggaatacttattaagaaacgatgcaaatccagggatccgtgataagcaaggatacaacgcagttcattattcagctgcttatggtcaccgtctatgtcttcagctgattgcaagtgaaactcctctagatgttttaatggaaacctcaggaacagacatgctgagtgattcagataatagagcaacaataagccctttacacttggctgcctatcatggtcaccatcaagcactggaagtgttggtacagtctttgttagatcttgatgtcagaaatagtagtggaagaacacccctagatcttgcagcttttaagggccatgttgaatgtgtggatgtactcattaatcagggagcctcaatcttagtaaaagattacattttgaagaggacacctattcatgcagcagcaacaaatggtcattcagaatgcttacggctattaataggaaatgcagaaccacagaatgcagtggatattcaagatggaaatggacagacgcctctgatgctatctgttctcaacgggcacacagactgtgtttactcattgctgaacaaaggagcaaatgtagatgccaaagataagtggggaaggacagcgttgcatagaggggcagttacaggccatgaagaatgtgtagatgcattacttcaacatggtgctaagtgcttacttcgggatagcaggggccggacgcctatacacctgtctgctgcctgtggacacattggtgttcttggagcccttttgcagtcagcagcatctatggatgcaaatccagccacagcagacaatcatggatatacggcacttcactgggcttgctacaatggtcacgagacatgtgtagaactgcttttagaacaggaagttttccagaaaacggaaggaaatgcttttagtccattgcattgtgccgtgataaatgacaacgaaggtgctgctgagatgttaattgatacattaggtgccagcattgtgaacgccacagattcaaaaggaagaactcctctccatgcagccgccttcacagaccatgtagagtgtttacagctgctgctcagccataatgctcaagtcaattctgtggactctacagggaaaacacctcttatgatggctgcagaaaatggacaaacaaatacagttgagatgctggttagcagtgctagtgcagaactgactttacaagataacagtaaaaatactgccctccatttggcttgtagcaagggtcatgaaactagtgccttgttaatactggaaaagataacagatagaaacctcatcaatgcaaccaacgcagccttgcaaacacctctgcatgttgctgcccgaaatgggctaacaatggtggttcaggaacttttgggaaaaggagcaagtgtgcttgcagtagatgaaaatggctataccccagctttggcctgtgctcccaataaggatgtggctgattgcctggctctcattttggccaccatgatgcctgtctcatcaagtagtcctttatcatccttaacattcaatgccattaaccgttataccaacacctcaaaaacagtcagctttgaagctttgcccatcatgaggaatgaacctagctcctattgcagtttcaataacattggaggggaacaggagtacttatacactgacgtggatgagctcaacgactccgattctgagacctactgagaggctgaggaggagggagttctcacagtaaagcttcaaactgtgctttttcaggaaaaaggcactttgatattcacgtagaaattcaacctaagaggaaagatcccacagtgagccaatgttaagagatctgatggcattaggaggaagagttttaaaggaattctcttctgaattccctgagggaattttctagaatctcagaattgaaagagacctgaggttcatccagtctctaacctcttaacaaatgcaggagtcccttctacaagggtgatctttccaccttgaacacttccaagtgactctacctcaccaagcagtccattcagttgttgagcagctctaactgttagaaaggtcttccttagatggagttgaagcctccctcccggtaacttctgtctttgggcctgggtctgtcctccaagagaaccctgagaatgttggaaggatgaatctcgcacattctgccatgtcttctcttttacaggctgtttgacttctctgctgaagtgatttccagaaggactcatttgacacactattagatttaccacatctaatgaaatccaaggtgtagctataaagtgacaagctgtttttaatttatcacatacaccagaacttctatcctgcatcacttatatgtaaatgatgctgttaccaaaaacattaaggtagttcttgcgaatgccaccccactaagaaaactatttcattacttttgtaatccatctgtgagagtctgccccccagcttaaccacttcctttggtctgcacccaatgaagggaaaccccaaagtactgtctcaaatggtatttgaactacgccagtattgttggaataagtacattaattacttgaatgaatgaacacagcaccgtagaaatttcctttatggttacaccttgtatgtctaaagcattcaggccctgttctgtagtgtttcttatcctcacacagagtagaaaagcctgtttgctttatttaacttatacataaaagatgacatctgaaatatctgatgtgtattataataccagcttctgctctagaactactttgggtgaaatggtggtaatagcaaatgacctcctttaacaagacactcatctcaaacaatgccatttagttcaggagatctctaagtgtagctgtaaattttggggttaatttggcttatattggaccttttaaaagaaataaagttttttaatgcaat

SEQ ID NO: 107662 - DNA, 6383 bp, Homo sapiens
  Payload ID: 1129
  Gene Symbol: ANKRD28
  Gene Name: ankyrin repeat domain 28
  Uniprot ID: O15084
  ENST ID: ENST00000624145
  CDS Start-End: 650-3349
ctgttagtcagcagaggcagtacaccagatttccttgtggcttttagtggaaaatgttaaaagcgcactcatttttcagttatagaattttttagtttgatttggattagtcacagaactggcatgaaccttctaattgtgaaggctgtccaaatgcactatttttttctcctgctagaggaagttacatcccgagaagtagctcagatctctgccatcactggtgcaagctatatttaacggagatcctgatgaagttcgagcactaatatttaagaaagaagatgttaactttcaggacaatgaaaagcgaaccccattgcacgccgcagcttaccttggagatgcagaaatcattgaacttcttattttatctggagctagagttaatgccaaagacagcaaatggttgacacctttacacagagcagttgcatcttgtagtgaggaagcagttcaggtacttttgaagcattctgcagatgttaatgctcgagacaaaaattggcaaacccctttacatatagctgctgctaataaagctgtaaagtgtgctgaagctttggtacctcttctgagtaatgtaaacgtatctgatcgagcagggaggactgcattacatcatgcagctttcagtggacatggtgagatggtcaaactactcttgtctagaggtgccaatattaatgcttttgacaagaaagataggcgtgctatccattgggcagcatatatgggtcacattgaagtagtgaaattgcttgtgtcgcatggagctgaagtgacatgcaaggataaaaagtcttatacacctcttcatgcagcagcctctagtggaatgatcagcgtagtcaagtaccttctagatcttggagttgatatgaatgaaccaaatgcctatggaaatacacctcttcatgtagcctgctataatggacaagatgttgtagtgaatgaacttatagactgtggtgctattgtgaatcaaaagaatgaaaaaggatttactcctttgcactttgctgctgcatcaacacatggagcattgtgtttagagcttctagttggcaatggggccgatgtcaatatgaagagtaaagatgggaaaaccccactacacatgactgctctccacggtagattctcccgatcacaaaccattatccagagtggagctgtaatcgactgtgaggataagaatggaaatacccctttgcacatagcagcacggtatggccatgagctgctgatcaacactcttattacaagtggtgctgacactgcaaagcgtggcatacatggaatgttccccctccatttggcagccttaagcggcttttcagattgctgcagaaaacttctttcttcaggatttgatatagataccccagatgattttggcaggacttgtctacatgcagctgcagctggagggaatttggagtgcctaaaccttctgctgaatactggtgcagactttaataaaaaggacaaatttgggagatctccactgcactacgctgctgccaactgcaattaccagtgcctgtttgctcttgtgggatcaggagcaagtgtgaatgaccttgatgaaagaggctgcacacccctgcactatgcagctacatcagacacagatggcaagtgcctggaatacttattaagaaacgatgcaaatccagggatccgtgataagcaaggatacaacgcagttcattattcagctgcttatggtcaccgtctatgtcttcagctgattgcaagtgaaactcctctagatgttttaatggaaacctcaggaacagacatgctgagtgattcagataatagagcaacaataagccctttacacttggctgcctatcatggtcaccatcaagcactggaagtgttggtacagtctttgttagatcttgatgtcagaaatagtagtggaagaacacccctagatcttgcagcttttaagggccatgttgaatgtgtggatgtactcattaatcagggagcctcaatcttagtaaaagattacattttgaagaggacacctattcatgcagcagcaacaaatggtcattcagaatgcttacggctattaataggaaatgcagaaccacagaatgcagtggatattcaagatggaaatggacagacgcctctgatgctatctgttctcaacgggcacacagactgtgtttactcattgctgaacaaaggagcaaatgtagatgccaaagataagtggggaaggacagcgttgcatagaggggcagttacaggccatgaagaatgtgtagatgcattacttcaacatggtgctaagtgcttacttcgggatagcaggggccggacgcctatacacctgtctgctgcctgtggacacattggtgttcttggagcccttttgcagtcagcagcatctatggatgcaaatccagccacagcagacaatcatggatatacggcacttcactgggcttgctacaatggtcacgagacatgtgtagaactgcttttagaacaggaagttttccagaaaacggaaggaaatgcttttagtccattgcattgtgccgtgataaatgacaacgaaggtgctgctgagatgttaattgatacattaggtgccagcattgtgaacgccacagattcaaaaggaagaactcctctccatgcagccgccttcacagaccatgtagagtgtttacagctgctgctcagccataatgctcaagtcaattctgtggactctacagggaaaacacctcttatgatggctgcagaaaatggacaaacaaatacagttgagatgctggttagcagtgctagtgcagaactgactttacaagataacagtaaaaatactgccctccatttggcttgtagcaagggtcatgaaactagtgccttgttaatactggaaaagataacagatagaaacctcatcaatgcaaccaacgcagccttgcaaacacctctgcatgttgctgcccgaaatgggctaacaatggtggttcaggaacttttgggaaaaggagcaagtgtgcttgcagtagatgaaaatggctataccccagctttggcctgtgctcccaataaggatgtggctgattgcctggctctcattttggccaccatgatgcctgtctcatcaagtagtcctttatcatccttaacattcaatgccattaaccgttataccaacacctcaaaaacagtcagctttgaagctttgcccatcatgaggaatgaacctagctcctattgcagtttcaataacattggaggggaacaggagtacttatacactgacgtggatgagctcaacgactccgattctgagacctactgagaggctgaggaggagggagttctcacagtaaagcttcaaactgtgctttttcaggaaaaaggcactttgatattcacgtagaaattcaacctaagaggaaagatcccacagtgagccaatgttaagagatctgatggcattaggaggaagagttttaaaggcaagttttacaaaaggaacttctagaatcttgaaatagacctgactgaggaaaacacattgatgtcagaattctttgtggaattgtttaatttggttttgcagtgccaggaacaattggggacactgtgcactctaacctgcttacacaagcaacactattgtaacagaagaaataaagacactagatttaaattttatcaataaaattacaactaaatttaaaggcaataaaagtttggtacagtaggcattatgtgcacagcaaattgcaaaaggaccaaataactgaaaggtttttttaataaaatgccattttgtggaaactggagtagattaaatgaaacattacctaaaccaaactgcaatatttctggaaatgaagctgagatttggttttaaatgttgagtttttttgggttttgttttttttttaagaaaacatctgaaagccttccaatgctgtattaaaccatgagagaaagcagatgtatttttacatttttttcttttacagaactatttcaaatttccaatttttatactattagaattaaaaaccagctgactgggtgcaatacgggtgaaaatacttgtgacatagacattgagatggattggggtcaggctgttgccctgttttgaatggtttgggtttaaaatagtactatttttgtttgaaaatgtaaagaatttcctagaaaaaaattcatgaaatcaaaaagtagactatttcaccctattgcagctaagtggtcctggggcatggagtcttcaacctctctatgaatggcacaccttagtcacttatgttacttttgtgtccccaccatgggttgggggattttttgtttattctgatctatgagttttgaaaaagtgaataatcaaaaggaaaataattccttgttgttcataaattaagcatcactaaagtctcttgaaaggcatttctgtattgggcaagatttaaaatactaaagccttaggtcctattcatatttaaagtagcatgtttgtaacctgttactatttggagagagaagcagttgcctgccaaattgaagactacctttcaaatagcaaaagagagagagaaggctgatatttcggcttttaaataaagatttgtgtggttctgcttttactgtaactgtcactttcccagtgaaaatgatttcatatacattgagggtcttacaggtatgggtaaagttctataaattgcaacaaaatgatacccaatttcattttatcctttttgtattgtgaaactggaaactttatgacattgtaaattatcagctggtttttctgaatataaagtgtgaaaacacagaacagtattttgatctatttgataattttgtgggttttttgaagaattaatgagcatgtacatagaaatagtgactgcttgaatactgtatttacttgcactctttcagtacatcaagattcctgtatattttagagtataataaaacacagatgtgagttgtatttaatgaataatgtatttgtatctgtgcatattatctacaaatctataaagtttctagggcattgactactagattttaagcattttttctaaaatatttacagaaattataaatctaatcccccatcttttctttataatataaagaagtcataatgaacccttcctaattattagtagtaggaaggtgaatatgcattttaatgacagtggactacattttctattgtaccttttgaaaaaaaaaaaaatcaagcagattctaaaagtatacatatgtgtgctttctctttccttttaggaattctcttctgaattccctgagggaattttctagaatctcagaattgaaagagacctgaggttcatccagtctctaacctcttaacaaatgcaggagtcccttctacaagggtgatctttccaccttgaacacttccaagtgactctacctcaccaagcagtccattcagttgttgagcagctctaactgttagaaaggtcttccttagatggagttgaagcctccctcccggtaacttctgtctttgggcctgggtctgtcctccaagagaaccctgagaatgttggaaggatgaatctcgcacattctgccatgtcttctcttttacaggctgtttgacttctctgctgaagtgatttccagaaggactcatttgacacactattagatttaccacatctaatgaaatccaaggtgtagctataaagtgacaagctgtttttaatttatcacatacaccagaacttctatcctgcatcacttatatgtaaatgatgctgttaccaaaaacattaaggtagttcttgcgaatgccaccccactaagaaaactatttcattacttttgtaatccatctgtgagagtctgccccccagcttaaccacttcctttggtctgcacccaatgaagggaaaccccaaagtactgtctcaaatggtatttgaactacgccagtattgttggaataagtacattaattacttgaatgaatgaacacagcaccgtagaaatttcctttatggttacaccttgtatgtctaaagcattcaggccctgttctgtagtgtttcttatcctcacacagagtagaaaagcctgtttgctttatttaacttatacataaaagatgacatctgaaatatctgatgtgtattataataccagcttctgctctagaactactttgggtgaaatggtggtaatagcaaatgacctcctttaacaagacactcatctcaaacaatgccatttagttcaggagatctctaagtgtagctgtaaattttggggttaatttggcttatattggaccttttaaaagaaataaagttttttaatgcaataaa

SEQ ID NO: 107663 - DNA, 1658 bp, Homo sapiens
  Payload ID: 1130
  Gene Symbol: ANKRD29
  Gene Name: ankyrin repeat domain 29
  Uniprot ID: Q8N6D5
  ENST ID: ENST00000322980
  CDS Start-End: 86-892
gagagccccgggagagtgaagggccggggaggacaaggcgccccgggcccaaagcgcgccggctcccgctcgggcggccgcggacatgtgcaggatgtccttcaagaaggaaactccacttgccaatgctgcattctgggcagccaggagaggaaacctggcgctgctgaagctgctgttgaacagcggccgggtggacgtggactgcagagacagccatggcaccacactcctgatggttgctgcctacgctggccacatagactgtgtgagggaactggttctgcaaggagcagacatcaatctccagagagagtcaggtacaactgccctattctttgccgcccagcaaggccataatgatgtcgtgagatttctctttggatttggagcatccactgaatttaggaccaaagacgggggcaccgccctgttggctgccagtcagtacgggcacatgcaggtggtggagaccttgctgaagcacggagcaaacatccatgaccaactttatgatggagccactgccctcttcctagctgcccaaggtggttacttggatgttattcgattactgctggcttcaggagcaaaagtcaaccagccaaggcaggacgggacagcgcccctgtggatcgcgtcccagatgggccacagcgaggtggtgcgggtgatgctgctgcgcggagccgaccgcgacgctgcgcggaacgatggcacaacagcattattgaaagcagccaacaaagggtataatgatgtcataaaagagttgcttaaattctcacccactcttggtattttgaaggccaatgaacttccggcagaactaaccaaaaatgaacgtatattgcgtctcctgagaagtaaagaaggtcccagaaagagctaacttagctccatatttgacagaaagatagaaagcttaaccacattgtccaaaaagaaattgcatttcaagcagtgttggaaattcttttatgaaaaaaaaagatgcccagaatgcccatcctgtgggtccctgacaaagaagagctacgctctgtgcacgaagtcaagaaccaaacagctcagggaccctcttgccccttcaccatggacttctcatggtgtcctgtaactcatctcccggggggcctggcatgttcacagattccacagaaactcattttcaacaatgctaacttggacctgtcagttaaactctaaggtggacagggttctcagtactaagcaaggagacagaatgctttgttcctttaaaagactgaaaagctgaccttcaatggattgaggcacttttgcttttgtgttaaatgtagatgtgctaaaatatatagatctatcatattttacctacatatgtatgtcattccagtataaaacattctcctctacccaagaaccatagccatgattgttataaatcaatgaagtgtaaacatacattattaaaaaaccacttctgacattccattatgtgctattcaaagatggactattgaactatagaaaagacagactgtgcatttgttcgttgatcctcatcttattcctgacatgtaaaaatcaattttacgtagagtcaacattgtaggtaggttaaaataccagtggcaaatttggaaattcagaaacttataaaccacgagaaatat

SEQ ID NO: 107664 - DNA, 583 bp, Homo sapiens
  Payload ID: 1130
  Gene Symbol: ANKRD29
  Gene Name: ankyrin repeat domain 29
  ENST ID: ENST00000586087
  CDS Start-End: 154-583
gcggcggctgctgccgggccgggcggcgggagcgcgcggcgtcggaggccgcccctctgcggaacgccgagagccccgggagagtgaagggccggggaggacaaggcgccccgggcccaaagcgcgccggctcccgctcgggcggccgcggacatgtgcaggatgtccttcaagaaggaaactccacttgccaatgctgcattctgggcagccaggagaggaaacctggcgctgctgaagctgctgttgaacagcggccgggtggacgtggactgcagagacagccatggcaccacactcctgatggttgctgcctacgctggccacatagactgtgtgagggaactggttctgcaaggagcagacatcaatctccagagagaggacgggggcaccgccctgttggctgccagtcagtacgggcacatgcaggtggtggagaccttgctgaagcacggagcaaacatccatgaccaactttatgatggagccactgccctcttcctagctgcccaaggtggttacttggatgttattcgattactgctggcttcaggagcaaaagtcaaccagccaaggcagg

SEQ ID NO: 107665 - DNA, 694 bp, Homo sapiens
  Payload ID: 1130
  Gene Symbol: ANKRD29
  Gene Name: ankyrin repeat domain 29
  ENST ID: ENST00000587763
  CDS Start-End: 1-380
aaggtggttacttggatgttattcgattactgctggcttcaggagcaaaagtcaaccagccaaggcaggacgggacagcgcccctgtggatcgcgtcccagatgggccacagcgaggtggtgcgggtgatgctgctgcgcggagccgaccgcgacgctgcgcggaacgatggcacaacagcattattgaaagcagccaacaaagggtataatgatgtcataaaagagttgcttaaattctcacccactcttggtattttgaagaatgggacatcagcgctccatgcagcagtgctcagtggaaacattaaaacagttgcgctgctcctagaagcaggggcagacccatccctgagaaacaaggtgcgatggcagaactgattgggccagattactggtctgggtggtgtcgctgatccatcaagtgcaaggccaatgaacttccggcagaactaaccaaaaatgaacgtatattgcgtctcctgagaagtaaagaaggtcccagaaagagctaacttagctccatatttgacagaaagatagaaagcttaaccacattgtccaaaaagaaattgcatttcaagcagtgttggaaattcttttatgaaaaaaaaagatgcccagaatgcccatcctgtgggtccctgacaaagaagagctacgctctgtgcacgaagtcaagaaccaaacagctc

SEQ ID NO: 107666 - DNA, 3361 bp, Homo sapiens
  Payload ID: 1130
  Gene Symbol: ANKRD29
  Gene Name: ankyrin repeat domain 29
  Uniprot ID: Q8N6D5
  ENST ID: ENST00000592179
  CDS Start-End: 156-1061
gtgcggcggctgctgccgggccgggcggcgggagcgcgcggcgtcggaggccgcccctctgcggaacgccgagagccccgggagagtgaagggccggggaggacaaggcgccccgggcccaaagcgcgccggctcccgctcgggcggccgcggacatgtgcaggatgtccttcaagaaggaaactccacttgccaatgctgcattctgggcagccaggagaggaaacctggcgctgctgaagctgctgttgaacagcggccgggtggacgtggactgcagagacagccatggcaccacactcctgatggttgctgcctacgctggccacatagactgtgtgagggaactggttctgcaaggagcagacatcaatctccagagagagtcaggtacaactgccctattctttgccgcccagcaaggccataatgatgtcgtgagatttctctttggatttggagcatccactgaatttaggaccaaagacgggggcaccgccctgttggctgccagtcagtacgggcacatgcaggtggtggagaccttgctgaagcacggagcaaacatccatgaccaactttatgatggagccactgccctcttcctagctgcccaaggtggttacttggatgttattcgattactgctggcttcaggagcaaaagtcaaccagccaaggcaggacgggacagcgcccctgtggatcgcgtcccagatgggccacagcgaggtggtgcgggtgatgctgctgcgcggagccgaccgcgacgctgcgcggaacgatggcacaacagcattattgaaagcagccaacaaagggtataatgatgtcataaaagagttgcttaaattctcacccactcttggtattttgaagaatgggacatcagcgctccatgcagcagtgctcagtggaaacattaaaacagttgcgctgctcctagaagcaggggcagacccatccctgagaaacaaggccaatgaacttccggcagaactaaccaaaaatgaacgtatattgcgtctcctgagaagtaaagaaggtcccagaaagagctaacttagctccatatttgacagaaagatagaaagcttaaccacattgtccaaaaagaaattgcatttcaagcagtgttggaaattcttttatgaaaaaaaaagatgcccagaatgcccatcctgtgggtccctgacaaagaagagctacgctctgtgcacgaagtcaagaaccaaacagctcagggaccctcttgccccttcaccatggacttctcatggtgtcctgtaactcatctcccggggggcctggcatgttcacagattccacagaaactcattttcaacaatgctaacttggacctgtcagttaaactctaaggtggacagggttctcagtactaagcaaggagacagaatgctttgttcctttaaaagactgaaaagctgaccttcaatggattgaggcacttttgcttttgtgttaaatgtagatgtgctaaaatatatagatctatcatattttacctacatatgtatgtcattccagtataaaacattctcctctacccaagaaccatagccatgattgttataaatcaatgaagtgtaaacatacattattaaaaaaccacttctgacattccattatgtgctattcaaagatggactattgaactatagaaaagacagactgtgcatttgttcgttgatcctcatcttattcctgacatgtaaaaatcaattttacgtagagtcaacattgtaggtaggttaaaataccagtggcaaatttggaaattcagaaacttataaaccacgagaaatatataggcttgtctctttggtcttttattttggctctattgttgggaatctatttcctattctataagtaagtatacctaacatgctgtggaatcttgagtttccaacaccgtgctgcttgatagaatgactttgaggtccttggataaaatgtgatatatgcaagtacagtatgttgctattactattgcaggaatataaataataaaagactgttattagcacttagtaagtcttcatctatgcatgtttttgagttgactgattccaagaatgaaatatgaggtttattgaattattcctttgaaagggatcaaaacttatattcaatgcactttataattaatggtgtctaaatgcctcagtcagtgcctaactgcacatacaaaaataaaaccttctttctgtaatctaccaaaataaacgcaatggtatttctgctatttaaacacatctttagcttatttcttcatgttctgctctggttttcagtcagtgtctatgtaaagacacttttagaggaaaatgttgtaatcccaaaagaatttttgtttaaccaactttcagagttactaaaaggattatctttaattcagtaaataatagaatataatcttcaaaattagaagatattctcttaaaatttataacaattaatgcaacaaaaatcagcatattttgataaatgtctcaagcaaatgagcaactcacaggccccacaggtgcctacagcctgaccagctatacaaaaagcctgcaacctgattctaggataaaatattagaaagctctctgttgctaaaacatccagatataaacattttggtggctaaaatcaatgccatttcctcattgacattcttttattcagcaaatttgtacaaatatacattttctcctgtgcgaatttcaaaaagctatattcattttgaagaggaaaataatatggcattaaatgctttgtattttccccttagttagcccttatggcaaaaatagttgctaatcactgatacaaagcaaaacgttatgggtactgataacaaagttccaaaagccaaaatgggatgaatcacaaacttactgtttttcactaaaacatgtaattggcctattacatcaatagttttaagtgggtaatgttcttgaacaatattagagccataaaattgaagccagtagcttgaacaatatggaggccttcttactgtagggaagaggtgtctagcttagaaggatcacatttgatctagatgagattacccatagcagggaaaatgaatcatcacctaccaaagactgtacggaaaggtgtgttattttcaaaattgcattttagtttgcacacatgtaaatgattattctatgttaatctaattgacaattcagttagctccgcatcctaagacttaaaactagcaattcctatgcaaatcatctgcttaactgaactacaaacgtttttcattaattcattctttgatgacatattccatgttatataataattcaaaataaagttaatatactacccca

SEQ ID NO: 107667 - DNA, 846 bp, Homo sapiens
  Payload ID: 1130
  Gene Symbol: ANKRD29
  Gene Name: ankyrin repeat domain 29
  ENST ID: ENST00000585908
  CDS Start-End: 43-375
cgggcccaaagcgcgccggctcccgctcgggcggccgcggacatgtgcaggatgtccttcaagaaggaaactccacttgccaatgctgcattctgggcagccaggagaggaaacctggcgctgctgaagctgctgttgaacagcggccgggtggacgtggactgcagagacagcgtacggtggttcggtagatgcatgcccagcatgcaccattgccctctgtgggcacaggagcacctcaggaatacattcccctttacaatgcttatttactttttcatgtgtttgcttgctttatcctttttaaaacatccaaggtactgtggtgaacttaaaaacatgctgggggaagtcagaaagaaaaggaaacaatgaaatgcataaaacagaaggcaaccacaatagggaaagaggcacttcactgggaatcagaattggcagattacaagaagaaaagcctgtttagtgaaagaattcaagccaaccacttccatgaaaagatggagataatttagagcacaagtgggctgccatggatgtgggcgttatgtttcttctacaaggatgagaaaacaaaaattgaagcctcccccaggattttatcctttcattacctcttgaaaacataaatacactaattggcaatttaaaaagggaaacaaaaatagatactactgcccactggcagataccacttagagagcttttccatccccagctagaggcaatcgtttttctgtcctcagcaagacttctcatctctgggaccaagaggacctccaatgaggaaagggagcgagcaatgatgttttgattttaggatttgaataaaaatgtttcaaagga

SEQ ID NO: 107668 - DNA, 4405 bp, Homo sapiens
  Payload ID: 1131
  Gene Symbol: ANKRD30A
  Gene Name: ankyrin repeat domain 30A
  ENST ID: ENST00000361713
  CDS Start-End: 100-4125
ctagtctataccagcaacgactcctacatcgtccactctggggatcttagaaagatccataaagctgcctcccggggacaagtccggaagctggagaagatgacaaagaggaagaagaccatcaaccttaatatacaagacgcccagaagaggactgctctacactgggcctgtgtcaatggccatgaggaagtagtaacatttctggtagacagaaagtgccagcttgacgtccttgatggcgaacacaggacacctctgatgaaggctctacaatgccatcaggaggcttgtgcaaatattctgatagattctggtgccgatataaatctcgtagatgtgtatggcaacacggctctccattatgctgtttatagtgagattttgtcagtggtggcaaaactgctgtcccatggtgcagtcatcgaagtgcacaacaaggctagcctcacaccacttttactatccataacgaaaagaagtgagcaaattgtggaatttttgctgataaaaaatgcaaatgcgaatgcagttaataagtataaatgcacagccctcatgcttgctgtatgtcatggatcatcagagatagttggcatgcttcttcagcaaaatgttgacgtctttgctgcagatatatgtggagtaactgcagaacattatgctgttacttgtggatttcatcacattcatgaacaaattatggaatatatacgaaaattatctaaaaatcatcaaaataccaatccagaaggaacatctgcaggaacacctgatgaggctgcacccttggcggaaagaacacctgacacagctgaaagcttggtggaaaaaacacctgatgaggctgcacccttggtggaaagaacacctgacacggctgaaagcttggtggaaaaaacacctgatgaggctgcatccttggtggagggaacatctgacaaaattcaatgtttggagaaagcgacatctggaaagttcgaacagtcagcagaagaaacacctagggaaattacgagtcctgcaaaagaaacatctgagaaatttacgtggccagcaaaaggaagacctaggaagatcgcatgggagaaaaaagaagacacacctagggaaattatgagtcccgcaaaagaaacatctgagaaatttacgtgggcagcaaaaggaagacctaggaagatcgcatgggagaaaaaagaaacacctgtaaagactggatgcgtggcaagagtaacatctaataaaactaaagttttggaaaaaggaagatctaagatgattgcatgtcctacaaaagaatcatctacaaaagcaagtgccaatgatcagaggttcccatcagaatccaaacaagaggaagatgaagaatattcttgtgattctcggagtctctttgagagttctgcaaagattcaagtgtgtatacctgagtctatatatcaaaaagtaatggagataaatagagaagtagaagagcctcctaagaagccatctgccttcaagcctgccattgaaatgcaaaactctgttccaaataaagcctttgaattgaagaatgaacaaacattgagagcagatccgatgttcccaccagaatccaaacaaaaggactatgaagaaaattcttgggattctgagagtctctgtgagactgtttcacagaaggatgtgtgtttacccaaggctacacatcaaaaagaaatagataaaataaatggaaaattagaagagtctcctaataaagatggtcttctgaaggctacctgcggaatgaaagtttctattccaactaaagccttagaattgaaggacatgcaaactttcaaagcagagcctccggggaagccatctgccttcgagcctgccactgaaatgcaaaagtctgtcccaaataaagccttggaattgaaaaatgaacaaacattgagagcagatgagatactcccatcagaatccaaacaaaaggactatgaagaaaattcttgggatactgagagtctctgtgagactgtttcacagaaggatgtgtgtttacccaaggctgcgcatcaaaaagaaatagataaaataaatggaaaattagaagggtctcctgttaaagatggtcttctgaaggctaactgcggaatgaaagtttctattccaactaaagccttagaattgatggacatgcaaactttcaaagcagagcctcccgagaagccatctgccttcgagcctgccattgaaatgcaaaagtctgttccaaataaagccttggaattgaagaatgaacaaacattgagagcagatgagatactcccatcagaatccaaacaaaaggactatgaagaaagttcttgggattctgagagtctctgtgagactgtttcacagaaggatgtgtgtttacccaaggctacgcatcaaaaagaaatagataaaataaatggaaaattagaagagtctcctgataatgatggttttctgaaggctccctgcagaatgaaagtttctattccaactaaagccttagaattgatggacatgcaaactttcaaagcagagcctcccgagaagccatctgccttcgagcctgccattgaaatgcaaaagtctgttccaaataaagccttggaattgaagaatgaacaaacattgagagcagatcagatgttcccttcagaatcaaaacaaaagaaggttgaagaaaattcttgggattctgagagtctccgtgagactgtttcacagaaggatgtgtgtgtacccaaggctacacatcaaaaagaaatggataaaataagtggaaaattagaagattcaactagcctatcaaaaatcttggatacagttcattcttgtgaaagagcaagggaacttcaaaaagatcactgtgaacaacgtacaggaaaaatggaacaaatgaaaaagaagttttgtgtactgaaaaagaaactgtcagaagcaaaagaaataaaatcacagttagagaaccaaaaagttaaatgggaacaagagctctgcagtgtgagattgactttaaaccaagaagaagagaagagaagaaatgccgatatattaaatgaaaaaattagggaagaattaggaagaatcgaagagcagcataggaaagagttagaagtgaaacaacaacttgaacaggctctcagaatacaagatatagaattgaagagtgtagaaagtaatttgaatcaggtttctcacactcatgaaaatgaaaattatctcttacatgaaaattgcatgttgaaaaaggaaattgccatgctaaaactggaaatagccacactgaaacaccaataccaggaaaaggaaaataaatactttgaggacattaagattttaaaagaaaagaatgctgaacttcagatgaccctaaaactgaaagaggaatcattaactaaaagggcatctcaatatagtgggcagcttaaagttctgatagctgagaacacaatgctcacttctaaattgaaggaaaaacaagacaaagaaatactagaggcagaaattgaatcacaccatcctagactggcttctgctgtacaagaccatgatcaaattgtgacatcaagaaaaagtcaagaacctgctttccacattgcaggagatgcttgtttgcaaagaaaaatgaatgttgatgtgagtagtacgatatataacaatgaggtgctccatcaaccactttctgaagctcaaaggaaatccaaaagcctaaaaattaatctcaattatgcaggagatgctctaagagaaaatacattggtttcagaacatgcacaaagagaccaacgtgaaacacagtgtcaaatgaaggaagctgaacacatgtatcaaaacgaacaagataatgtgaacaaacacactgaacagcaggagtctctagatcagaaattatttcaactacaaagcaaaaatatgtggcttcaacagcaattagttcatgcacataagaaagctgacaacaaaagcaagataacaattgatattcattttcttgagaggaaaatgcaacatcatctcctaaaagagaaaaatgaggagatatttaattacaataaccatttaaaaaaccgtatatatcaatatgaaaaagagaaagcagaaacagaaaactcatgagagacaagcagtaagaaacttcttttggagaaacaacagaccagatctttactcacaactcatgctaggaggccagtcctagcatcaccttatgttgaaaatcttaccaatagtctgtgtcaacagaatacttattttagaagaaaaattcatgatttcttcctgaagcctacagacataaaataacagtgtgaagaattacttgttcacgaattgcataaagctgcacaggattcccatctaccctgatgatgcagcagacatcattcaatccaaccag

SEQ ID NO: 107669 - DNA, 4762 bp, Homo sapiens
  Payload ID: 1131
  Gene Symbol: ANKRD30A
  Gene Name: ankyrin repeat domain 30A
  ENST ID: ENST00000374660
  CDS Start-End: 100-4482
ctagtctataccagcaacgactcctacatcgtccactctggggatcttagaaagatccataaagctgcctcccggggacaagtccggaagctggagaagatgacaaagaggaagaagaccatcaaccttaatatacaagacgcccagaagaggactgctctacactgggcctgtgtcaatggccatgaggaagtagtaacatttctggtagacagaaagtgccagcttgacgtccttgatggcgaacacaggacacctctgatgaaggctctacaatgccatcaggaggcttgtgcaaatattctgatagattctggtgccgatataaatctcgtagatgtgtatggcaacacggctctccattatgctgtttatagtgagattttgtcagtggtggcaaaactgctgtcccatggtgcagtcatcgaagtgcacaacaaggctagcctcacaccacttttactatccataacgaaaagaagtgagcaaattgtggaatttttgctgataaaaaatgcaaatgcgaatgcagttaataagtataaatgcacagccctcatgcttgctgtatgtcatggatcatcagagatagttggcatgcttcttcagcaaaatgttgacgtctttgctgcagatatatgtggagtaactgcagaacattatgctgttacttgtggatttcatcacattcatgaacaaattatggaatatatacgaaaattatctaaaaatcatcaaaataccaatccagaaggaacatctgcaggaacacctgatgaggctgcacccttggcggaaagaacacctgacacagctgaaagcttggtggaaaaaacacctgatgaggctgcacccttggtggaaagaacacctgacacggctgaaagcttggtggaaaaaacacctgatgaggctgcatccttggtggagggaacatctgacaaaattcaatgtttggagaaagcgacatctggaaagttcgaacagtcagcagaagaaacacctagggaaattacgagtcctgcaaaagaaacatctgagaaatttacgtggccagcaaaaggaagacctaggaagatcgcatgggagaaaaaagaagacacacctagggaaattatgagtcccgcaaaagaaacatctgagaaatttacgtgggcagcaaaaggaagacctaggaagatcgcatgggagaaaaaagaaacacctgtaaagactggatgcgtggcaagagtaacatctaataaaactaaagttttggaaaaaggaagatctaagatgattgcatgtcctacaaaagaatcatctacaaaagcaagtgccaatgatcagaggttcccatcagaatccaaacaagaggaagatgaagaatattcttgtgattctcggagtctctttgagagttctgcaaagattcaagtgtgtatacctgagtctatatatcaaaaagtaatggagataaatagagaagtagaagagcctcctaagaagccatctgccttcaagcctgccattgaaatgcaaaactctgttccaaataaagcctttgaattgaagaatgaacaaacattgagagcagatccgatgttcccaccagaatccaaacaaaaggactatgaagaaaattcttgggattctgagagtctctgtgagactgtttcacagaaggatgtgtgtttacccaaggctacacatcaaaaagaaatagataaaataaatggaaaattagaagagtctcctaataaagatggtcttctgaaggctacctgcggaatgaaagtttctattccaactaaagccttagaattgaaggacatgcaaactttcaaagcagagcctccggggaagccatctgccttcgagcctgccactgaaatgcaaaagtctgtcccaaataaagccttggaattgaaaaatgaacaaacattgagagcagatgagatactcccatcagaatccaaacaaaaggactatgaagaaaattcttgggatactgagagtctctgtgagactgtttcacagaaggatgtgtgtttacccaaggctgcgcatcaaaaagaaatagataaaataaatggaaaattagaagggtctcctgttaaagatggtcttctgaaggctaactgcggaatgaaagtttctattccaactaaagccttagaattgatggacatgcaaactttcaaagcagagcctcccgagaagccatctgccttcgagcctgccattgaaatgcaaaagtctgttccaaataaagccttggaattgaagaatgaacaaacattgagagcagatgagatactcccatcagaatccaaacaaaaggactatgaagaaagttcttgggattctgagagtctctgtgagactgtttcacagaaggatgtgtgtttacccaaggctgcgcatcaaaaagaaatagataaaataaatggaaaattagaagggtctcctgttaaagatggtcttctgaaggctaactgcggaatgaaagtttctattccaactaaagccttagaattgatggacatgcaaactttcaaagcagagcctcccgagaagccatctgccttcgagcctgccattgaaatgcaaaagtctgttccaaataaagccttggaattgaagaatgaacaaacattgagagcagatgagatactcccatcagaatccaaacaaaaggactatgaagaaagttcttgggattctgagagtctctgtgagactgtttcacagaaggatgtgtgtttacccaaggctacgcatcaaaaagaaatagataaaataaatggaaaattagaagagtctcctgataatgatggttttctgaaggctccctgcagaatgaaagtttctattccaactaaagccttagaattgatggacatgcaaactttcaaagcagagcctcccgagaagccatctgccttcgagcctgccattgaaatgcaaaagtctgttccaaataaagccttggaattgaagaatgaacaaacattgagagcagatcagatgttcccttcagaatcaaaacaaaagaaggttgaagaaaattcttgggattctgagagtctccgtgagactgtttcacagaaggatgtgtgtgtacccaaggctacacatcaaaaagaaatggataaaataagtggaaaattagaagattcaactagcctatcaaaaatcttggatacagttcattcttgtgaaagagcaagggaacttcaaaaagatcactgtgaacaacgtacaggaaaaatggaacaaatgaaaaagaagttttgtgtactgaaaaagaaactgtcagaagcaaaagaaataaaatcacagttagagaaccaaaaagttaaatgggaacaagagctctgcagtgtgagattgactttaaaccaagaagaagagaagagaagaaatgccgatatattaaatgaaaaaattagggaagaattaggaagaatcgaagagcagcataggaaagagttagaagtgaaacaacaacttgaacaggctctcagaatacaagatatagaattgaagagtgtagaaagtaatttgaatcaggtttctcacactcatgaaaatgaaaattatctcttacatgaaaattgcatgttgaaaaaggaaattgccatgctaaaactggaaatagccacactgaaacaccaataccaggaaaaggaaaataaatactttgaggacattaagattttaaaagaaaagaatgctgaacttcagatgaccctaaaactgaaagaggaatcattaactaaaagggcatctcaatatagtgggcagcttaaagttctgatagctgagaacacaatgctcacttctaaattgaaggaaaaacaagacaaagaaatactagaggcagaaattgaatcacaccatcctagactggcttctgctgtacaagaccatgatcaaattgtgacatcaagaaaaagtcaagaacctgctttccacattgcaggagatgcttgtttgcaaagaaaaatgaatgttgatgtgagtagtacgatatataacaatgaggtgctccatcaaccactttctgaagctcaaaggaaatccaaaagcctaaaaattaatctcaattatgcaggagatgctctaagagaaaatacattggtttcagaacatgcacaaagagaccaacgtgaaacacagtgtcaaatgaaggaagctgaacacatgtatcaaaacgaacaagataatgtgaacaaacacactgaacagcaggagtctctagatcagaaattatttcaactacaaagcaaaaatatgtggcttcaacagcaattagttcatgcacataagaaagctgacaacaaaagcaagataacaattgatattcattttcttgagaggaaaatgcaacatcatctcctaaaagagaaaaatgaggagatatttaattacaataaccatttaaaaaaccgtatatatcaatatgaaaaagagaaagcagaaacagaaaactcatgagagacaagcagtaagaaacttcttttggagaaacaacagaccagatctttactcacaactcatgctaggaggccagtcctagcatcaccttatgttgaaaatcttaccaatagtctgtgtcaacagaatacttattttagaagaaaaattcatgatttcttcctgaagcctacagacataaaataacagtgtgaagaattacttgttcacgaattgcataaagctgcacaggattcccatctaccctgatgatgcagcagacatcattcaatccaaccag

SEQ ID NO: 107670 - DNA, 4458 bp, Homo sapiens
  Payload ID: 1131
  Gene Symbol: ANKRD30A
  Gene Name: ankyrin repeat domain 30A
  ENST ID: ENST00000602533
  CDS Start-End: 100-4125
ctagtctataccagcaacgactcctacatcgtccactctggggatcttagaaagatccataaagctgcctcccggggacaagtccggaagctggagaagatgacaaagaggaagaagaccatcaaccttaatatacaagacgcccagaagaggactgctctacactgggcctgtgtcaatggccatgaggaagtagtaacatttctggtagacagaaagtgccagcttgacgtccttgatggcgaacacaggacacctctgatgaaggctctacaatgccatcaggaggcttgtgcaaatattctgatagattctggtgccgatataaatctcgtagatgtgtatggcaacacggctctccattatgctgtttatagtgagattttgtcagtggtggcaaaactgctgtcccatggtgcagtcatcgaagtgcacaacaaggctagcctcacaccacttttactatccataacgaaaagaagtgagcaaattgtggaatttttgctgataaaaaatgcaaatgcgaatgcagttaataagtataaatgcacagccctcatgcttgctgtatgtcatggatcatcagagatagttggcatgcttcttcagcaaaatgttgacgtctttgctgcagatatatgtggagtaactgcagaacattatgctgttacttgtggatttcatcacattcatgaacaaattatggaatatatacgaaaattatctaaaaatcatcaaaataccaatccagaaggaacatctgcaggaacacctgatgaggctgcacccttggcggaaagaacacctgacacagctgaaagcttggtggaaaaaacacctgatgaggctgcacccttggtggaaagaacacctgacacggctgaaagcttggtggaaaaaacacctgatgaggctgcatccttggtggagggaacatctgacaaaattcaatgtttggagaaagcgacatctggaaagttcgaacagtcagcagaagaaacacctagggaaattacgagtcctgcaaaagaaacatctgagaaatttacgtggccagcaaaaggaagacctaggaagatcgcatgggagaaaaaagaagacacacctagggaaattatgagtcccgcaaaagaaacatctgagaaatttacgtgggcagcaaaaggaagacctaggaagatcgcatgggagaaaaaagaaacacctgtaaagactggatgcgtggcaagagtaacatctaataaaactaaagttttggaaaaaggaagatctaagatgattgcatgtcctacaaaagaatcatctacaaaagcaagtgccaatgatcagaggttcccatcagaatccaaacaagaggaagatgaagaatattcttgtgattctcggagtctctttgagagttctgcaaagattcaagtgtgtatacctgagtctatatatcaaaaagtaatggagataaatagagaagtagaagagcctcctaagaagccatctgccttcaagcctgccattgaaatgcaaaactctgttccaaataaagcctttgaattgaagaatgaacaaacattgagagcagatccgatgttcccaccagaatccaaacaaaaggactatgaagaaaattcttgggattctgagagtctctgtgagactgtttcacagaaggatgtgtgtttacccaaggctacacatcaaaaagaaatagataaaataaatggaaaattagaagagtctcctaataaagatggtcttctgaaggctacctgcggaatgaaagtttctattccaactaaagccttagaattgaaggacatgcaaactttcaaagcagagcctccggggaagccatctgccttcgagcctgccactgaaatgcaaaagtctgtcccaaataaagccttggaattgaaaaatgaacaaacattgagagcagatgagatactcccatcagaatccaaacaaaaggactatgaagaaaattcttgggatactgagagtctctgtgagactgtttcacagaaggatgtgtgtttacccaaggctgcgcatcaaaaagaaatagataaaataaatggaaaattagaagggtctcctgttaaagatggtcttctgaaggctaactgcggaatgaaagtttctattccaactaaagccttagaattgatggacatgcaaactttcaaagcagagcctcccgagaagccatctgccttcgagcctgccattgaaatgcaaaagtctgttccaaataaagccttggaattgaagaatgaacaaacattgagagcagatgagatactcccatcagaatccaaacaaaaggactatgaagaaagttcttgggattctgagagtctctgtgagactgtttcacagaaggatgtgtgtttacccaaggctacgcatcaaaaagaaatagataaaataaatggaaaattagaagagtctcctgataatgatggttttctgaaggctccctgcagaatgaaagtttctattccaactaaagccttagaattgatggacatgcaaactttcaaagcagagcctcccgagaagccatctgccttcgagcctgccattgaaatgcaaaagtctgttccaaataaagccttggaattgaagaatgaacaaacattgagagcagatcagatgttcccttcagaatcaaaacaaaagaaggttgaagaaaattcttgggattctgagagtctccgtgagactgtttcacagaaggatgtgtgtgtacccaaggctacacatcaaaaagaaatggataaaataagtggaaaattagaagattcaactagcctatcaaaaatcttggatacagttcattcttgtgaaagagcaagggaacttcaaaaagatcactgtgaacaacgtacaggaaaaatggaacaaatgaaaaagaagttttgtgtactgaaaaagaaactgtcagaagcaaaagaaataaaatcacagttagagaaccaaaaagttaaatgggaacaagagctctgcagtgtgagattgactttaaaccaagaagaagagaagagaagaaatgccgatatattaaatgaaaaaattagggaagaattaggaagaatcgaagagcagcataggaaagagttagaagtgaaacaacaacttgaacaggctctcagaatacaagatatagaattgaagagtgtagaaagtaatttgaatcaggtttctcacactcatgaaaatgaaaattatctcttacatgaaaattgcatgttgaaaaaggaaattgccatgctaaaactggaaatagccacactgaaacaccaataccaggaaaaggaaaataaatactttgaggacattaagattttaaaagaaaagaatgctgaacttcagatgaccctaaaactgaaagaggaatcattaactaaaagggcatctcaatatagtgggcagcttaaagttctgatagctgagaacacaatgctcacttctaaattgaaggaaaaacaagacaaagaaatactagaggcagaaattgaatcacaccatcctagactggcttctgctgtacaagaccatgatcaaattgtgacatcaagaaaaagtcaagaacctgctttccacattgcaggagatgcttgtttgcaaagaaaaatgaatgttgatgtgagtagtacgatatataacaatgaggtgctccatcaaccactttctgaagctcaaaggaaatccaaaagcctaaaaattaatctcaattatgcaggagatgctctaagagaaaatacattggtttcagaacatgcacaaagagaccaacgtgaaacacagtgtcaaatgaaggaagctgaacacatgtatcaaaacgaacaagataatgtgaacaaacacactgaacagcaggagtctctagatcagaaattatttcaactacaaagcaaaaatatgtggcttcaacagcaattagttcatgcacataagaaagctgacaacaaaagcaagataacaattgatattcattttcttgagaggaaaatgcaacatcatctcctaaaagagaaaaatgaggagatatttaattacaataaccatttaaaaaaccgtatatatcaatatgaaaaagagaaagcagaaacagaaaactcatgagagacaagcagtaagaaacttcttttggagaaacaacagaccagatctttactcacaactcatgctaggaggccagtcctagcatcaccttatgttgaaaatcttaccaatagtctgtgtcaacagaatacttattttagaagaaaaattcatgatttcttcctgaagcctacagacataaaataacagtgtgaagaattacttgttcacgaattgcataaagctgcacaggattcccatctaccctgatgatgcagcagacatcattcaatccaaccagattgcaccactgcactccagcctgggtgacagagcaagactccatctcaaaaa

SEQ ID NO: 107671 - DNA, 4474 bp, Homo sapiens
  Payload ID: 1131
  Gene Symbol: ANKRD30A
  Gene Name: ankyrin repeat domain 30A
  Uniprot ID: Q9BXX3
  ENST ID: ENST00000611781
  CDS Start-End: 1-4194
atggaggagatctctgccgccgctgtcaaggtcgtgccgggcccggagcgcccgagccctttcagccagctagtctataccagcaacgactcctacatcgtccactctggggatcttagaaagatccataaagctgcctcccggggacaagtccggaagctggagaagatgacaaagaggaagaagaccatcaaccttaatatacaagacgcccagaagaggactgctctacactgggcctgtgtcaatggccatgaggaagtagtaacatttctggtagacagaaagtgccagcttgacgtccttgatggcgaacacaggacacctctgatgaaggctctacaatgccatcaggaggcttgtgcaaatattctgatagattctggtgccgatataaatctcgtagatgtgtatggcaacacggctctccattatgctgtttatagtgagattttgtcagtggtggcaaaactgctgtcccatggtgcagtcatcgaagtgcacaacaaggctagcctcacaccacttttactatccataacgaaaagaagtgagcaaattgtggaatttttgctgataaaaaatgcaaatgcgaatgcagttaataagtataaatgcacagccctcatgcttgctgtatgtcatggatcatcagagatagttggcatgcttcttcagcaaaatgttgacgtctttgctgcagatatatgtggagtaactgcagaacattatgctgttacttgtggatttcatcacattcatgaacaaattatggaatatatacgaaaattatctaaaaatcatcaaaataccaatccagaaggaacatctgcaggaacacctgatgaggctgcacccttggcggaaagaacacctgacacagctgaaagcttggtggaaaaaacacctgatgaggctgcacccttggtggaaagaacacctgacacggctgaaagcttggtggaaaaaacacctgatgaggctgcatccttggtggagggaacatctgacaaaattcaatgtttggagaaagcgacatctggaaagttcgaacagtcagcagaagaaacacctagggaaattacgagtcctgcaaaagaaacatctgagaaatttacgtggccagcaaaaggaagacctaggaagatcgcatgggagaaaaaagaagacacacctagggaaattatgagtcccgcaaaagaaacatctgagaaatttacgtgggcagcaaaaggaagacctaggaagatcgcatgggagaaaaaagaaacacctgtaaagactggatgcgtggcaagagtaacatctaataaaactaaagttttggaaaaaggaagatctaagatgattgcatgtcctacaaaagaatcatctacaaaagcaagtgccaatgatcagaggttcccatcagaatccaaacaagaggaagatgaagaatattcttgtgattctcggagtctctttgagagttctgcaaagattcaagtgtgtatacctgagtctatatatcaaaaagtaatggagataaatagagaagtagaagagcctcctaagaagccatctgccttcaagcctgccattgaaatgcaaaactctgttccaaataaagcctttgaattgaagaatgaacaaacattgagagcagatccgatgttcccaccagaatccaaacaaaaggactatgaagaaaattcttgggattctgagagtctctgtgagactgtttcacagaaggatgtgtgtttacccaaggctacacatcaaaaagaaatagataaaataaatggaaaattagaagagtctcctaataaagatggtcttctgaaggctacctgcggaatgaaagtttctattccaactaaagccttagaattgaaggacatgcaaactttcaaagcagagcctccggggaagccatctgccttcgagcctgccactgaaatgcaaaagtctgtcccaaataaagccttggaattgaaaaatgaacaaacattgagagcagatgagatactcccatcagaatccaaacaaaaggactatgaagaaaattcttgggatactgagagtctctgtgagactgtttcacagaaggatgtgtgtttacccaaggctgcgcatcaaaaagaaatagataaaataaatggaaaattagaagggtctcctgttaaagatggtcttctgaaggctaactgcggaatgaaagtttctattccaactaaagccttagaattgatggacatgcaaactttcaaagcagagcctcccgagaagccatctgccttcgagcctgccattgaaatgcaaaagtctgttccaaataaagccttggaattgaagaatgaacaaacattgagagcagatgagatactcccatcagaatccaaacaaaaggactatgaagaaagttcttgggattctgagagtctctgtgagactgtttcacagaaggatgtgtgtttacccaaggctacgcatcaaaaagaaatagataaaataaatggaaaattagaagagtctcctgataatgatggttttctgaaggctccctgcagaatgaaagtttctattccaactaaagccttagaattgatggacatgcaaactttcaaagcagagcctcccgagaagccatctgccttcgagcctgccattgaaatgcaaaagtctgttccaaataaagccttggaattgaagaatgaacaaacattgagagcagatcagatgttcccttcagaatcaaaacaaaagaaggttgaagaaaattcttgggattctgagagtctccgtgagactgtttcacagaaggatgtgtgtgtacccaaggctacacatcaaaaagaaatggataaaataagtggaaaattagaagattcaactagcctatcaaaaatcttggatacagttcattcttgtgaaagagcaagggaacttcaaaaagatcactgtgaacaacgtacaggaaaaatggaacaaatgaaaaagaagttttgtgtactgaaaaagaaactgtcagaagcaaaagaaataaaatcacagttagagaaccaaaaagttaaatgggaacaagagctctgcagtgtgagattgactttaaaccaagaagaagagaagagaagaaatgccgatatattaaatgaaaaaattagggaagaattaggaagaatcgaagagcagcataggaaagagttagaagtgaaacaacaacttgaacaggctctcagaatacaagatatagaattgaagagtgtagaaagtaatttgaatcaggtttctcacactcatgaaaatgaaaattatctcttacatgaaaattgcatgttgaaaaaggaaattgccatgctaaaactggaaatagccacactgaaacaccaataccaggaaaaggaaaataaatactttgaggacattaagattttaaaagaaaagaatgctgaacttcagatgaccctaaaactgaaagaggaatcattaactaaaagggcatctcaatatagtgggcagcttaaagttctgatagctgagaacacaatgctcacttctaaattgaaggaaaaacaagacaaagaaatactagaggcagaaattgaatcacaccatcctagactggcttctgctgtacaagaccatgatcaaattgtgacatcaagaaaaagtcaagaacctgctttccacattgcaggagatgcttgtttgcaaagaaaaatgaatgttgatgtgagtagtacgatatataacaatgaggtgctccatcaaccactttctgaagctcaaaggaaatccaaaagcctaaaaattaatctcaattatgcaggagatgctctaagagaaaatacattggtttcagaacatgcacaaagagaccaacgtgaaacacagtgtcaaatgaaggaagctgaacacatgtatcaaaacgaacaagataatgtgaacaaacacactgaacagcaggagtctctagatcagaaattatttcaactacaaagcaaaaatatgtggcttcaacagcaattagttcatgcacataagaaagctgacaacaaaagcaagataacaattgatattcattttcttgagaggaaaatgcaacatcatctcctaaaagagaaaaatgaggagatatttaattacaataaccatttaaaaaaccgtatatatcaatatgaaaaagagaaagcagaaacagaaaactcatgagagacaagcagtaagaaacttcttttggagaaacaacagaccagatctttactcacaactcatgctaggaggccagtcctagcatcaccttatgttgaaaatcttaccaatagtctgtgtcaacagaatacttattttagaagaaaaattcatgatttcttcctgaagcctacagacataaaataacagtgtgaagaattacttgttcacgaattgcataaagctgcacaggattcccatctaccctgatgatgcagcagacatcattcaatccaaccag

SEQ ID NO: 107672 - DNA, 4359 bp, Homo sapiens
  Payload ID: 1132
  Gene Symbol: ANKRD30B
  Gene Name: ankyrin repeat domain 30B
  Uniprot ID: Q9BXX2
  ENST ID: ENST00000358984
  CDS Start-End: 181-4359
caagagcttggcgatacagaaatttctgctggtgttggggcgggtgcgggaactgaagacgggcgagtgcgagccgggggcgggtgctggggaagggtaagcgggaagcgagggcgaggggtaggggctggggaagggcgagcgggaggcgcgggctctctctagcagggggctgcagccatgaagaggctcttagctgccgctggcaagggcgtgcggggcccggagcccccgaaccccttcagcgaacgggtctacactgagaaggactacgggaccatctacttcggggatctagggaagatccatacagctgcctcccggggccaagtccagaagctggagaagatgacagtagggaagaagcccgtcaacctgaacaaaagagatatgaagaagaggactgctctacactgggcctgtgtcaatggccatgcagaagtagtaacatttctggtagacagaaagtgccagcttaatgtccttgatggcgaagggaggacacctctgatgaaggctctacaatgcgagagggaggcttgtgcaaatattctcatagatgctggtgctgatctaaattatgtagatgtgtatggcaacacggctctccattatgccgtttatagtgagaatttgttaatggtggcaacactgctgtcctatggtgcagtcatcgaggtgcaaaacaaggctagcctcacaccccttttactggccatacagaaaagaagcaagcaaactgtggaatttttactaacaaaaaatgcaaatgcaaacgcatttaatgagtctaaatgcacagccctcatgcttgccatatgtgaaggctcatcagagatagtcggcatgcttcttcagcaaaatgttgacgtctttgctgaagacatacatggaataactgcagaacgttatgctgctgcttgtggagttaattacattcatcaacaacttttggaacatatacgaaaattacctaaaaatcctcaaaataccaatccagaaggaacatctacaggaacacctgatgaggctgcacccttggcggaaagaacacctgacacggctgaaagcttgctggaaaaaacacctgacgaggctgcacgcttggtggagggaacgtctgccaaaattcaatgtctggggaaagcaacatctggaaagtttgaacagtcaacagaagaaacacctaggaaaattttgaggcctacaaaagaaacatctgagaaattttcatggccagcaaaagaaagatctaggaagatcacatgggaggaaaaagaaacatctgtaaagactgaatgcgtggcaggagtaacacctaataaaactgaagttttggaaaaaggaacatctaatatgattgcatgtcctacaaaagaaacatctacaaaagcaagtacaaatgtggatgtgagttctgtagagcctatattcagtctttttggcacacggactattgaaaattcacagtgtacaaaagttgaggaagactttaatcttgctaccaagattatctctaagagtgctgcacagaattatacgtgtttacctgatgctacatatcaaaaagatatcaaaacaataaatcacaaaatagaagatcagatgttcccatcagaatccaaacgagaggaagatgaagaatattcttgggattctgggagtctctttgagagttctgcaaagactcaagtgtgtatacctgagtctatgtatcagaaagtaatggagataaatagagaagtagaagagcttcctgagaagccatctgccttcaagcctgccgttgaaatgcaaaagactgttccaaataaagcctttgaattgaagaatgaacaaacattgagagcagctcagatgttcccatcagaatccaaacaaaaggacgatgaagaaaattcttgggattctgagagtccctgtgagacggtttcacagaaggatgtgtatttacccaaagctacacatcaaaaagaattcgataccttaagtggaaaattagaagagtctcctgttaaagatggtcttctgaagcctacctgtggaaggaaagtttctcttccaaataaagccttagaattaaaggacagagaaacattcaaagcagagtctcctgataaagatggtcttctgaagcctacctgtggaaggaaagtttctcttccaaataaagccttagaattaaaggacagagaaacactcaaagcagagtctcctgataatgatggtcttctgaagcctacctgtggaaggaaagtttctcttccaaataaagctttagaattgaaggacagagaaacattcaaagcagctcagatgttcccatcagaatccaaacaaaaggatgatgaagaaaattcttgggattttgagagtttccttgagactctcttacagaatgatgtgtgtttacccaaggctacacatcaaaaagaattcgataccttaagtggaaaattagaagagtctcctgataaagatggtcttctgaagcctacctgtggaatgaaaatttctcttccaaataaagccttagaattgaaggacagagaaacattcaaagcagaggatgtgagttctgtagagtccacattcagtctttttggcaaaccgactactgaaaattcacagtctacaaaagttgaggaagactttaatcttactaccaaggagggagcaacaaagacagtaactggacaacaggaacgtgatattggcattattgaacgagctccacaagatcaaacaaataagatgcccacatcagaattaggaagaaaagaagatacaaaatcaacttcagattctgagattatctctgtgagtgatacacagaattatgagtgtttacctgaggctacatatcaaaaagaaataaagacaacaaatggcaaaatagaagagtctcctgaaaagccttctcactttgagcctgccactgaaatgcaaaactctgttccaaataaaggcttagaatggaagaataaacaaacattgagagcagattcaactaccctatcaaaaatcttggatgcacttccttcttgtgaaagaggaagggaacttaaaaaagataactgtgaacaaattacagcaaaaatggaacaaacgaaaaataagttttgtgtactacaaaaggaactgtcagaagcgaaagaaataaaatcacagttagagaaccaaaaagctaaatgggaacaagagctctgcagtgtgagattgactttaaatcaagaagaagagaagagaagaaatgtcgatatattaaaagaaaaaattagacccgaagagcaacttaggaaaaagttagaagtgaaacaacaacttgaacagactctcagaatacaagatatagaattgaaaagtgtaacaagtaatttgaatcaggtttctcacactcatgaaagtgaaaatgatctctttcatgaaaattgcatgttgaaaaaggaaattgccatgctaaaactggaagtagccacactgaaacatcaacaccaggtgaaggaaaataaatactttgaggacattaagattttacaagaaaagaatgctgaacttcaaatgaccctaaaactgaaacagaaaacagtaacaaaaagggcatctcagtatagagagcagcttaaagttctgacggcagagaacacgatgctgacttctaaattgaaggaaaaacaagacaaagaaatactggagacagaaattgaatcacaccatcctagactggcttctgctttacaagaccatgatcaaagtgtcacatcaagaaaaaaccaagaacttgctttccacagtgcaggagatgctcctttgcaaggaataatgaatgttgatgtgagtaatacaatatataacaatgaggtgctccatcaaccactttatgaagctcaaaggaaatccaaaagcccaaaaattaatctcaattatgcaggagatgatctaagagaaaatgcattggtttcagaacatgcacaaagagaccgatgtgaaacacagtgtcaaatgaagaaagctgaacacatgtatcaaaatgaacaagataatgtggacaaacacactgaacagcaggagtctctggagcagaaattatttcaactagaaagcaaaaataggtggcttcgacagcaattagtttatgcacataagaaagttaacaaaagcaaggtaacaattaatattcagtttcctgagatgaaaatgcaacgtcatctaaacgagaaaaatgaggaggtattcaattatggtaaccatttaaaagaacgtatagatcaatatgaaaaagagaaagcagaaagagaagtaagtatcaaaaaatataaatacttttcaaacttcctgaaagaaagtggccttggctaa

SEQ ID NO: 107673 - DNA, 3429 bp, Homo sapiens
  Payload ID: 1132
  Gene Symbol: ANKRD30B
  Gene Name: ankyrin repeat domain 30B
  Uniprot ID: Q9BXX2
  ENST ID: ENST00000580206
  CDS Start-End: 86-1945
ggtaagcgggaagcgagggcgaggggtaggggctggggaagggcgagcgggaggcgcgggctctctctagcagggggctgcagccatgaagaggctcttagctgccgctggcaagggcgtgcggggcccggagcccccgaaccccttcagcgaacgggtctacactgagaaggactacgggaccatctacttcggggatctagggaagatccatacagctgcctcccggggccaagtccagaagctggagaagatgacagtagggaagaagcccgtcaacctgaacaaaagagatatgaagaagaggactgctctacactgggcctgtgtcaatggccatgcagaagtagtaacatttctggtagacagaaagtgccagcttaatgtccttgatggcgaagggaggacacctctgatgaaggctctacaatgcgagagggaggcttgtgcaaatattctcatagatgctggtgctgatctaaattatgtagatgtgtatggcaacacggctctccattatgccgtttatagtgagaatttgttaatggtggcaacactgctgtcctatggtgcagtcatcgaggtgcaaaacaaggctagcctcacaccccttttactggccatacagaaaagaagcaagcaaactgtggaatttttactaacaaaaaatgcaaatgcaaacgcatttaatgagtctaaatgcacagccctcatgcttgccatatgtgaaggctcatcagagatagtcggcatgcttcttcagcaaaatgttgacgtctttgctgaagacatacatggaataactgcagaacgttatgctgctgcttgtggagttaattacattcatcaacaacttttggaacatatacgaaaattacctaaaaatcctcaaaataccaatccagaaggaacatctacaggaacacctgatgaggctgcacccttggcggaaagaacacctgacacggctgaaagcttgctggaaaaaacacctgacgaggctgcacgcttggtggagggaacgtctgccaaaattcaatgtctggggaaagcaacatctggaaagtttgaacagtcaacagaagaaacacctaggaaaattttgaggcctacaaaagaaacatctgagaaattttcatggccagcaaaagaaagatctaggaagatcacatgggaggaaaaagaaacatctgtaaagactgaatgcgtggcaggagtaacacctaataaaactgaagttttggaaaaaggaacatctaatatgattgcatgtcctacaaaagaaacatctacaaaagcaagtacaaatgtggatgtgagttctgtagagcctatattcagtctttttggcacacggactattgaaaattcacagtgtacaaaagttgaggaagactttaatcttgctaccaagattatctctaagagtgctgcacagaattatacgtgtttacctgatgctacatatcaaaaagatatcaaaacaataaatcacaaaatagaagatcagatgttcccatcagaatccaaacgagaggaagatgaagaatattcttgggattctgggagtctctttgagagttctgcaaagactcaagtgtgtatacctgagtctatgtatcagaaagtaatggagataaatagagaagtagaagagcttcctgagaagccatctgccttcaagcctgccgttgaaatgcaaaagactgttccaaataaagcctttgaattgaagaatgaacaaacattgagagcagctcagatgttcccatcagaatccaaacaaaaggacgatgaagaaaattcttgggattctgagagtccctgtgagacggtttcacagaaggatgtgtatttacccaaagctacacatcaaaaagaattcgataccttaagtggaaaattagaagcctacctgtggaaggaaagtttctcttccaaataaagccttagaattaaaggacagagaaacattcaaagcagagtctcctgataaagatggtcttctgaagcctacctgtggaaggaaagtttctcttccaaataaagccttagaattaaaggacagagaaacactcaaagcagagtctcctgataatgatggtcttctgaagcctacctgtggaaggaaagtttctcttccaaataaagctttagaattgaaggacagagaaacattcaaagcagctcagatgttcccatcagaatccaaacaaaaggatgatgaagaaaattcttgggattttgagagtttccttgagactctcttacagaatgatgtgtgtttacccaaggctacacatcaaaaagaattcgataccttaagtggaaaattagaagagtctcctgataaagatggtcttctgaagcctacctgtggaaggaaagtttctcttccaaataaagccttagaattaaaggacagagaaacactcaaagcagagtctcctgataaagatggtcttctgaagcctacctgtgtaaggaaagtttctcttccaaataaagccttagaattaaaggacagagaaacattaaaagcagctcagatgttcccatcagaatccaaacaaaaggatgatgaagaaaattcttgggattttgagagtttccttgaggctctcttacagaatgatgggtgtttacccaaggctacacatcaaaaagaattcgataccttaagtggaaaattagaagatttcaggccgggcactgtggttcacgcctgtaatcccagccctttgggaggcagaggcatgcggatcacgaggtcagcagatcgagaccatcctggctaacatggtgaaaccccgtctctatgaaaaaatacaaaaaattagccaagcatggtggtgggtgcctctagtcccagctactcgggaggctgaggcaggagaatgtgagaacccatgaggcagagattgcagtgagccaagatcatgcacctacactccagcctgggtgacagggccagactctgtgaaaaaaaaaaaaaaaaaagaatttatttattgtggcactattcacaacagcaaagacttggaaccaaaccaaatgtccaacaacgctagactggattaagaaagtatggcacatatacaccatggaacactacgcagccataaaaaatgataagttcatgtcctttgtagggacatgaatgaaactggaaaccatcattctcagcaaactctcgcaaggacaaaaaaccaaacactgcgtgttctcactcataggtgtgaattgaacaatgagaacacatggacacaggaaggggaacatcacactccggggactgttgtggggttggaggagggatagcattaggagatatacctaatgctaaatgacgagttaatgggaacctgcacattgtgcacatgtaccctaaaacttaaagtataatattaaaataaaaaataaagaaaa

SEQ ID NO: 107674 - DNA, 1412 bp, Homo sapiens
  Payload ID: 1133
  Gene Symbol: ANKRD30BL
  Gene Name: ankyrin repeat domain 30B-like
  Uniprot ID: A7E2S9
  ENST ID: ENST00000295181
  CDS Start-End: 251-1006
gcctaacggttctgctcagctgcctaaaggttctgctcaggtgcctaacggttctgctcagctgcctaacggttttgcgcagccattttctcccgggagaggttggagtgtccaaaagcttggcccgactgagatttctagtcttgtcagggcggatgcagggactgaagaagggcgagggcgagcggcggggactggggaagggcgagcagcgggaggcacgggctctctctagcaggtggctgcagccatggagaggctctctgccgcccctgtcaagggccagacgggcccagagcgcccgagccccttcagtcagctggtctacaccaacaacgactcttacgtgattcaccatggggatctcaggaagatccacaaagctgcctcccggggccaagcctggaagctggagaggatgatgaagaagacgacaatggacctgaacataagagatgcgaagaagaggactgctctatactgggcctgtgccaatggccatgcagaagtagtaacacttctggtagatagaaagtgtcagcttgacgtccttgatggtgaaaacaggaccattctgatgaaggctctgcaatgccagagggaggcttgtgcaaatattctcatagattctggtgctgatccaaatattgtagatgtgtatggcaacacagctgtccattatgctgttaacagtgagaatttgtcagtggtggcaaaattgctgtcctgtggtgcagacatcgaagtgaagaacaaggctggccacacaccacttttactggccataaggaaaagaagtgaggaaattgtggaatttttactgacaaaaaatgcaaatgcaaatgcagttgataagtttaaatgcacagccctcatgcttgccatatgtcatggatcatcagagatagttggcaagcttcttcagcaaaatgttgacatctgtgctgaagctacatgtggaatgattgcagaacgttatgctgttgcttgtggatttaatctctaagtgtttacatttaaaggctagcgttcatcaacaacttttggaatataaacaaaagatatctaaaaattctcaaaatagtaatccagaaggaacatctgaaggaacacctgatgaggctgcacccttggcggaaagaacacctgacacggctgaaagcttggtggaaagaacacctgatgaataggatacagtgaattcctcttcaaagattttagcctgtaaacatcctttaaaattcaagagggggaagattaagtacaatgagttctgagttcctcatcaaagaacaaatatgtcagtatgttcagcttctctgttctttgttctccgttttaaagtttaacttcctcgttcgttatgcctccttgcccctagtttcattaaacagcccccttctagcctctaa

SEQ ID NO: 107675 - DNA, 1251 bp, Homo sapiens
  Payload ID: 1133
  Gene Symbol: ANKRD30BL
  Gene Name: ankyrin repeat domain 30B-like
  Uniprot ID: A7E2S9
  ENST ID: ENST00000409867
  CDS Start-End: 251-1027
gcctaacggttctgctcagctgcctaaaggttctgctcaggtgcctaacggttctgctcagctgcctaacggttttgcgcagccattttctcccgggagaggttggagtgtccaaaagcttggcccgactgagatttctagtcttgtcagggcggatgcagggactgaagaagggcgagggcgagcggcggggactggggaagggcgagcagcgggaggcacgggctctctctagcaggtggctgcagccatggagaggctctctgccgcccctgtcaagggccagacgggcccagagcgcccgagccccttcagtcagctggtctacaccaacaacgactcttacgtgattcaccatggggatctcaggaagatccacaaagctgcctcccggggccaagcctggaagctggagaggatgatgaagaagacgacaatggacctgaacataagagatgcgaagaagaggactgctctatactgggcctgtgccaatggccatgcagaagtagtaacacttctggtagatagaaagtgtcagcttgacgtccttgatggtgaaaacaggaccattctgatgaaggctctgcaatgccagagggaggcttgtgcaaatattctcatagattctggtgctgatccaaatattgtagatgtgtatggcaacacagctgtccattatgctgttaacagtgagaatttgtcagtggtggcaaaattgctgtcctgtggtgcagacatcgaagtgaagaacaaggctggccacacaccacttttactggccataaggaaaagaagtgaggaaattgtggaatttttactgacaaaaaatgcaaatgcaaatgcagttgataagtttaaatgcgttcatcaacaacttttggaatataaacaaaagatatctaaaaattctcaaaatagtaatccagaaggaacatctgaaggaacacctgatgaggctgcacccttggcggaaagaacacctgacacggctgaaagcttggtggaaagaacacctgatgaataggatacagtgaattcctcttcaaagattttagcctgtaaacatcctttaaaattcaagagggggaagattaagtacaatgagttctgagttcctcatcaaagaacaaatatgtcagtatgttcagcttctctgttctttgttctccgttttaaagtttaacttcctcgttcgttatgcctccttgcccctagtttcattaaacagcccccttctagcctctaaca

SEQ ID NO: 107676 - DNA, 6036 bp, Homo sapiens
  Payload ID: 1134
  Gene Symbol: ANKRD31
  Gene Name: ankyrin repeat domain 31
  Uniprot ID: Q8N7Z5
  ENST ID: ENST00000274361
  CDS Start-End: 193-5814
agactgctaccccgccgcgctcgcggccgcctgcgtcctcctcagcagccctgcgacaagtcccggctcctgctgcgattatattatttttatttttaattcacaatttcccctggccctcaaagcgtttttttgtttgcgggcaagagggagttagaggagggtaaaaaagactttgaatgtgaggcaaagatggaggaaggcgtccaggccccagactgggacagtgatgaaactgtgatagagggttcagtgacggagagcgacctggaagaaaaggagctgccctggagaaggttgctgtttgatcaagacgcatctcttaaatctgagttcagtctgcatcctgatacaagaggaatgtgcaaaggcatgccttctcctgagattcaacttggatttaagctcagagaggatctgcaagagcaaatgaataaaaataagatgatgcctgttcttagcgaggatacaatattacagtctcaagatgaaacagaacgaaatcaagctctgttacagactagaaaaaactgttcaatgttcattgggtcgtttcgccagtctggactttcattgaaccaccaaaatattgaagggccagaggctgaaagtcctgaagttttgccacacatagaaaaggaactaagtgaaggcagagattctcctgaagttagccttctctcaggcactgctattacagtatctgatacagttgctgtaaaggagacatcattagtagagccagagaagattttagcagcaccaaatacattttttgagcctagaaaggaagtcacaatgaccatgacttctgaagaaactaaggatgaagaaagctctcttgaaacctttgtgtctgccttagaaagtttacttacatcaccagaaagcacccaggaggaaagattgtttgaattagtaagtgattttgatcgtaaagaattgatgaacccattgagtgactctcttagttccatatcaatacctttgaattcctggtcggcatgtcatagagatttactagaagatgcaaaagatgatgcattgccagctgagttattggaagccctgaacacattgtcagaagccaaggtggaaaccatctgtcacagaaaagagggaggtagcagtctcattgccagaaatgaatgtttagaagtggagttcaatacgtctcagaccaatgaagattgtacacaaatagcagagactctgcaagacccaaatccatctggattgcaaactttggctcatcaaaatatcacttcttgtgagccactaagtaataagagaaattcaaattcagtgacaaatagctctgatcaggaaactgcgtgtgtgttgaggagatcatccagactagaaaaactgaaagtaagcagagatgcaaagtactcagatcacatgtataagatgccagaaaagattttaccaaaaatccttggctgtgaggacctaacaaataataactcttcagctcagaatttcagaatgcaggatccggctttaatgattgatggtaaagagaagaatatgcattcagcaaggttcaagaatggaaaacagatcaggaaaaatgaacaattttcaggaaaaaaagaaaaaatgaaggtgaacaaaatatctcttcatagcattaaccggagaaacatttttggagagaacttagtatataaggctgctctacacgatgatgctgatcttgttcatcattgtataaaaaaaggtggaaatgttaatcagccaagttatgctggttggacagcacttcatgaagctagtgtaggaggattttatcggacagcaagtgaactattaaaaggtggagcagatgtaaatatcaaaggattataccagattactcccctacatgatgcagtgatgaatggacattataaggtggcagagttacttcttctgaatggagctgatccattatttagaaatgatgatggaaaatgtgctttggatgaggccaaggatttatgtatgaagcgtctccttgagagatatatccctaaacatcaaaaatgccttacatcagctcaaaggagtagcattgacccactagacatagaggatgtgtaccaacacaagaaaccaaagttcagttctaaaagtcacatttggcatgtttataatgaaaattccaacagacagaagctggaacatgtaaaagtcaataaaggaagcaaagcgagtttatttataaataaagaagatgtatatgaatattaccaaaaagatcccaaaaacacaaaatttggtaaatccaagcataaacaatcaactcttgaccagatatactctacaggactcagaaagggcaatctccataacgtcaaagatcccaacacaaacgtaccaaaaggtataggaagaagaaaaacacaacataaaaggacccaagtagatgatgtagactgtaatccaagaaagatactagctgtctctccttccaggagaataaacagattggttacctatcagcagcatattccagaaactcataatgaccttccagaagaattgtgtgaaccttccagcttaactctgtcaagcctgagaaatggattagatagcagtactgaggcttgttcagtttccaaagagaaacacatccagaacctggatttatcagatagtcaagaagttcaatgcttggaattagaatctgttgaccaaactgaagctgtttctttcccagggcttttattacataaagaaatcaagttaccagttgttactacagataagcagcctcacactctccaggaacaacaccatgtactttataaatctcatgaaaacagtaacttggtcccaaaagatgagagatttaacaaatgggaaaattctttcctatcctttgtaaaggaaaattctgataatgatgatgatgatgattgctctacctctgagaaggctataacatctaaaaaggtgttgtgttctacaggtggcaaaaaacactataattttaaggagaatttaacaaataaaaaagaaatgggtttccaacagtttttactttctgaagatcatctttcacaggaaaatgagttaaaagcagtcagcctaaccacacttccagaacaggaagctgttaatttttcttattcagataatgcagttatttctgaacatgttgcaaattatgaacaatgcatatttggaccttcttttgatcactcaaatggcaatcctgagcaaaattccctggcttgtatgagaacacttttgacacatgaggcttcaaagttgactaatcatgtggagctattcaaaaagccacaggattatattcccagagcaccaacttttttaatgaatcaaacagatacacatattgtggaaaagatggcaaagaattgtgacactgagaggaattacattgacagagaccaaaaaataatttattcaaatgagcctttatccatagttgctcattctcaagtaatagaaacaactaaagttgaaaaaaggagacaaaaccatctagaaagtgagactatacacaatatagattctcattccactgacaatatgagtaaagaattggccaacatctcaaaacttagtcaaagagaaaagaaggaaatttctcacaaaccaggaatgaaagcaggtaggatcaacaagaggaatgccagaggggaaagccagcttcatttagctgtcagaagaggaaatctgcccctagtgaaagccctgatagaatctggagcagatgtgaatctaaatgataatgcaggttggacaccacttcatgaggcatctaatgaaggatctattgatataattgtagagttattaaaagctggtgctaaggttaattgtgaaaatatagatggaattctgcccttacatgatgctgttgcaaacaatcatttaaaggcagctgagattctactacaaaatggagcaaaccctaatcaaaaagatcaaaaacagaagagtgctttggatgaagcagatgatgaaaaaatgaaagaattactaagatcttatggtgctattgagactgttaatagagatgagagtgatgctatagtcaatgaaaaaattcctgctgtccggtctaaaagacataaacagtgtttttgtgatgatggcaaaactattgactcatcttccctttcacaccaagaaagatcaagagaaagcctttctgtgcatcagaccctcagtgccattctacaagatatagaagaaaaacaagaatatttattagagtttgaaataagaaaccctgaagatgcagaacaatacattgaaaagatgttaaagataaaaaagattatggataatgtgcttgccaagcagaaagcagaaagggatgatctggctaaaaaatacagggtatccatagagtcatttaagcatggagccctgagagaacaattggccaacttggctgcaagacagaagagccttttagttgtggcaaaaaaacagaaaaaaataagcctgaaaattcaaaactgtaggaatgttacatcattgccttgtcttagtttaaggaagctcccacccagatcagaaatctctagtgaaaaagacagccaagagctcactagtctggaaaatttagagcatccccaatcaggttcactttctcctgtttctggaagcatgcaggaaacacaattgtctctggaaacttggaactacagccaaaataccaacatttgtctaaattcagaggcagtgagaaggggagaattttctggaaatgatatgaattctaaacaaaatggcagtgattgtaccttggatggttttccaaaatccagacattcagatggcacagagaagaataaattaccatcccaacctgttgcttttattggtcaaacagaatattcacagaaagagaatgatcttacagaagctacagacaaagaccatgaattctatgtttcttccccagtaatcggcaaattaaatatttcagaaactgcaagtgtccttgccgaaaatgctgcccatccatcaaatattatttgtgatcaggacctttccaattatgatcccaaaagaggaaacagaaaaacaagttcccagcaatcacctacaggggcatcagaatctctggcacatcaagggattgctgtcttaggcagtgatacagtgcatcagatgaaaccatatcttaaaaaatcagtttctgttgttccatgtgcagatgacagtcagatctcctcttcctctggatctgggcaacaagatacaataaaaaaggctttaaactacagtacagctcctaaaaagaaatgtattcagataaaagatttgatattactaggaagaattaacccaggaaataacattctggaattcaaaacacaggagactacccacaaagccagtattttattgaatggtaaacttaaggtagaaagtggtcagatttataaaaacccagtcacctggctcaaggatcttctgggaggcaacagttatgtgacctggaattatgcttggagtaaggtaacgtatcttgggaaggagcttttaaggtatgtttctgaggatgcacccatacttccagaaccaaactcagtacctcagcaatatcaaccttgtcttccagaagttgcttgtttagatgacccagtacaggaaccaaacaaatcaatgtttgagaaaacaaaatttggacaaggaacttccagagagtcaatgcaaagcagcccacgttatctacaaataaatgaaatactattaatcagtgatcaagaatttctcccatgccacataatggatcagcattggaagttttgtgtggaatgtgaggaactaacaccctaaaaccttggtttcttaatattttattggatatttgttcaaattaccaacaaacatttatatttcatcttgtataatctggtgggcctattttaacatacactttatgagttgctatttaggatgtatgtttactgttcttaagatgtatgtaactgttcaacaattatataagattaatgcttttttgccattgaaataaaggcacatttgaactagaccata

SEQ ID NO: 107677 - DNA, 6207 bp, Homo sapiens
  Payload ID: 1134
  Gene Symbol: ANKRD31
  Gene Name: ankyrin repeat domain 31
  ENST ID: ENST00000506364
  CDS Start-End: 193-5985
agactgctaccccgccgcgctcgcggccgcctgcgtcctcctcagcagccctgcgacaagtcccggctcctgctgcgattatattatttttatttttaattcacaatttcccctggccctcaaagcgtttttttgtttgcgggcaagagggagttagaggagggtaaaaaagactttgaatgtgaggcaaagatggaggaaggcgtccaggccccagactgggacagtgatgaaactgtgatagagggttcagtgacggagagcgacctggaagaaaaggagctgccctggagaaggttgctgtttgatcaagacgcatctcttaaatctgagttcagtctgcatcctgatacaagaggaatgtgcaaaggcatgccttctcctgagattcaacttggatttaagctcagagaggatctgcaagagcaaatgaataaaaataagatgatgcctgttcttagcgaggatacaatattacagtctcaagatgaaacagaacgaaatcaagctctgttacagactagaaaaaactgttcaatgttcattgggtcgtttcgccagtctggactttcattgaaccaccaaaatattgaagggccagaggctgaaagtcctgaagttttgccacacatagaaaaggaactaagtgaaggcagagattctcctgaagttagccttctctcaggcactgctattacagtatctgatacagttgctgtaaaggagacatcattagtagagccagagaagattttagcagcaccaaatacattttttgagcctagaaaggaagtcacaatgaccatgacttctgaagaaactaaggatgaagaaagctctcttgaaacctttgtgtctgccttagaaagtttacttacatcaccagaaagcacccaggaggaaagattgtttgaattagtaagtgattttgatcgtaaagaattgatgaacccattgagtgactctcttagttccatatcaatacctttgaattcctggtcggcatgtcatagagatttactagaagatgcaaaagatgatgcattgccagctgagttattggaagccctgaacacattgtcagaagccaaggtggaaaccatctgtcacagaaaagagggaggtagcagtctcattgccagaaatgaatgtttagaagtggagttcaatacgtctcagaccaatgaagattgtacacaaatagcagagactctgcaagacccaaatccatctggattgcaaactttggctcatcaaaatatcacttcttgtgagccactaagtaataagagaaattcaaattcagtgacaaatagctctgatcaggaaactgcgtgtgtgttgaggagatcatccagactagaaaaactgaaagtaagcagagatgcaaagtactcagatcacatgtataagatgccagaaaagattttaccaaaaatccttggctgtgaggacctaacaaataataactcttcagctcagaatttcagaatgcaggatccggctttaatgattgatggtaaagagaagaatatgcattcagcaaggttcaagaatggaaaacagatcaggaaaaatgaacaattttcaggaaaaaaagaaaaaatgaaggtgaacaaaatatctcttcatagcattaaccggagaaacatttttggagagaacttagtatataaggctgctctacacgatgatgctgatcttgttcatcattgtataaaaaaaggtggaaatgttaatcagccaagttatgctggttggacagcacttcatgaagctagtgtaggaggattttatcggacagcaagtgaactattaaaaggtggagcagatgtaaatatcaaaggattataccagattactcccctacatgatgcagtgatgaatggacattataaggtggcagagttacttcttctgaatggagctgatccattatttagaaatgatgatggaaaatgtgctttggatgaggccaaggatttatgtatgaagcgtctccttgagagatatatccctaaacatcaaaaatgccttacatcagctcaaaggagtagcattgacccactagacatagaggatgtgtaccaacacaagaaaccaaagttcagttctaaaagtcacatttggcatgtttataatgaaaattccaacagacagaagctggaacatgtaaaagtcaataaaggaagcaaagcgagtttatttataaataaagaagatgtatatgaatattaccaaaaagatcccaaaaacacaaaatttggtaaatccaagcataaacaatcaactcttgaccagatatactctacaggactcagaaagggcaatctccataacgtcaaagatcccaacacaaacgtaccaaaaggtataggaagaagaaaaacacaacataaaaggacccaagtagatgatgtagactgtaatccaagaaagatactagctgtctctccttccaggagaataaacagattggttacctatcagcagcatattccagaaactcataatgaccttccagaagaattgtgtgaaccttccagcttaactctgtcaagcctgagaaatggattagatagcagtactgaggcttgttcagtttccaaagagaaacacatccagaacctggatttatcagatagtcaagaagttcaatgcttggaattagaatctgttgaccaaactgaagctgtttctttcccagggcttttattacataaagaaatcaagttaccagttgttactacagataagcagcctcacactctccaggaacaacaccatgtactttataaatctcatgaaaacagtaacttggtcccaaaagatgagagatttaacaaatgggaaaattctttcctatcctttgtaaaggaaaattctgataatgatgatgatgatgattgctctacctctgagaaggctataacatctaaaaaggtgttgtgttctacaggtggcaaaaaacactataattttaaggagaatttaacaaataaaaaagaaatgggtttccaacagtttttactttctgaagatcatctttcacaggaaaatgagttaaaagcagtcagcctaaccacacttccagaacaggaagctgttaatttttcttattcagataatgcagttatttctgaacatgttgcaaattatgaacaatgcatatttggaccttcttttgatcactcaaatggcaatcctgagcaaaattccctggcttgtatgagaacacttttgacacatgaggcttcaaagttgactaatcatgtggagctattcaaaaagccacaggattatattcccagagcaccaacttttttaatgaatcaaacagatacacatattgtggaaaagatggcaaagaattgtgacactgagaggaattacattgacagagaccaaaaaataatttattcaaatgagcctttatccatagttgctcattctcaagtaatagaaacaactaaagttgaaaaaaggagacaaaaccatctagaaagtgagactatacacaatatagattctcattccactgacaatatgagtaaagaattggccaacatctcaaaacttagtcaaagagaaaagaaggaaatttctcacaaaccagatgaggaattaactaataacatcagtggagatgaaataactataagaaattgtgaggagataaaagaaaaaacggagtcagaaattcacatgcctactaatagccaagaacacaaaacagttcagaatttcagaaaaagacaaagtttcttaaaaactacctgcaacctaggaatgaaagcaggtaggatcaacaagaggaatgccagaggggaaagccagcttcatttagctgtcagaagaggaaatctgcccctagtgaaagccctgatagaatctggagcagatgtgaatctaaatgataatgcaggttggacaccacttcatgaggcatctaatgaaggatctattgatataattgtagagttattaaaagctggtgctaaggttaattgtgaaaatatagatggaattctgcccttacatgatgctgttgcaaacaatcatttaaaggcagctgagattctactacaaaatggagcaaaccctaatcaaaaagatcaaaaacagaagagtgctttggatgaagcagatgatgaaaaaatgaaagaattactaagatcttatggtgctattgagactgttaatagagatgagagtgatgctatagtcaatgaaaaaattcctgctgtccggtctaaaagacataaacagtgtttttgtgatgatggcaaaactattgactcatcttccctttcacaccaagaaagatcaagagaaagcctttctgtgcatcagaccctcagtgccattctacaagatatagaagaaaaacaagaatatttattagagtttgaaataagaaaccctgaagatgcagaacaatacattgaaaagatgttaaagataaaaaagattatggataatgtgcttgccaagcagaaagcagaaagggatgatctggctaaaaaatacagggtatccatagagtcatttaagcatggagccctgagagaacaattggccaacttggctgcaagacagaagagccttttagttgtggcaaaaaaacagaaaaaaataagcctgaaaattcaaaactgtaggaatgttacatcattgccttgtcttagtttaaggaagctcccacccagatcagaaatctctagtgaaaaagacagccaagagctcactagtctggaaaatttagagcatccccaatcaggttcactttctcctgtttctggaagcatgcaggaaacacaattgtctctggaaacttggaactacagccaaaataccaacatttgtctaaattcagaggcagtgagaaggggagaattttctggaaatgatatgaattctaaacaaaatggcagtgattgtaccttggatggttttccaaaatccagacattcagatggcacagagaagaataaattaccatcccaacctgttgcttttattggtcaaacagaatattcacagaaagagaatgatcttacagaagctacagacaaagaccatgaattctatgtttcttccccagtaatcggcaaattaaatatttcagaaactgcaagtgtccttgccgaaaatgctgcccatccatcaaatattatttgtgatcaggacctttccaattatgatcccaaaagaggaaacagaaaaacaagttcccagcaatcacctacaggggcatcagaatctctggcacatcaagggattgctgtcttaggcagtgatacagtgcatcagatgaaaccatatcttaaaaaatcagtttctgttgttccatgtgcagatgacagtcagatctcctcttcctctggatctgggcaacaagatacaataaaaaaggctttaaactacagtacagctcctaaaaagaaatgtattcagataaaagatttgatattactaggaagaattaacccaggaaataacattctggaattcaaaacacaggagactacccacaaagccagtattttattgaatggtaaacttaaggtagaaagtggtcagatttataaaaacccagtcacctggctcaaggatcttctgggaggcaacagttatgtgacctggaattatgcttggagtaaggtaacgtatcttgggaaggagcttttaaggtatgtttctgaggatgcacccatacttccagaaccaaactcagtacctcagcaatatcaaccttgtcttccagaagttgcttgtttagatgacccagtacaggaaccaaacaaatcaatgtttgagaaaacaaaatttggacaaggaacttccagagagtcaatgcaaagcagcccacgttatctacaaataaatgaaatactattaatcagtgatcaagaatttctcccatgccacataatggatcagcattggaagttttgtgtggaatgtgaggaactaacaccctaaaaccttggtttcttaatattttattggatatttgttcaaattaccaacaaacatttatatttcatcttgtataatctggtgggcctattttaacatacactttatgagttgctatttaggatgtatgtttactgttcttaagatgtatgtaactgttcaacaattatataagattaatgcttttttgccattgaaataaaggcacatttgaactagaccata

SEQ ID NO: 107678 - DNA, 1935 bp, Homo sapiens
  Payload ID: 1135
  Gene Symbol: ANKRD33
  Gene Name: ankyrin repeat domain 33
  Uniprot ID: Q7Z3H0
  ENST ID: ENST00000301190
  CDS Start-End: 228-1586
atctccgccggcgtccccaaggctgagagtgggcgcgtccgtcaggaggagtcgtctttgtgagcccgccccggcggggaggagctgcccggctcaggccccgcccacccggaggatcttggggctggtctgagtccgctcctgagacgtgaccacccgccccgcatggggccccagtcccagctgcttgatccggctcagccccgaggtgtttgcagcagctctttatgaaagtccagccatctgttacctgcgttgcttcctggggagggatagtccacctggaggcattcggagacccagtgattgtgctccgcggagcctgggctgtgccccgcgttgactgcctcatagataccctacgaaccccaaatgccagctgcatgagaaaagggactcaccttctggttccctgcctggaagaggaagagctggcattgcacaggagacggctggacatgtctgaggcactgccctgcccgggcaaggagacccccaccccaggctgcaggctgggggccctgtattgggcctgtgtccacaatgatcccacccagctccaagccatactggatggtggggtctccccagaggaggccacccaggtggacagcaatgggaggacaggcctcatggtcgcatgctaccacggcttccagagtgttgtggccctgctcagccactgtcctttccttgatgtgaaccagcaggacaaaggaggggacacggccctcatgttggctgcccaagcaggccacgtgcctctagtgagtctcctgctcaactactatgtgggcctggacctggaacgccgggaccagcgggggctcacggcgttaatgaaggctgccatgcggaaccgctgtgctgacctgacagcagtggaccctgttcggggcaagacggccctggaatgggcagtgctgaccgacagcttcgacaccgtgtggaggattcggcagctgctgaggcggccccaagtggagcagcttagccagcactacaagcccgagtggccggccttgtccgggctcgtggcccaggcccaggcccaggcccaggttgccccttcactcctagaacggctgcaggctaccttgagcctcccctttgccccgtctcctcaggaggggggtgttctggaccaccttgtgactgccacaaccagcctggccagtcccttcgtcaccactgcctgccacactctgtgccctgaccatccaccttcgctgggcacccgaagcaagtccgtgccagagctgttaggtactgccccgccccctcccctggttccccagtccccgccagggagtccccagaggtccccgtgggtcttcgtcccctaccagagccctcagggcatattgagcaagtgccttcagtggctacaacccagggatagcaccagccccaggccccaagtccccaagatcctcctctccaaggcatcctcatcctcccaccagtgccagccgaagcccagtccttcaggacaccaaagtctggcccttcctctctggcgataccaggagctcaggatagagaagaggaaacaggaggaggaggccagaatggcacagaagtaggggaagatgggataggacaggctgggaacaggtaatcaggcccctcccagggcttctttcccctctggagtgcctccggcctccccatccacctctgcctaagtaaatctgctctcaacctatatatatacaaggtcattcattctagcattgtttgcaagagtgaaagagtggaaacacccgaagtgtccatcagtaagggacaggctagattgattacggatgtaattgctgtccatccatacagagcatactctacagtgtattctaaaataagactaaggaagctgtttatattctgatatgaaactaccatcaagatgtataaagtaaaaataactaaggagtg

SEQ ID NO: 107679 - DNA, 1507 bp, Homo sapiens
  Payload ID: 1135
  Gene Symbol: ANKRD33
  Gene Name: ankyrin repeat domain 33
  Uniprot ID: Q7Z3H0
  ENST ID: ENST00000340970
  CDS Start-End: 372-1190
gcttcctggggagggatagtccacctggaggcattcggagacccagtgattgtgctccgcggagcctgggctgtgccccgcgttgactgcctcatagataccctacgaaccccaaatgccagctgcatgagaaaagggactcaccttctggttccctgcctggaagaggaagagctggcattgcacaggagacggctggacatgtctgaggcactgccctgcccgggcaaggagacccccaccccaggctgcaggctgggggccctgtattgggcctgtgtccacaatgatcccacccagctccaagccatactggatggtggggtctccccagaggaggccacccaggtggacagcaatgggagggcctcatggtcgcatgctaccacggcttccagagtgttgtggccctgctcagccactgtcctttccttgatgtgaaccagcaggacaaaggaggggacacggccctcatgttggctgcccaagcaggccacgtgcctctagtgagtctcctgctcaactactatgtgggcctggacctggaacgccgggaccagcgggggctcacggcgttaatgaaggctgccatgcggaaccgctgtgagtgcgtggccaccctcctcatggcaggtgctgacctgacagcagtggaccctgttcggggcaagacggccctggaatgggcagtgctgaccgacagcttcgacaccgtgtggaggattcggcagctgctgaggcggccccaagtggagcagcttagccagcactacaagcccgagtggccggccttgtccgggctcgtggcccaggcccaggcccaggcccaggttgccccttcactcctagaacggctgcaggctaccttgagcctcccctttgccccgtctcctcaggaggggggtgttctggaccaccttgtgactgccacaaccagcctggccagtcccttcgtcaccactgcctgccacactctgtgccctgaccatccaccttcgctgggcacccgaagcaagtccgtgccagagctgttagtgccagccgaagcccagtccttcaggacaccaaagtctggcccttcctctctggcgataccaggagctcaggatagagaagaggaaacaggaggaggaggccagaatggcacagaagtaggggaagatgggataggacaggctgggaacaggtaatcaggcccctcccagggcttctttcccctctggagtgcctccggcctccccatccacctctgcctaagtaaatctgctctcaacctatatatatacaaggtcattcattctagcattgtttgcaagagtgaaagagtggaaacacccgaagtgtccatcagtaagggacaggctagattgattacggatgtaattgctgtccatccatacagagcatactctacagtgtattctaaaataagactaaggaagctgtttatattctgatatgaaactaccatcaagatgtataaagtaaaaataactaaggagtggaa

SEQ ID NO: 107680 - DNA, 1286 bp, Homo sapiens
  Payload ID: 1135
  Gene Symbol: ANKRD33
  Gene Name: ankyrin repeat domain 33
  ENST ID: ENST00000549751
  CDS Start-End: 179-589
agtcgtctttgtgagcccgccccggcggggaggagctgcccggctcaggccccgcccacccggaggatcttggggctggtctgagtccgctcctgagacgtgaccacccgccccgcatggggccccagtcccagctgcttgatccggctcagccccgaggtgtttgcagcagctctttatgaaagtccagccatctgttacctgcgttgcttcctggggagggatagtccacctggaggcattcggagacccagtgattgtgctccgcggagcctgggctgtgccccgcgttgactgcctcatagataccctacgaaccccaaatgccagctgcatgagaaaagggactcaccttctggttccctgcctggaagaggaagagctggcattgcacaggagacggctggacatgtctgaggcactgccctgcccgggcaaggagacccccaccccaggctgcaggctgggggccctgtattgggcctgtgtccacaatgatcccacccagctccaagccatactggatggtggggtctccccagaggaggccacccaggtggacagcaatgggagggccacgtgcctctagtgagtctcctgctcaactactatgtgggcctggacctggaacgccgggaccagcgggggctcacggcgttaatgaaggctgccatgcggaaccgctgtgagtgcgtggccaccctcctcatggcaggtgctgacctgacagcagtggaccctgttcggggcaagacggccctggaatgggcagtgctgaccgacagcttcgacaccgtgtggaggattcggcagctgctgaggcggccccaagtggagcagcttagccagcactacaagcccgagtggccggccttgtccgggctcgtggcccaggcccaggcccaggcccaggttgccccttcactcctagaacggctgcaggctaccttgagcctcccctttgccccgtctcctcaggaggggggtgttctggaccaccttgtgactgccacaaccagcctggccagtcccttcgtcaccactgcctgccacactctgtgccctgaccatccaccttcgctgggcacccgaagcaagtccgtgccagagctgttagtgccagccgaagcccagtccttcaggacaccaaagtctggcccttcctctctggcgataccaggagctcaggatagagaagaggaaacaggaggaggaggccagaatggcacagaagtaggggaagatgggataggacaggctgggaacaggtaatcaggcccctccca

SEQ ID NO: 107681 - DNA, 9188 bp, Homo sapiens
  Payload ID: 1136
  Gene Symbol: ANKRD33B
  Gene Name: ankyrin repeat domain 33B
  Uniprot ID: A6NCL7
  ENST ID: ENST00000296657
  CDS Start-End: 1-1485
atggtgctgctggccgggaccgggccggagggcggcggggcgcgctgcatgaccccaccaccgccgtccccaccccggggcgcgcaggtcgaggaggaccccgctgactacgaagagtttgaggacttctcgagtctgccagacacccgcagcatcgcctcggacgactctttctaccctttcgaggacgaggaggagcacggcgtcgagagcgcggagagcgtcccggagggcgtcccggaaagcgtcccggagacggcgaccctcctgcgcgccgcctgcgccaacaacgtggggctgctgcggacgctggtgcggcgcggggtgagcgtcgaggaggcgcaggagactgaccgcaacggcaggaccggccttattgtcgcctgctaccacggctttgtggataccgtggtggccttagcagagtgcccccacgttgacgtcaactggcaggacagcgaggggaacacagccctaatcacagctgcacaggcagggcacgctatcatcactaactacttgttgaactatttccctggtcttgaccttgaaaggaggaacgcgttcgggttcaccgccctgatgaaagccgccatgcagggtcgaacggactgcatccgagccctgatgctagcaggggcggatgtccacgcgagggacccccgccgtgggatgtcgccgcaggagtgggccacttacacgggccgcgtggatgccgtccgtctcatgcagaggctgctggagcgcccctgcccggagcagttctgggagaagtaccggcccgagctgccgccgccccctgaagcggcgcggaagcccgcgggctccaagaactgcctgcagaggctcacagactgcgtgctgtccgtgctgacgccgcgctccgtgcggggcccggaggacgggggcgtcctggaccacatggtccggatgaccacgagcctctacagccccgccgtggccatcgtgtgccagaccgtgtgccctgagagccctccgagcgtggggaagaggcggctggcggtgcaggagatcctggcggcgcgggctgcacggggcccccaggcgcaggaggaggatgaggtggggggcgcggggcagcgcgggcggaccggacaggaggacgcggactcccgggagggctccccgagagccggcctccctcccgccctggggtcccggggccccgcagcgcccgccccgcggaaggccagcctcctgcccctgcagcgcctgcggcggagaagcgtgcggcccggtgtggtggtgccccgggtccgagtcagcaaggcgcccgcgcccaccttccagcccgagcggccggcgcggaagggcagcaccaaggacagcggccacctgcagatccccaagtggcggtacaaggaggccaaggaggagaagaggaaggcagaggaggccgaaaagaagcgccaggccgaggcgcagaaggagaggcgcactgcgccctggaagaagaggacgtgagggcccgtgtgcctggcgctggggccggggctggggccggggcggggccgcagggctgggcgcggagaaggaggcggccccgttgcgcatcgcaccacttccgctccatggaccacggggctgcgcgcatttccaggctgtttgtccaggctgcttccaagagagggctgagggagccacatggattcgcttgtcgccagccctcctagcaatcagtacacctagcgggcacgttgcctaaaaggctccctttagagaacctcaattaagattttttttaaagatcaatttatcaaagggcgttttctccgtaattttgtatttttaatcattatttatcaaatttgcaacgttttacaagtgatagggccccttatatccaaggcagttttaatacacttgcctgaagaccttttgtttaagatactgtttctagcaataagtatccatgatacctgtatgagttcacacagacatcatgggattctcccctttttggctgtttggtcttttctcctcatcgtgggtgtaggtgcacactggatgttcttagtcattagattaagtgttgccggatatttctatttgacggaggcattggctcgttgagccacatgatcaagtgagacagaggatcagatgttactgtatctttttaaaactcttatccatatagtaatatattgaggaaaaacatattgtcaaattataaaacaatggagcgataaacatgtatttattgctagaattaaactcattttaagcaaggggttttaggtaaactggatacgaaatctttaacattaaaaatagatatgagaaaaaaactgtcattcgataaaatgaggcaaatttaataataaatgattaccagaaatacaaaattaagccatatgtgctcttaagtaattcgaatccagatatccttaaaatgtcaaaaagatgcaacaagagtcaggagcccagaatgacgcaaattacaggaatggggaggaggtgatttttagaagaggtgagagaatggaatggggaacagacttgttttcggcaaattctcctggagtagactgggcagccccctcctccaggctcagttccaaagagtccgttgtgtggatatttcttttatttttcctttgaggactgcgcttggtgtttagttcatccttatgccgacctcttagaatttccaagatgcagggccttgggcagggcagggcatgggtgtgatttgccttgggccacaagctcttggtgagagtcttatgtccacacttttatctccaaagtgacatggagatcacttttctcagtgatcaaatttgaatttatcaaagggggttttctgcataattttgtatttgtaatcattatcagatttgcagcattctaattcggcagggcagggtatgaaagctggaaactcaggctggagtttctagttctaatggctctctggccatgtgggttgtagagtgtctgtcacatatgcactttatttcagtattaattgaaatacttggacacgcacgatcacaggcctatttggaggctctgtactatgaccctaataaccctagatacatcatgatacatggtgtctgtctcaggatgcaggcagggctggtgcaggcttctccatactcccttccacttggcaccagcaggcatcgagcaaccagggatcttaaactggcctctccaaatactccattgaacaggactgcaggctgcacccaggctaatgggagattggtgtgttgatgatacagtgtttaagatgagattgcagtgagttcctccttaatcccagaagggcaccatgatgaatgccacaggagactggaccctctttgagaactgcagatattagttgactgtgggtcaccctcgtggccaaggagttgggattggccatgtcttcttcgaggaggtggagactgtaactgacactggttatctttggggttgtctttcctgaatcctttggcatgtggcaccttcctgccacatgtagataattcacggcattaccaagtcaccacgagccccaccctcacctctgtcaaccgaggacccagccaggcagtgccatgtggtctcccaggcacgcttctcaacaccggctacccctgctgtgaaggttctcaaggccctggtccggggagccaagccctgggagcgccctaaagctccgcaggtaactgcactgcagcccgcattgagaaccgcagctctaacacagtgattgcgagaggacacccattctgagctcccacagagggctccacctccccaagaatgtctcattgtcattggaacagccagggtcaggcagcttctgctcggactgacgtggcgtctgacccttggtgggttgccagacattcctgcctgtttccaccatgggaagctgtcactgggaatggtatggagccctcacttctaccccaagcctgggtgtctgctgcctccatgtcaaaaatggacatttctggtcctgcccagctgctacctcaccacaacccatgctcagagttgtcagggatgcgtggaacagcaatgatgggacagcaaatgactggcaatttccccaggtcccacgctgttctggagtggacgtgttgcggccctgcccccgatgtgttccagcctcatccaggtgcacaggatactctggggccagcacagggattgtccagtgatgctcctggtgtccacaaaacagctctagagatacctgcattttgaaaagcctgctgagccaacaagcttggggcaggacacggatttctttggcaaatctgcaggcgagctgaccacttgcctggtgagtggaagctgccattacctggccagtgtttgcaactcgagggaaaatgacagctgcatggggggaagcctgacctcccggggagctttattgtggcctcagtggaaagattggattttgaaacctgccagacccaactgaaagaagggtcattcctgattgagttggagactctccccagtccctctctctggactcattctagctgtggcctgcctgtggacagcccttccctttggcccatgcggcgggtccaggcagctcctgcagctgtgctcatggctgctggcccagaacttctcatttttgccatgtggaagcagatttgctagtagaggaattttccaagtcaagggaagtgttgccaaacctcttgcctcgacctgtggggggccttctgctcttgttttctcattctctttggagtgggcacagaggggacaagtcggcccccagtgaggctcagggagtgcaggagaccagggagggaagcccagatgatggggaaacagagccaccttgagggggtgtcatggggtcagtgtcagggtgatctgacgggtcagttcatacttaagcaacattattctgttcgtttcttttgggtaaggaattcctcatgggaggtgtggtcatctggtcgtagaggtggacagaaacaccccctcgtcttcctgagccatttggaagccctttcctctagccctaggtactggtgacacaggcccctcggtctcaggatgtggacagggctgggaggtgcaggcttcttgtcccatccccactcagtatcatcgggtatctggtagtcaggggtctcacagtggcctctccaaaagcctggtgtccttggagaacatttttcattttgtctgttttcgttgctttgaacagctgcattcactcaccgagggctcgccctccctggatctgccatgtggttcagggaggaggggaccgatgagcaccgaccccttctcttcacctgtcagtggccaccacagtgccccctctggctttgccaccacgttctcctgcccccgtcaccttgtctcttctaactcattagcctttccttcctttgtctgttttcttctcccagctggtttaagttcttgatcatccctggcaccacctaccctaaggtcttccaagaacagaaaagccagggcctgtgtggggcaatgtgttgtccctgtcgggttatggtgggacctcctagaccccagagtgaatgaatggcaggcctgccagtgactgtgctgatggcttagaattcctacacggctgtgcctctcccaccccgtcctctttgctcggaagggagacctggtttgctctcctccatgacagcccagcccctgctgtgcacaggggtggggctcgggatccctccctgcaccctgatgtttattaactgtagatagtgaatttcaagttgacaggtaccttctcagggatttatatataaatatagttagaggaaaagttgaagtctattttactactttttagtgtttgagtaaattatgctttaactggacagaagaaatatttctcagacaatgtcgatgctgctgatgacaactgagatgcctggagctcacccttgatggagacttccttggtgattggagatgggggactctggtggcagaaatggctttggggtaggtgtgaagttgcttcagtccctctgagttgcctcttctggatggaacgtgtgtatcaacaacaatgaaatgcacctccgtgtgcatggaggcggctgatgagaatacagataggccagtcctcgctcttccctccagaaccggccgctcccggtctgacgttggagcacgtgaactaagagtgacaattttttctacttgcttctgtgaataaagtgttctacagtcagcccagcactaaactcaccagaaaagaggagggaacagcacggagccattcatctggaattactcgatgtgcagaggctgccccttggccgcacttgggaacatcgtggacatcttccttcctctcaggctcctcctgacagactcctggcagcactggagacctcaggactatggagatcagaattgtaatggctttgtcatctcagtgtggccactcctgaggcaagaggctcctcctgggagcaggagagagagagtttgtgatgttggttggaaaataggatttatggatgcaggagggccgtgctaggcccctctgcccgcttctctccctgctgttggcggtgaccaggtctcaggagcggagacgaggctgttgtgagtgaaacagaagcccctggcatagggccagaccctaggcctgaaaaggatgcaaagcctgctgttttcaggctgttgggaagaatcgtgcgtaccgagtgattatgatgaaacgtatcccagagaggaaatgaatgggacctgaaaagtgggtctgccacatccctggtagcccgcctccaagagcactacactccccccagccccaccggccacactacatgacgtgggaaggctgtccgttcatccttaccctggggactcaagtgtgctctgcggagtgagtcacagccctgatgtgcaccctgcactactctttccccaggtgcgccggagacgcaggcttgctcatttccgtcctgacacagctcgctgttcctgcggtggtcagagtccccctgtgctgtgtcagctcctggacactactagtctttcacatgataaagcgcgagcactttttcgcttttgcagtatttggggaaattctaacacatttcccggggatttgcccaggtccctccacctcccacggtgggtaactgtgtggattctgcacctggcaatcggcgctcccctttggaaacacctgggggccctgtttcttccagcctggtccttggtttctaccccagccgctttcagccggcacctgcatgggactgcctggagggccacggtccagggaaggacaggtgggaccctgaccatgacagatctttctaaaacaataaagtcccattgatgacaactgcagtgggatgaatgccattgcagcggtcatgctgggagctgccgagagcttacaacaaaagcagttcctctcaagacactgcttgcatcttccctccacgcctctcggtgcatttggaacttgtttatgcgctggtataactcgagtcagctgcttatttctgtgcccttgcactcacaggttccttcattaacattttaaataagtggctaaaaaaactcctctggaggttgtttttgaaagagacaggaaaaagaaacacacagtacctggattgttttgacttattttcaagcgactcagctgaaagccggtgttgcatacacaatttcctcacgctgacccagcctgactaagacttgataaaaggcacagcccttggcagcaggcagtgccaatgtggacagtgtacactaagctgtgagtgtgtgcacgggcgagcacatgtatgtgtactcatacatccagatgaactaaagggacactgggctttgtgctggcaaaggttacgatgctgctgtagcttggctgtgggccccaggcagtgtcagatggaacctgctttgatggcgtgttgttcagtgtactcagtggggtctcacatggcccgaggacccactgtgagcactccgcccgctgtggcacagaacacggctggggtcatcacagcccaggtctttattgaaaggcggctcatatagaacccatttggccaggtctgggccatctctctgcctctgccctatcttggctgcctggaggggcccaggcccaagaggattctttacccctggaagagctccccaggcattcagcctatggcccttgacatttggctgcaggttaccgtcagaatcaacaccatatcctgaggaagccctggtatttccccaagtctgcctatgtattagacactctaatcaatgctaacacagttcagtttttgagggaactagttttgtcataatactacacccctctattgtttttaaataagaaaaaaaaaaaccccacgaaactttccatcaaagcaatggtccgtgttggcctgatgctttaagaagtttgaggaggtaggtatggaggcaccttaacaccagtttttgagcagaagttctagaagctgatttagaactacacagctatggatacacctgatgaaaaccgcaaaaggcgatgacaggcccagaaatatgaccagcaagcccgtgagcctttggggcatccgactgaatttgaaaataataccccattcagatgaacattaaaagccaatgtactggaattctctttgttctgcccgacatttgggggtgtccaaggacctgtgtttttaacaaagatgactttatgaccgttctaaggattgaacagattcctgcacagggtgccaggtttcaagttaggtcctcttagtataagctctctttttttctgaatgtaaacctatttgcattgtcatttctaataatccagtaggtttctggatattgtaaagatactgagtacagatataactgtgtaaatttcatagtgttttattttgaggtgagagttttgttatagtttataaaagatattttcctattcagacctcagggctattttgggacctacaaataaatgtgattcccagcagcttcaatttttgatattcaaaaagttaataatctttaagctaaatataatgtgatatgattcagaaaaaaatgtttttcccttttaacttctaacaaattatgtatctaatgtttaaaaaatatggaaaaaagggataatgtaaaaatgtgggagaattgtggctaaagaataaaaaatcacttgttaaaacgca

SEQ ID NO: 107682 - DNA, 1591 bp, Homo sapiens
  Payload ID: 1136
  Gene Symbol: ANKRD33B
  Gene Name: ankyrin repeat domain 33B
  ENST ID: ENST00000504806
  CDS Start-End: 139-735
ggtttccgccgagctggagcgcgcgggccacggcttctctggggacgcagaagcgagaagcggggacctcggcgcgcgccccgcgtcccgctcttcctgcccgcgccccggcccccggcccgcgccccggccgccggcatggtgctgctggccgggaccgggccggagggcggcggggcgcgctgcatgaccccaccaccgccgtccccaccccggggcgcgcaggtcgaggaggaccccgctgactacgaagagtttgaggacttctcgagtctgccagacacccgcagcatcgcctcggacgactctttctaccctttcgaggacgaggaggagcacggcgtcgagagcgcggagagcgtcccggagggcgtcccggaaagcgtcccggagacggcgaccctcctgcgcgccgcctgcgccaacaacgtggggctgctgcggacgctggtgcggcgcggggtgagcgtcgaggaggcgcaggagactgaccgcaacggcaggaccggccttattgtcgcctgctaccacggctttgtggataccgtggtggccttagcagagtgcccccacgttgacgtcaactggcaggacagcgaggggaacacagccctaatcacagctgcacaggcaggggctgcccctgtccccatgggcatagtttccttagacactggctcccaatcttgcgcctccggcgtcagcatcacctgggctggctcatgtgagcattaacacagatctggtggaaacacagactgccaggccctgcccctggagtctttctttgaataggcctggggtggggcccaagaatgagcagatcaacaggtttcctggtgaggctgatgccactggcccagggaccccacattgaggatggagagctttgaagattttatgcctgatgacggcaaaggacccctctcagtgggcactgaagaccagcagagtcacagaccccacgagagatgttgtcagacagacacagaggcatcacggaattaaagtgaaaatgaggaaggcaggtgagcatgtgttcatgactttcctgtgctgttttgccaaagaggctgtttaggcccaatcagggcacgctatcatcactaactacttgttgaactatttccctggtcttgaccttgaaaggaggaacgcgttcgggttcaccgccctgatgaaagccgccatgcagggtcgaacggactgcatccgagccctgatgctagcaggggcggatgtccacgcgagggacccccgccgtgggatgtcgccgcaggagtgggccacttacacgggccgcgtggatgccgtccgtctcatgcagaggctgctggagcgcccctgcccggagcagttctgggagaagtaccggcccgagctgccgccgccccctgaagcggcgcggaagcccgcgggctccaagaactgcctgcagaggctcacagactgcgtgctgtccgtgctgacgccgcgctccgtgcggggcccggaggacgggggcgtcctggaccacatggtccggatgaccacgagcctctacagccccgccgtggccatcgtgtgccagaccgtgtgccctgagagccct

SEQ ID NO: 107683 - DNA, 3613 bp, Homo sapiens
  Payload ID: 1137
  Gene Symbol: ANKRD34A
  Gene Name: ankyrin repeat domain 34A
  Uniprot ID: Q69YU3
  ENST ID: ENST00000606888
  CDS Start-End: 1296-2786
agcgagtacgcccggaaccgaagcttgcgaagcgggtcgcagagagagatgggcgttgcagaatcagctggggtcacttatttccggtctcactccagatgaaggagccactagccggcgagagttcaccgagggaacgtgacactcatatctcatcgagggaccgtgttgagggagcccctacagagaggccaaaggaggagagggcctacggagaaatgaacctctgtaaaagctgctctttagggatcagtctttttgtgactctagcttcatagcttggtctctccattactccagccttcctttcaatcatacactgcctctctccagcaccaccaatggatacttcttttctaaaaatgtttttctgtgggttgctgccgtgtctgtgagaagctggacacaaactcattcctaaaatatgtggatggaagctatggtaaccatggagacagggcaggtggcaaggagaggcagagacagtgtgagagaccaatagacagataggaagagagaagatataaggaatgtttcagacagagatcgtcaagcaagatggaaaaaataagacgtctaagcaagactgagattaaagagatgcaatgtgagagagtgtattacaagtgtgccatgtgccgtgtatggcaggtcaggtctggcgcacaggagcgcacaaacacaccaagtgcggagaatggggatctgctgaatctcagcgaagaatctggatgatggtccctgtctgggtcgcggaggagtcccctaaggaacacttaggtttgttggggctgaggggaggtcggctgagaaaaggaagtcaggattggagcctctaggtttttgagggtttatgtgtgcatgagtgggggagcagtttggtgcctgacgcccccacccgcagtgactaggctataaatagcacagcagagctccgcccccccccccccccccccccccgccaagcttctctcctcccgagccggcgctgtgcccggggcgctccgggaggagggaccaggatccggcgccggggcgcagatactgacaccaagggaatccgggtgcccccccccccacgccatgcgggcccccaggaaactggctccgccacctcggctgccccgtggccacggccccaatcctggccaggcggagattctgcggacattcagggatcggcttcgtcactgagacctcaggcctctgccagccactccccctccccatacccctagtcatcctcggcaggtctcagtcccggctccatctgtgccctcgccccagccgcagctatgttgcacaccgagggccacgctcttcttcgggcggtgggtcagggtaagctacgcttggcccgtttgcttctggagggaggcgcctacgtgaatgagggtgatgcgcagggggagactgcgctaatggcagcctgtcgggcccgctacgacgacccccagaacaaggcacgcatggtacgctacctcctggagcaaggcgcggaccccaatatcgcagaccgattagggcgcacggcgctcatgcacgcttgcgccgggggtgggggcgccgcggtggcctcgctgctccttgcccacggcgcagacccctcagtccgagatcacgcgggcgcctcggctcttgtccacgccctggaccgcggggaccgcgagacccttgccacactgctggacgcctgcaaggccaagggtacggaggtcatcatcatcaccaccgatacctcgccctcaggcaccaagaagacccggcagtatctcaattctccaccatccccaggggtggaggaccctgctcccgcctctcctagcccggggttctgcacgtcgccttcggaaatccaactgcagaccgctggaggaggagggcgtgggatgttatcccctcgcgcccaggaagaagaggagaagcgggacgtatttgaattccctcttcctaagccccccgatgacccatccccttccgagccgctccccaaaccaccacgccatcccccaaaaccactcaaaaggctcaactccgagccctggggcctagtggcccctcctcaaccagtcccacccactgaagggagaccggggatcgagcgcttgactgccgaattcaatggcctgaccctgaccggtcgaccccgtctttcccgacgtcacagcaccgaaggccctgaggacccgcccccatgggcggagaaagtgactagcgggggtcctctctctcgccgaaacacagcaccagaagctcaggagtctggtcccccttcagggctgaggcagaaactgagccgcatggagccagtggagctggacacccctggacacctttgccctgactcgcctgagtccagccgcctgtccctggagcgccgccgatacagcgcctccccgttgaccctccctccagccggctcggctccctctccgcgccagtcccaggagagtctgccaggggcagtatctccgctaagcggaaggaggcggagtccggggctgctggagcggaggggctcggggacgttgctcctggaccacatctcgcaaacgcggccgggtttcctaccccctctcaacgtcagtccccaccctcccatccctgacattcgcccacaacccggaggtcgggcgccttcgttgcctgcccctccttatgccggggcgccaggctctcccaggaccaagcgcaaattggtgagacgccactccatgcagactgagcagatccgcctgctggggggcttccagagtctaggtgggcctggggagccagggcgctgagaggagtgagaggagccaaggagggtggggattaggaccttaatgggataggtgggagaaccagctcacacacacaccacgaacaaagggatctcttgcatgtgctcatgggtgcacagtgcacccacacatggttaaacatgtgtccataagcacagtactcttattagcaagaaagaataagtactctatttactgggtatatacacacatgtattcatgccctggtcatttcacatgcatatgggattacttgtgtacctacaggcacagcatatcaataaacacacagggctagggtcccaaactctcttgcatttgttcagaagcagtagggaacccttacttatgggcagtctccgatgtctttgccctcctgcagaagcaatcccttgctttccatgtatgccctgaaacacagcctatcatgattttgcacactctctccgtggacatcccagcccattctgcaggtcttgcttctttctccaggcctggctccttattcacaccctgcttctaaccccaaccacttttcaggatatctttttcactcttcttgggggttcctgcagcaacccccagcctcagttctgctgctgtctttactgctctcaacttcacttctcaacttcctgctttttattcccaccctgttcctccaacaactacaacagattgtctcattttcccagggggtgggtcatgggctctaagctgctcttctgtctgtctgagcttatgaacacccccacaggtagaagtggggagaaaccctaaatcactcctctctccacttgacatatcaaataaatgtgttcagaagt

SEQ ID NO: 107684 - DNA, 716 bp, Homo sapiens
  Payload ID: 1137
  Gene Symbol: ANKRD34A
  Gene Name: ankyrin repeat domain 34A
  ENST ID: ENST00000619813
  CDS Start-End: 361-716
gcgctccgggaggagggaccaggatccggcgccggggcgcagatactgacaccaagggaatccgggtgcccccccccccacgccatgcgggcccccaggaaactggctccgccacctcggctgccccgtggccacggccccaatcctggccaggcggagattctgcggacattcaggtctcaaatgcaggctgcttccctccccccactcaatttttggggttgtggcaagctaaaacagggatcggcttcgtcactgagacctcaggcctctgccagccactccccctccccatacccctagtcatcctcggcaggtctcagtcccggctccatctgtgccctcgccccagccgcagctatgttgcacaccgagggccacgctcttcttcgggcggtgggtcagggtaagctacgcttggcccgtttgcttctggagggaggcgcctacgtgaatgagggtgatgcgcagggggagactgcgctaatggcagcctgtcgggcccgctacgacgacccccagaacaaggcacgcatggtacgctacctcctggagcaaggcgcggaccccaatatcgcagaccgattagggcgcacggcgctcatgcacgcttgcgccgggggtgggggcgccgcggtggcctcgctgctccttgcccacggcgcagacccctcagtccgagatcacgcgggcgcctcggctcttgtccacgccct

SEQ ID NO: 107685 - DNA, 571 bp, Homo sapiens
  Payload ID: 1137
  Gene Symbol: ANKRD34A
  Gene Name: ankyrin repeat domain 34A
  ENST ID: ENST00000619519
  CDS Start-End: 261-571
gtgtatggcaggtcaggtctggcgcacaggagcgcacaaacacaccaagtgcggagaatggggatctgctgaatctcagcgaagaatctggatgatggtccctgtctgggtcgcggaggagtcccctaaggaacacttagggatcggcttcgtcactgagacctcaggcctctgccagccactccccctccccatacccctagtcatcctcggcaggtctcagtcccggctccatctgtgccctcgccccagccgcagctatgttgcacaccgagggccacgctcttcttcgggcggtgggtcagggtaagctacgcttggcccgtttgcttctggagggaggcgcctacgtgaatgagggtgatgcgcagggggagactgcgctaatggcagcctgtcgggcccgctacgacgacccccagaacaaggcacgcatggtacgctacctcctggagcaaggcgcggaccccaatatcgcagaccgattagggcgcacggcgctcatgcacgcttgcgccgggggtgggggcgccgcggtggcctcgctgctccttgcccacggcgcagaccc

SEQ ID NO: 107686 - DNA, 3938 bp, Homo sapiens
  Payload ID: 1138
  Gene Symbol: ANKRD34B
  Gene Name: ankyrin repeat domain 34B
  Uniprot ID: A5PLL1
  ENST ID: ENST00000338682
  CDS Start-End: 674-2218
agctgctggcccccctgggtccagaggagccttgccgccctcacctgcgcagagcctggagccgacgcgtcacccccagcggaagcgcctcgctgcccgggcgtctggcgaggtgtgcgctccgggtcccagctccagcgcttcgcggcagtcgcccgcctctttccgcaagcagggcggggactgggcggcatctaccgagatctgcgattcgaggcgccgaggagccgaagaccacagctcagctcagacggcgccctagggccgcacagagggtcgggcagtgccggagagaggtttgaaagcgccgccgccaactcgacagcgcgtcccagcgccttgagctcgcttcctcctgctctcaggaaaaactgaggaaacgcgcctggttccaggggtcggcggggaccgtggagacgctgccagcatcctcaacagcttggaaatcccatcaccttggttccctgagacttggaggactagtaggaactgacagctggctgacagaaaacttatccagggagagaagagacaaaagtgaagtgtgaaattttgaataatgttttcagatgctttgcattcagaatagacctctgagttgggacccaagctgtcaactgatcccaaattcctaagttcctgacttgcaggtattgagttctaacctccgaagatggatgaaggtatggaaatttcaagtgaaggaaattccttgatcaaagcagtccatcagagccggcttcgcctcacaagacttttgctagaaggcggtgcctacattaatgagagcaacgaccgtggggaaacccctttaatgatcgcttgtaagaccaaacatgtcgatcaccagagtgtcagtaaagccaaaatggtgaaatacctgttagagaacaatgccgatcccaacatacaggacaaatctgggaaaacggctctgatgcatgcttgcttagaaaaagctggccctgaagttgtttccttgctcctcaagagtggggctgacctcagcttgcaagaccattctagttactcagctcttgtttatgctataaattcagaagatacagagaccctgaaagttcttcttagtgcttgcaaggcaaaagggaaagaggtcatcatcatcacaacagcaaagttgccctgtgggaagcatactactaaacaatacttaaatatgcctcctgtggatatagatgggtgtcattccccagctacctgcaccactccttcagaaatagacatcaaaactgcctcatcgccactttcacattcttctgaaacggaactgacgctttttggctttaaagatcttgagcttgctggaagcaatgatgatacctgggacccaggttcccctgtgaggaaacctgcattggcccctaaggggcccaagctcccccacgctccaccctgggtcaagagtcccccattattaatgcaccagaacagagtggcttcattgcaagaggagctccaggatattacaccagaggaagaactatcctataaaaccaatgggctggcactttccaagcggttcatcactaggcaccaaagcattgatgtaaaagacactgcacatttgctaagagcctttgatcaggccagctcaaggaagatgtcatatgatgaaataaattgtcaatcttatctttcagaaggaaatcagcaatgcattgaagtccctgttgaccaggacccagattctaaccagacaatatttgcttccaccttaagaagtatagttcaaaaaagaaacttgggggcaaatcactacagctctgattcccagctctcagctggccttacccctccaacttcagaagacggcaaagcacttataggaaagaaaaagatcctctcaccatctccttcccaattgtcagagtccaaagaattgttggagaatatccccccaggtcccctgagcaggagaaatcatgcagttttagaaaggcgaggttcaggagctttccctttagatcacagtgttacccaaaccagacaagggtttctcccacccttaaatgtaaattctcaccctcccatctcagatatcaatgtcaacaacaagatttgcagccttctttcttgtggtcaaaaagtgcttatgccaacagttccgattttccctaaagaattcaaaagtaagaaaatgttgttaaggagacaatcattgcaaactgaacaaattaagcaattagtaaacttctaggagatgggtataaaacacatcttcttcaaatgtttatatcagagaaacaaagaactagagaagaaatcttaaatgttcattcttttaaatctcgtgattggttagtccataatggctagatggattaaaatgtaatgtgatttgtactaggcgtcatgagcataaaaaataatacatagtttctgttaagggaattctctcaaacaaaaggaaagcgatttttctcaatgcttctaatatttaacaatctccatgtagtccaaatttgtcattaaaaaaaaatcaaagaaagaaggccacgtatgttggggtaatttttaaaaattttcagattggctaaatattttattaggaaacagttttcaagtcaataatttttttaacatttcatgttaataaatgagattgaaattttttatgatctctaaaccataaaagaaaacaccgacagctgtaaaatgttctaagataaaaaaactcgagctacaaagaaagaatgaactaattctttacaaatgttgactgaagatagataaaactctaattaaaaatttaaaaggttaaacactgtattagaatgggcaactaaaatattcgtggtgtcagtttaattagtgtcaaactggcaagtcagagttttacaacctactagtaatctatgccgggtcttgttgtttgtgcactgtgttttgctttgctttgttttggtttttaaacagacttacctgtaaagttatcttacggaattattctttctccatatcttttaaggaattattctttctccatatcatcttttaattcctgttattagttttggaagcttatccataagtttccaaagacaagatgatataaaagttaaaaagcattcctctttacttatatcaaattattcttgtctttcaaaaagaaccaaaaaaaaaaaattcatcatggataaaaactaagcgcttgccttcttttaaaaagaaaaactgatgattagattaggttagctaaaattaatagaggcagtagaaacttaatcacaaaatgtactaaatatttggcaatattaaacaatgcctttttatttctgatatgtagttattagacatttatatattaaggataacttccttagtgtgacattccaatcatttagtattttaggacctgtgaataacttccaacaaaattaatgaataccatattagtattataaaatattataaagtaataattatatcatctatataacttcaaagtatgatgtttatacaaagaatccttatttcagtctagcagcttaacaacaaaggataaatcagactatacaaaacctaagtgtattaatttgatgattgtcacgtacaactttctttgccttccaagtagaggtgatcctaacaattggcatgatgcttttcttggtaatttgatataagcaagttgtaatgtacatagtaattatttaattactgtggcttttattttaaaaagtaattagaggtttttccatttcatgtcttgaacaacattaatattaattacactagaaatattttttgattcagaacttagaattgtacctgatatttataggtatttaaatgctttctgcaagttaaatatcgagaaaagtacttgacttcaagttgtaaggatacaatttggaagggtatgtaaatagattagttcataaacaaaatggtatcaataaagattttaaatatca

SEQ ID NO: 107687 - DNA, 542 bp, Homo sapiens
  Payload ID: 1138
  Gene Symbol: ANKRD34B
  Gene Name: ankyrin repeat domain 34B
  ENST ID: ENST00000508916
  CDS Start-End: 492-542
agctcagctcagacggcgccctagggccgcacagagggtcgggcagtgccggagagaggtttgaaagcgccgccgccaactcgacagcgcgtcccaggaaaaactgaggaaacgcgcctggttccaggggtcggcggggaccgtggagacgctgccagcatcctcaacagcttggaaatcccatcaccttggttccctgagacttggaggactagtaggaactgacagctggctgacagaaaacttatccagggagagaagagacaaaagtgaagtgtgaaattttgaataatgttttcaggcacggccgtcgccagcatagtaccggctcctcttcttctcccagaacctcctgacaccaaccttggtgaaagaaaagctgtgacaatgctttgcattcagaatagacctctgagttgggacccaagctgtcaactgatcccaaattcctaagttcctgacttgcaggtattgagttctaacctccgaagatggatgaaggtatggaaatttcaagtgaaggaaattccttgatcaaagca

SEQ ID NO: 107688 - DNA, 4951 bp, Homo sapiens
  Payload ID: 1139
  Gene Symbol: ANKRD34C
  Gene Name: ankyrin repeat domain 34C
  Uniprot ID: P0C6C1
  ENST ID: ENST00000421388
  CDS Start-End: 1-1608
atgatggatgatgacactgaattaaggactgatggaaactctttgttaaaggctgtgtggctggggaggctcaggttgaccaggctgctcttggaagggggagcttatatcaatgaaagcaatgacaaaggcgaaacagctctcatggtggcgtgcatcaccaaacatgtggaccagcaaagcatcagcaagtccaagatggtgaagtacctgctggacaacagggcagaccccaatatccaagataagtctggcaagactgccctcatccatgcctgtatcagaagagctgggggagaagtggtctccttattactggagaatggagcagaccccagccttgaagatcgcactggggcttcagctctggtttatgcaataaatgcagatgacaaggatgcattgaagcatctccttgatgcctgcaaagccaaagggaaggaggtgattattataacaacagataaatcgtcttcaggcaccaaaaccaccaaacagtatcttaatgtccctccttcacccaaagtagaagacaggcattcacctccactgtgtgcgtctccctctgacatagagctgaaggctctaggcctggactctccactcactgagaaggaagatgacttcttcagcctccaagcagggcatccaagcagttgtaacacctccaaggctgttaatgagcctgggtcacccaccaggaaagtcagtaatctcaaaagggcccgtttgcctcaactgaagaggctccagtctgaaccttggggcctgatagcgccctcggtgctggcagcctcgacgcgtcaggatgagacccatggtgccagcacagacaacgaggtcatcaagagcatcagtgatatatccttccctaaaagggggcccctctccagaaccaacagtatcgatagcaaagaccccaccctctttcacacagtcacagagcaggttctgaagattccagtctcttcagcaccggcatcctggaaagcagcctatgagaaaggtcaggctccccacccacgtctggccaggagaggaactctccctgttgaccaagagaaatgtggtatgggtccatcaggaccctctgctctcaaagagcctgcatccctcaaatggctggaaaatgacctctatgacttagatatacagccagggcctgaccctcccaactccatttcccttgaatccggcaaaggacctttagatagaaagaagctcaacagctctcacttgtctcttttccatggctctcgggagtccctggacactgtacctagcacatcccccagctcagcacgccgcaggccgccacatcttctagaacgacgaggttctggaactctgctccttgatcgcatttctcacactaggcctggcttcctgccgcctttaaatgtgaatctgaacccgcctattccagatattagatctagcagcaaaccttcttgctctcttgctagtggcttaaaatctatggttcctgttgctccaagttcaccaaagagagttgacttaagaagtaaaaagaagctcctcagaaggcattctatgcaaattgaacaaatgaaacagctgtctgattttgaagaaatcatgacctagaagctttagaaaggcttaaaatagtcaatatagtttatggaagggactatggatgagactgcttcctgatcattccttaatgttgaactgtggccacttcagaagatataaaagcaggatgctgcttcacttctgagaataatccctgggtttttataggcctacttgaaaagagctcaggataattgggttttgaagataaatttttaaaaattctgcaaaggaagaaagcctttggaatttgaaggtaacacagcaagtacaatgatgtaagctggggacatcagtagttttctatcagacaaacagaaaagaatttaaatcaggaggtagtatttggagtatgtcatttgtaataaatctataaagtgcctacatagaaaacgaggctttaacatttgttagaatgtacaaaagccccaaaccaaaccctcagtgactaaatctgggtgtctgggttctatctgatggagtagaagcagaattccccccatggaagaggctctggcctgtgggtcctggctctgactctgtcagggcactgtaaatcatggtgtggttgaactcgttcagtaatccagtaatatattttgttcacatactaatttgtatgtgctctgagtacccaaatatcccatctatgtggcccctgaattatgatatgtcatagtagctgatgccttagagataaatcttgctccagaaatgaaactttccccagacccgtcccctgacacaggctcttgtattgaaatcttgtgaaaaacagtcaaggttaactaacttggagttgaatgtgatacaattatagattaaaaatatcagaagcatttccagattattcttaaaagttgatgagatcttcccaaaccagaatgacaactgaggatgagatgtgcatagattaaatggtaaagtgggtggttctcaggtgagaagcagtgaggaccattcattttgcagcctaaaaattttaggggatgcaaactgtcatttccccttcagttatgtaaataattgaagaaaaatctggtttcttctcttcctgatctatctaggtgagaagagatttgtagaaataacctgcacaacccttttaggctgctttgagcaaatccaagaaggaaagcagagacttagcacatttggtataatgtagccacatcttagatgaatatatttttggttatttccatttatgtttcctctcgtgctgctgagatctatttgctctatggttaaaaagttcaatagttcctgaggacagcatcatatagaggaaagagggctttgagtctgacatatttgggtttgcataccagtcttatcatttaccagctgcgtgaccttgaggaggcagcttaacttctcttagtctctgttccctcatctgtaaaataggattagtagtgctgcaccttacaaggttgtgatgagaattaaatgacacaatgtatgaaagtgctgccattgtgcctggcacaggtagaagtcactggataagaagtagctaattttaatgtatttcttgagactgctgaagcaatatctcaaataatacatacgctacacaaaatggaataaagtttctctggaaaagttcaagtatctctatgagatccccagttatttttataagtaccgatctctaaactcatgtgtaaagtaaaaaattctgccatataaactctacatattatataatttttctataactacctttgctagaaatttatctgaatattccaaacaaaagtgttaatgatggttaaacaaaaaaactcggtgttgtttggagggctgtctgtcctgtgtgttgtaggatgtttagcagcatctctggcctccactcactagatggcagtaacaccctctccccagttgtgacaaccaaaaatgtctctagacgtggccagatgtctcctgggtgcatcaccttcgttgatctctactgctagacctatcgtatatgtcaagaacaacaaagctgtatggaaatgtgagtgctgactggacagctatgccctcctgttaacttaagacaattcaaattgtgctttagtaagaggactaatcaatactagtgttgggccttcaggattcttggcaaacacactccaacatgtgtgctaatggtctcatactttgtaggaagggaagaaaataaggaaagcacataaactagcaaaaatctatagctcatgaacttggtttagtgtggacaaccctgttcttttcagaactatttaatcattaatagttcttaccaagtagaagtgatcccaggcaaagaaacaactttccaatgcattcaagagagaatcatacggacaaccatcattctcagcagctcattaaatgcaaatacacacacgcaaagagagagagagaacacattttacatagttttccagctgttgttagtgtcacttaaaactgatctctgctggtagtattcagttgtgagtatagcaagacactgcataggagcattttttttctaaacctttagctaagatttggaaacccaatatttcctaagtagtgaatgtggtctatttatagtaattagcttaggtgacacaccaaacatgatgagttgctcattcaggatagccggtccattgcacaaatgtgtaatatcaggtactctcatgccactcattgcctgcatcagtcagtcatgacctttgcatcagcctttcaatagacagtcatcaggctagtatcttatctcatcactacttgacgatgagttcgccgaattagactgttctataccagtacaacaaccaaaatactttctcatagattatgcataaatacgcaattttgtccatgtcaatgaacctaacaagaatgctttttaaaagtatattttagattcaaacatgctttctagatcagaggttaacttgtctttttgaaatcctggagtcacttataagttagctgcaaactgtagtttcggtaattcaactgcttaagcatttctggactgtttatcaaaatatattacagaatgtgagactaaagtttaaagtctggacctttggtttaatttctagactttccaaagcttttttttttctttttaaaaagcccattgtcaactctcttagaacttcatcaagtaaatggtaccttgcaaatgtaggttgtgtctgaccttctttctttttgtgtgttggtgcctcagatgtatcatgtgctgcttgaactgattctctacagtgttccttcctagtctcaagctgatgatgtgctcaaagatgtatcaaaatccatgtaatgacaccttttagatgtttctaatatgtcaataaatgatatattgcaatcc

SEQ ID NO: 107689 - DNA, 3342 bp, Homo sapiens
  Payload ID: 1140
  Gene Symbol: ANKRD35
  Gene Name: ankyrin repeat domain 35
  Uniprot ID: Q8N283
  ENST ID: ENST00000355594
  CDS Start-End: 88-3093
gcacagccgcagccaagtccggtgggttcgggaacctgtggcccggctctctgcgcgtccccatcccccgtggccccgaccccggccatgaagcgtatcttctcctgctccagcacacaggtggcggtggagagatggaaccgccatgatcagaagctgctggaggcagtgcacaggggggatgtgggacgcgtggctgccctggcctccaggaaatctgcccgacccaccaagcttgactcgaatggccagtccccgtttcatctggcagcctccaaaggcctgacagaatgtctgactatcctgcttgcaaatggggctgacatcaacagcaagaatgaggatggaagcactgccctacacttggccaccatctcctgccagccacagtgtgttaaggttctgcttcagcatggtgctaatgaagatgctgtggatgcagaaaaccgtagtccattgcactgggcagcctcctctggctgtgcctcaagtgtgctcctgctgtgtgaccacgaagccttcctggacgtgttggataatgatggacgtacacccctgatgatcgcatcgctgggtgggcacgcagctatctgctcacagctgctgcagcgaggcgcccgagttaatgttacagacaagaatgacaaatcggctttgatcctggcctgtgagaaaggcagtgccgaggtggctgaactgctcctgagccacggagctgacgcgggggctgtggacagcacagggcatgatgctctgcactatgctctgcacacacaagacaaggcactgtggaggcacctacagcaggccctgagccggcggcggcggggcggtcagaggctagtccagcacccagatctcgcatcccaggcctctccatctgagccccaggcaggttctcctcctaagagctcatggagagcagagcctgaagaggagcaagaggagaaggaggatgaagacccgtgctcggaggagtggaggtggaagtatgaagaggagcggaggaaagttgttcggctggagcaggagctggtgcaaaagacagaagagtgtaagactcaagctgcagcctatctggaccttgagaaccagattcgagagcaggcgcaggagctaggggtcctcctatcctgggagcccagagcttcaggaaagcaaggctctagtctccggcctggaggggatggcatggagcagggttgtcctaaggacctgctggctgagagtacacaagagctaaagaagcagcagcaggcagcagccacagtaaatccagtattagctccaaagaaggctgaggactcagccccaggaaagatccagtatgaagtccatggaaggtcccaaccagaagaacaggggccaccccagagcccagcgtctgagaccatcaggaaagccacaggacagcaactgactaccaatggggcacagacctttggccctgatcatgctgaccagctgcctgctggtcagaaggagagttcccaggttctaggagttgaaccaggaggcacagtggctgaaccagtgggcccagcagccatgaaccagcttctgcttcaactaagggaggagcttgctgcagtgtggcgagaaaaggatgctgcccggggggctttgtcaagaccggtcatggagggagccctggggactccccgtgctgaggcagcagcagctgcctgggagaagatggaagcccgactggagcgggtgctggcaaggctggaatgggcaaaggcaggactacaggtgaaacctgaggttccttcccaggagtccagagagggagccctaaaggcagccccagggagcatcaaacaggatgaagagaaggagaaaagggttcctggggctcaaggagagcctctaggggcccttggaggggaaaaggccctaggaggcctggcaaagggacagctggagaaggagatgtcagtactgagactgagcaacagtaacttgctggaggagttaggggagttggggcgggagcggcagaggttgcagagggagctacagtccctgagccagcggctgcagcgggagtttgtgcccaagccacaggcgcaggtccagctacagcagttgcgacagagtgtggggctgctgacaaatgaactggccatggagaaggaggccacagagaagctgcggaagctcctggcctcccagagcagcggtctccgagggctgtgggactgcctgcccgcagacctagtgggcgagaggagtgcacaaagcaaagcagcggagtccctggaggagctgcgggcctgcatcagcaccctggtggatcggcaccgggaggcccagcaggtgctggctcggctgcaagaagaaaaccagcagttgcgggggtccttgtccccgtgtagggagccaggcacctccttaaaggccccagcatccccccaagtggccgctctggagcaagacctggggaagctggaggaagagctgcgggcagttcaggccacgatgagcgggaagagccaggagatcggaaagctgaagcagctgctctaccaagccacagaggaagtggctgagctaagggcccgggaggcagccagcctacggcaacacgagaaaactcggggttcgctggtggcccaggctcaggcttggggccaggagctaaaggctctgttggaaaagtataatacggcctgccgggaagtgggtcggctgcgggaggcggtggccgaggagcgccgccggagcggggacctggccgctcaggcagccgaacaagagcgccaggccagcgagatgcgggggcgctccgagcagtttgagaaaacggcagagctgctgaaagagaagatggagcatctcattggggcttgccgagacaaggaagccaagatcaaggagttgttgaagaagctggagcagctttcagaagaggttctagcaattcggggagaaaatgctcgccttgccctgcagctgcaggattcccagaagaaccatgaagagatcatctccacctacaggaatcatctactgaatgctgctcggggttacatggaacatgaagtgtacaatatcctgctgcaaatccttagcatggaagaggagtgaggcagcctcactgtgtgccctcagggatacgagattctctgttggaataagaaaccctggttgacagaggcttcatcaggctgtggtgggcgggggtgttggccactaggcaatggtatgggcagggcttcacctgacattatggacctcagacctgagaacctggaccctggaatcagcatggatgagaccagaggaggtatggatggaaacaagctctatggaaaataaagcatgaggcaggacggg

SEQ ID NO: 107690 - DNA, 3093 bp, Homo sapiens
  Payload ID: 1140
  Gene Symbol: ANKRD35
  Gene Name: ankyrin repeat domain 35
  ENST ID: ENST00000544626
  CDS Start-End: 109-2844
gctttttgacagctgtctcttgcacagccgcagccaagtccggtgggttcgggaacctgtggcccggctctctgcgcgtccccatcccccgtggccccgaccccggccatgaagcgtatcttctcctgctccagcacacagtgtgttaaggttctgcttcagcatggtgctaatgaagatgctgtggatgcagaaaaccgtagtccattgcactgggcagcctcctctggctgtgcctcaagtgtgctcctgctgtgtgaccacgaagccttcctggacgtgttggataatgatggacgtacacccctgatgatcgcatcgctgggtgggcacgcagctatctgctcacagctgctgcagcgaggcgcccgagttaatgttacagacaagaatgacaaatcggctttgatcctggcctgtgagaaaggcagtgccgaggtggctgaactgctcctgagccacggagctgacgcgggggctgtggacagcacagggcatgatgctctgcactatgctctgcacacacaagacaaggcactgtggaggcacctacagcaggccctgagccggcggcggcggggcggtcagaggctagtccagcacccagatctcgcatcccaggcctctccatctgagccccaggcaggttctcctcctaagagctcatggagagcagagcctgaagaggagcaagaggagaaggaggatgaagacccgtgctcggaggagtggaggtggaagtatgaagaggagcggaggaaagttgttcggctggagcaggagctggtgcaaaagacagaagagtgtaagactcaagctgcagcctatctggaccttgagaaccagattcgagagcaggcgcaggagctaggggtcctcctatcctgggagcccagagcttcaggaaagcaaggctctagtctccggcctggaggggatggcatggagcagggttgtcctaaggacctgctggctgagagtacacaagagctaaagaagcagcagcaggcagcagccacagtaaatccagtattagctccaaagaaggctgaggactcagccccaggaaagatccagtatgaagtccatggaaggtcccaaccagaagaacaggggccaccccagagcccagcgtctgagaccatcaggaaagccacaggacagcaactgactaccaatggggcacagacctttggccctgatcatgctgaccagctgcctgctggtcagaaggagagttcccaggttctaggagttgaaccaggaggcacagtggctgaaccagtgggcccagcagccatgaaccagcttctgcttcaactaagggaggagcttgctgcagtgtggcgagaaaaggatgctgcccggggggctttgtcaagaccggtcatggagggagccctggggactccccgtgctgaggcagcagcagctgcctgggagaagatggaagcccgactggagcgggtgctggcaaggctggaatgggcaaaggcaggactacaggtgaaacctgaggttccttcccaggagtccagagagggagccctaaaggcagccccagggagcatcaaacaggatgaagagaaggagaaaagggttcctggggctcaaggagagcctctaggggcccttggaggggaaaaggccctaggaggcctggcaaagggacagctggagaaggagatgtcagtactgagactgagcaacagtaacttgctggaggagttaggggagttggggcgggagcggcagaggttgcagagggagctacagtccctgagccagcggctgcagcgggagtttgtgcccaagccacaggcgcaggtccagctacagcagttgcgacagagtgtggggctgctgacaaatgaactggccatggagaaggaggccacagagaagctgcggaagctcctggcctcccagagcagcggtctccgagggctgtgggactgcctgcccgcagacctagtgggcgagaggagtgcacaaagcaaagcagcggagtccctggaggagctgcgggcctgcatcagcaccctggtggatcggcaccgggaggcccagcaggtgctggctcggctgcaagaagaaaaccagcagttgcgggggtccttgtccccgtgtagggagccaggcacctccttaaaggccccagcatccccccaagtggccgctctggagcaagacctggggaagctggaggaagagctgcgggcagttcaggccacgatgagcgggaagagccaggagatcggaaagctgaagcagctgctctaccaagccacagaggaagtggctgagctaagggcccgggaggcagccagcctacggcaacacgagaaaactcggggttcgctggtggcccaggctcaggcttggggccaggagctaaaggctctgttggaaaagtataatacggcctgccgggaagtgggtcggctgcgggaggcggtggccgaggagcgccgccggagcggggacctggccgctcaggcagccgaacaagagcgccaggccagcgagatgcgggggcgctccgagcagtttgagaaaacggcagagctgctgaaagagaagatggagcatctcattggggcttgccgagacaaggaagccaagatcaaggagttgttgaagaagctggagcagctttcagaagaggttctagcaattcggggagaaaatgctcgccttgccctgcagctgcaggattcccagaagaaccatgaagagatcatctccacctacaggaatcatctactgaatgctgctcggggttacatggaacatgaagtgtacaatatcctgctgcaaatccttagcatggaagaggagtgaggcagcctcactgtgtgccctcagggatacgagattctctgttggaataagaaaccctggttgacagaggcttcatcaggctgtggtgggcgggggtgttggccactaggcaatggtatgggcagggcttcacctgacattatggacctcagacctgagaacctggaccctggaatcagcatggatgagaccagaggaggtatggatggaaacaagctctatggaaaataaagcatgaggcaggacggg

SEQ ID NO: 107691 - DNA, 6269 bp, Homo sapiens
  Payload ID: 1141
  Gene Symbol: ANKRD36
  Gene Name: ankyrin repeat domain 36
  Uniprot ID: A6QL64
  ENST ID: ENST00000420699
  CDS Start-End: 245-6070
gggcgcgcgagagctgctagggcggtttctctgcctcgggcctgttgggcagggccggctaaggtgcgcgtgctcgctggttctaacccttctgttgggcgtttctgctgagaggcgggaggcgctgagagtctgtgcggaggtccgtggacagactgctttgctcgttgttgctcttcggaggcggcgatccccgaaggcgagctgaaatacggctgcaggctacaatttgcagccgacgattatggaagacggcaagcgggagaggtggcccaccctcatggagcgcttgtgctcggatggcttcgcatttccccaataccccattaaaccgtatcatctgaagaggatccacagagctgtcttacatggtaatctagagaaactgaagtaccttctgctcacgtattatgacgccaataagagagacaggaaggaaaggaccgccctacatttggcctgtgccactggccaaccggaaatggtacatctcctggtgtccagaagatgtgagcttaacctctgcgaccgtgaagacaggacacctctgatcaaggctgtacaactgaggcaggaggcttgtgcaactcttctgctgcaaaatggcgccaatccaaatattacggatttctttggaaggactgctctgcactacgctgtgtataatgaagatacatccatgatagaaaaacttctttcacatggtacaaatattgaagaatgcagcaagtgtgaatatcagccactgttatttgctgtgagtcgaagaaaagtgaaaatggtggaatttttattaaagaaaaaagcaaatgtaaatgccattgattatcttggcagatcagccctcatacatgctgttactcttggagaaaaagatatagtcattcttcttctgcagcacaatattgatgtgctttctcgagatgcgtttcgaaagattgcaggagattatgccattgaggctaagaatagagtcatttttgatctaatttatgaatacgaaagaaagagatatgaagatcttcctataaatagcaatccagtgtcttctcagaaacaaccagccttgaaggctacaagtggcaaggaagattctatttcaaatatagccacagaaataaaggatggacaaaaatctgggacagtgtcttctcagaaacaaccggccttgaaggatacaagtgacaaggatgattctgtttcgaacacagccacagaaataaaagatgaacaaaaatctgggacagtgcttcctgctgttgaacagtgtttaaacaggagtctctacagacctgatgctgttgcacagcctgtgacagagaatgagttttctttggaatctgagattatttcaaaactatacatcccaaagagaaagattatttctccacgatctataaaagatgtgcttcctcctgttgaagaggctgttgacaggtgtctctacctactggaccgttttgcacagcctgtgacaaaggataagtttgctttggaatctgagaatatttcagaaccatactttacgaacagaaggactatttctcaacaatctgcagaaaatttagatgctgcatgtggcattgacaaaacagaaaatggaaacatgtttgaagaccaaaatgttgataaggaaggaaaagcactaccagcaactggacaaaaagcaaatgtgtctcctgagcaaccgcctttattcacgcatacggtgaaagacagagatcacatttcaactagattcttaggaggtatggattcactaacttccagtgaagaatcttctgagcgacctcctttatccacgcttactctgaaagaggcagatcccagttcaaaagcagccatgagaaggaaggattcaccacctccaggaaaagtgtcttctcagaaacaaccagctgagaaggctacaagtgacgacaaagattctgtttcaaatatagccacagaaataaaggagggaccaatatctgggacagtgtcttctcagaaacaaccagctgagaaggctacaagtgacgagaaagattctgtttcaaatatagccacagaaataaagaagggacaacaatctgggacagtgtctcctcagaaacaatcggcctggaaggttatatttaaaaagaaagtttctcttttgaatattgccacaagaataatgggtggtgggaaatctggaacagtgtcttctcagaaacaaccagcctcaaaggctacaagtgacaagacagattctgctttgaatatagctacagaaataaaggatggactacagtgtgggacagtgtcttctcagaaacaaccagccttgaaggctacaactgacgaggaagactctgtttcgaatatagccacagaaataaaggatggagaaaaatctgggacagtgtcttctcagaagcaaccagccttgaaggctacaactgacgaggaagattctgtttcgaatatagccacagaaataaaggatggagaaaaatctgggacagtgtcttctcagaaacaaccagccttgaaggctacaactgatgagaaagattctgtttcgaacatagccacagaaataaaggatggagaaaaatctgggacagtgtcttctcagaaaccaccagccttgacggctacaagtgacgaggaaggttctgttttgagtatagccagagaaaacaaggatggagaaaaatctaggacagtgtcttctcggaaaaaaccagccttgaaggctacaagtgatgagaaggattctttttcgaatataaccagaggaaaaaaggatggagaaatatctaggaaagtgtcttctcagaaaccaccaaccttgaagggtacaagtgacgaggaagattctgttttgggtatagccagagaaaacaaggatggagaaaaatctaggacagtgtcttctgagaaaccaccaggcttgaaggcttcaagtgccgagaaagattctgttttgaatatagccagaggaaaaaaggatggagaaaaaactaagagagtgtcttctcggaaaaaaccatccttggaggccacaagtgatgagaaggattctttttcgaatataaccagagaaaaaaaggatggagaaatatctaggaaagtgtcttctcagaaaccaccagccttgaagggtacaagtgacgaggaagattctgttttgggtatagccagagaaaacaaggatggagaaaaatctaggacagtgtcttctgagaaaccaccaggcttgaaggctacaagtgatgagaaagattctgttttgaatatagccagaggaaaaaaggatggagaaaaaactaggacagtgtcttctcagaaaccaccaaccttgaaggctacaagtgatgaggaagattctgttttgagtatagccagagaaaacaaggatggagaaaaatctaggacagtgtcttctgagaaaccatcaggcttgaaggctacaagtgccgagaaagattctgttttgaatatagccagaggaaaaaagtatggagaaaaaactaagagagtgtcttctcggaaaaaaccagccttgaaggctacaagtgacgagaaagattctgttttgtatatagccagagaaaaaaaggatggagaaaaatctaggacagtgtcttctccgaaacaaccagcattgaaggctatctgtgacaaggaagattctgttccgaatatggccacggaaaaaaaggatgaacaaatatctgggacagtgtcttgtcagaaacaaccagccttgaaggctacaagtgacaagaaagattctgtttcgaatatacccacagaaataaaggatggacaacaatctggaacagtgtcttctcagaaacaaccggcctggaaggctacaagtgtcaagaaagattctgtttcgaatatagccacagaaataaaggatggacaaatacgtgggacaggtattttggaatacacctttaatgtaatgttcgatcaaatagaagagaaattcacttccctaaataaatcagcgggggtgtctcctcagaaacaatcggcccagaaggttatatttaaaaagaaagtttctcttttgaatattgccacaagaataacaggcggttggaaatctggaacagagtatcctgagaatctgcccaccttgaaggctacaattgaaaataaaaattctgttctgaatacagccaccaaaatgaaggatgtacaaacatccacaccagcagaacaagacttagaaatggcatcagagggagagcaaaagaggcttgaagaatatgaaaataaccagccacaggtgaaaaaccaaatacattctagggatgaccttgatgacataattcagtcatctcaaacagtctcagaggacggtgactcgctttgctgtaattgtaagaatgtcatattactcattgatcaacatgaaatgaagtgtaaagattgtgttcacctattgaaaattaaaaatacattttgtttatggaaaagattaataaaacttaaagataaccactgtgagcaacttagagtaaaaattcgaaaactgaaaaataaggctagtgtactacaaaagagaatatctgaaaaagaagaaataaaatcgcagttaaagcatgaaatacttgaattggaaaaagaactctgtagtttgagatttgccatacagcaagaaaaaaagaaaagaagaaatgttgaagaggtgcaccaaaaagttagggaaaagttaagaataacagaagagcaatataggatagaagctgatgtgacaaaaccaattaaaccggctctcaaatcagcagaggtggaattgaagacaggaggaaataattcaaatcaggtttctgaaactgatgaaaaagaagacctgctgcatgaaaaccgcttgatgcaagatgaaattgccaggctcaggctggaaaaagacacaataaaaaaccaaaacctggaaaagaaatacttaaaagactttgaaattgtgaaaagaaagcatgaagaccttcaaaaggctctaaaacggaatggggaaacattagcaaaaacgatagcctgttatagtggacagcttgctgctctgacagatgaaaacacaacgctccgttccaaactggagaagcaaagagagagcaggcaaagactggaaacagaaatgcaatcataccattgtagactgaatgctgctcgatgtgatcatgatcaaagtcactcatcaaaaagagaccaagagcttgctttccagggcacagtagataaatgtcgtcacttacaggaaaatttgaattctcatgttctgattctttctctgcaactttctaaagctgagagtaagtccagagtcctcaaaactgagctccattacacaggagaggctctgaaagaaaaggctttggtttttgaacacgtgcaaagtgagctaaagcaaaaacagagtcaaatgaaggacattgaaaaaatgtacaaaagtggatacaatacaatggaaaaatgcatagaaaaacaggaaagattttgtcaactaaaaaaacaaaatatgttgcttcaacagcaactggatgatgctcgcaacaaagctgacaatcaagaaaaagcaatacttaatattcaagccagatgtgatgctagagtacaaaaccttcaagctgagtgcagaaagcaccgtcttttactagaagaagacaataaaatgttggtcaatgaactgaatcattcgaaagaaaaagaatgccaatatgaaaaagagaaagcagaaagagaagtagctgtgagacagcttcaacaaaaacgagatgatgtcttaaacaaaggatcagcaacaaaagctctgctggatgcttcatcgcgtcactgcacctatttagaaaatgggatgcaggattcaaggaagaaattagaccagatgagaagtcaatttcaagaaatacaggatcaacttacagctactataagatgtactaaggagatggaaggcgacacacaaaagcttgaagtagaacatgtgatgatgagaaaaattattaaaaaacaggatgaccaaattgagcggcttgagaaaatcctgcagcattcaagtttgatgctgcaggtgtttgagagctagatgaagatatggacatttctggaattaagagccccctctacattgagcacaagacagtgacgaatccacattcttcagccagaaagtcacctctgagagccaaatgtctgactatagaaaggagagtcaaagaatgataacgacatctcaggaaaattgtgaaaataatcagcagccggatgtggataaccctttcaaa

SEQ ID NO: 107692 - DNA, 6102 bp, Homo sapiens
  Payload ID: 1141
  Gene Symbol: ANKRD36
  Gene Name: ankyrin repeat domain 36
  Uniprot ID: A6QL64
  ENST ID: ENST00000461153
  CDS Start-End: 245-6070
gggcgcgcgagagctgctagggcggtttctctgcctcgggcctgttgggcagggccggctaaggtgcgcgtgctcgctggttctaacccttctgttgggcgtttctgctgagaggcgggaggcgctgagagtctgtgcggaggtccgtggacagactgctttgctcgttgttgctcttcggaggcggcgatccccgaaggcgagctgaaatacggctgcaggctacaatttgcagccgacgattatggaagacggcaagcgggagaggtggcccaccctcatggagcgcttgtgctcggatggcttcgcatttccccaataccccattaaaccgtatcatctgaagaggatccacagagctgtcttacatggtaatctagagaaactgaagtaccttctgctcacgtattatgacgccaataagagagacaggaaggaaaggaccgccctacatttggcctgtgccactggccaaccggaaatggtacatctcctggtgtccagaagatgtgagcttaacctctgcgaccgtgaagacaggacacctctgatcaaggctgtacaactgaggcaggaggcttgtgcaactcttctgctgcaaaatggcgccaatccaaatattacggatttctttggaaggactgctctgcactacgctgtgtataatgaagatacatccatgatagaaaaacttctttcacatggtacaaatattgaagaatgcagcaagtgtgaatatcagccactgttatttgctgtgagtcgaagaaaagtgaaaatggtggaatttttattaaagaaaaaagcaaatgtaaatgccattgattatcttggcagatcagccctcatacatgctgttactcttggagaaaaagatatagtcattcttcttctgcagcacaatattgatgtgctttctcgagatgcgtttcgaaagattgcaggagattatgccattgaggctaagaatagagtcatttttgatctaatttatgaatacgaaagaaagagatatgaagatcttcctataaatagcaatccagtgtcttctcagaaacaaccagccttgaaggctacaagtggcaaggaagattctatttcaaatatagccacagaaataaaggatggacaaaaatctgggacagtgtcttctcagaaacaaccggccttgaaggatacaagtgacaaggatgattctgtttcgaacacagccacagaaataaaagatgaacaaaaatctgggacagtgcttcctgctgttgaacagtgtttaaacaggagtctctacagacctgatgctgttgcacagcctgtgacagagaatgagttttctttggaatctgagattatttcaaaactatacatcccaaagagaaagattatttctccacgatctataaaagatgtgcttcctcctgttgaagaggctgttgacaggtgtctctacctactggaccgttttgcacagcctgtgacaaaggataagtttgctttggaatctgagaatatttcagaaccatactttacgaacagaaggactatttctcaacaatctgcagaaaatttagatgctgcatgtggcattgacaaaacagaaaatggaaacatgtttgaagaccaaaatgttgataaggaaggaaaagcactaccagcaactggacaaaaagcaaatgtgtctcctgagcaaccgcctttattcacgcatacggtgaaagacagagatcacatttcaactagattcttaggaggtatggattcactaacttccagtgaagaatcttctgagcgacctcctttatccacgcttactctgaaagaggcagatcccagttcaaaagcagccatgagaaggaaggattcaccacctccaggaaaagtgtcttctcagaaacaaccagctgagaaggctacaagtgacgacaaagattctgtttcaaatatagccacagaaataaaggagggaccaatatctgggacagtgtcttctcagaaacaaccagctgagaaggctacaagtgacgagaaagattctgtttcaaatatagccacagaaataaagaagggacaacaatctgggacagtgtctcctcagaaacaatcggcctggaaggttatatttaaaaagaaagtttctcttttgaatattgccacaagaataatgggtggtgggaaatctggaacagtgtcttctcagaaacaaccagcctcaaaggctacaagtgacaagacagattctgctttgaatatagctacagaaataaaggatggactacagtgtgggacagtgtcttctcagaaacaaccagccttgaaggctacaactgacgaggaagactctgtttcgaatatagccacagaaataaaggatggagaaaaatctgggacagtgtcttctcagaagcaaccagccttgaaggctacaactgacgaggaagattctgtttcgaatatagccacagaaataaaggatggagaaaaatctgggacagtgtcttctcagaaacaaccagccttgaaggctacaactgatgagaaagattctgtttcgaacatagccacagaaataaaggatggagaaaaatctgggacagtgtcttctcagaaaccaccagccttgacggctacaagtgacgaggaaggttctgttttgagtatagccagagaaaacaaggatggagaaaaatctaggacagtgtcttctcggaaaaaaccagccttgaaggctacaagtgatgagaaggattctttttcgaatataaccagaggaaaaaaggatggagaaatatctaggaaagtgtcttctcagaaaccaccaaccttgaagggtacaagtgacgaggaagattctgttttgggtatagccagagaaaacaaggatggagaaaaatctaggacagtgtcttctgagaaaccaccaggcttgaaggcttcaagtgccgagaaagattctgttttgaatatagccagaggaaaaaaggatggagaaaaaactaagagagtgtcttctcggaaaaaaccatccttggaggccacaagtgatgagaaggattctttttcgaatataaccagagaaaaaaaggatggagaaatatctaggaaagtgtcttctcagaaaccaccagccttgaagggtacaagtgacgaggaagattctgttttgggtatagccagagaaaacaaggatggagaaaaatctaggacagtgtcttctgagaaaccaccaggcttgaaggctacaagtgatgagaaagattctgttttgaatatagccagaggaaaaaaggatggagaaaaaactaggacagtgtcttctcagaaaccaccaaccttgaaggctacaagtgatgaggaagattctgttttgagtatagccagagaaaacaaggatggagaaaaatctaggacagtgtcttctgagaaaccatcaggcttgaaggctacaagtgccgagaaagattctgttttgaatatagccagaggaaaaaagtatggagaaaaaactaagagagtgtcttctcggaaaaaaccagccttgaaggctacaagtgacgagaaagattctgttttgtatatagccagagaaaaaaaggatggagaaaaatctaggacagtgtcttctccgaaacaaccagcattgaaggctatctgtgacaaggaagattctgttccgaatatggccacggaaaaaaaggatgaacaaatatctgggacagtgtcttgtcagaaacaaccagccttgaaggctacaagtgacaagaaagattctgtttcgaatatacccacagaaataaaggatggacaacaatctggaacagtgtcttctcagaaacaaccggcctggaaggctacaagtgtcaagaaagattctgtttcgaatatagccacagaaataaaggatggacaaatacgtgggacaggtattttggaatacacctttaatgtaatgttcgatcaaatagaagagaaattcacttccctaaataaatcagcgggggtgtctcctcagaaacaatcggcccagaaggttatatttaaaaagaaagtttctcttttgaatattgccacaagaataacaggcggttggaaatctggaacagagtatcctgagaatctgcccaccttgaaggctacaattgaaaataaaaattctgttctgaatacagccaccaaaatgaaggatgtacaaacatccacaccagcagaacaagacttagaaatggcatcagagggagagcaaaagaggcttgaagaatatgaaaataaccagccacaggtgaaaaaccaaatacattctagggatgaccttgatgacataattcagtcatctcaaacagtctcagaggacggtgactcgctttgctgtaattgtaagaatgtcatattactcattgatcaacatgaaatgaagtgtaaagattgtgttcacctattgaaaattaaaaatacattttgtttatggaaaagattaataaaacttaaagataaccactgtgagcaacttagagtaaaaattcgaaaactgaaaaataaggctagtgtactacaaaagagaatatctgaaaaagaagaaataaaatcgcagttaaagcatgaaatacttgaattggaaaaagaactctgtagtttgagatttgccatacagcaagaaaaaaagaaaagaagaaatgttgaagaggtgcaccaaaaagttagggaaaagttaagaataacagaagagcaatataggatagaagctgatgtgacaaaaccaattaaaccggctctcaaatcagcagaggtggaattgaagacaggaggaaataattcaaatcaggtttctgaaactgatgaaaaagaagacctgctgcatgaaaaccgcttgatgcaagatgaaattgccaggctcaggctggaaaaagacacaataaaaaaccaaaacctggaaaagaaatacttaaaagactttgaaattgtgaaaagaaagcatgaagaccttcaaaaggctctaaaacggaatggggaaacattagcaaaaacgatagcctgttatagtggacagcttgctgctctgacagatgaaaacacaacgctccgttccaaactggagaagcaaagagagagcaggcaaagactggaaacagaaatgcaatcataccattgtagactgaatgctgctcgatgtgatcatgatcaaagtcactcatcaaaaagagaccaagagcttgctttccagggcacagtagataaatgtcgtcacttacaggaaaatttgaattctcatgttctgattctttctctgcaactttctaaagctgagagtaagtccagagtcctcaaaactgagctccattacacaggagaggctctgaaagaaaaggctttggtttttgaacacgtgcaaagtgagctaaagcaaaaacagagtcaaatgaaggacattgaaaaaatgtacaaaagtggatacaatacaatggaaaaatgcatagaaaaacaggaaagattttgtcaactaaaaaaacaaaatatgttgcttcaacagcaactggatgatgctcgcaacaaagctgacaatcaagaaaaagcaatacttaatattcaagccagatgtgatgctagagtacaaaaccttcaagctgagtgcagaaagcaccgtcttttactagaagaagacaataaaatgttggtcaatgaactgaatcattcgaaagaaaaagaatgccaatatgaaaaagagaaagcagaaagagaagtagctgtgagacagcttcaacaaaaacgagatgatgtcttaaacaaaggatcagcaacaaaagctctgctggatgcttcatcgcgtcactgcacctatttagaaaatgggatgcaggattcaaggaagaaattagaccagatgagaagtcaatttcaagaaatacaggatcaacttacagctactataagatgtactaaggagatggaaggcgacacacaaaagcttgaagtagaacatgtgatgatgagaaaaattattaaaaaacaggatgaccaaattgagcggcttgagaaaatcctgcagcattcaagtttgatgctgcaggtgtttgagagctagatgaaggtatgttgccaaaatttatgaattaa

SEQ ID NO: 107693 - DNA, 1884 bp, Homo sapiens
  Payload ID: 1141
  Gene Symbol: ANKRD36
  Gene Name: ankyrin repeat domain 36
  ENST ID: ENST00000620383
  CDS Start-End: 84-1013
tgctcgttgttgctcttcggaggcggcgatccccgaaggcgagctgaaatacggctgcaggctacaatttgcagccgacgattatggaagacggcaagcgggagaggtggcccaccctcatggagcgcttgtgctcggatggcttcgcatttccccaataccccattaaaccgtatcatctgaagaggatccacagagctgtcttacatggtaatctagagaaactgaagtaccttctgctcacgtattatgacgccaataagagagacaggaaggaaaggaccgccctacatttggcctgtgccactggccaaccggaaatggtacatctcctggtgtccagaagatgtgagcttaacctctgcgaccgtgaagacaggacacctctgatcaaggctgtacaactgaggcaggaggcttgtgcaactcttctgctgcaaaatggcgccaatccaaatattacggatttctttggaaggactgctctgcactacgctgtgtataatgaagatacatccatgatagaaaaacttctttcacatggtacaaatattgaagaatgcagcaagtgtgaatatcagccactgttatttgctgtgagtcgaagaaaagtgaaaatggtggaatttttattaaagaaaaaagcaaatgtaaatgccattgattatcttggcagatcagccctcatacatgctgttactcttggagaaaaagatatagtcattcttcttctgcagcacaatattgatgtgctttctcgagatgcgtttcgaaagattgcaggagattatgccattgaggctaagaatagagtcatttttgatctaatttatgaatacgaaagaaagagatatgaagatcttcctataaatagcaatccagtgtcttctcagaaacaaccagccttggcaacagagcaagactccatgtcaaaaataaaaaaaagaaagttgattgttatgaaaaaaaagtcaatggtgattcagagatttttggttacattttgtaaatgaaaatctgagtactcattagttatttgatgtgtaatgcatacttttttttttgcataagtgaatgaaaagatggcaagagaactaaagttgagaatccagaagttgaaaatatcagaagccttcatgactgtggatgacatgagtatttttagaaacgatttttctccaagtagatatctaaagtaatgattgagagcatttcctgccagcagaagcgaatgatacattttcttttctttttttttgagacggagtctcactctgtcacccaggcttgagtgcagtggcgggatctcggctcactgcgaactccgcctcccgggttcacgccattctcctgcttcagcctcctgagtagctggtactacaggcgcctgccaccacacccggctaattttacgcatttttagtagagacggggtttcaccgtgttagccaggatggtctccatctcctgactttgtgatctgcccgcctcggcctcccaaagtgctgggattacaggctgtctcctgagcaaccgcctttattcacgaatcttctgagcgacctcctttatccacgcttactctgaaagaggcagatcccagttcaaaagcagccatgagaaggaaggattcaccacctccaggaaaagtgtcttctcagaaacaaccagctgagaagggtacaagtgacgaggaagattctgttttgggtatagccagagaaaacaaggatggagaaaaatctaggacagtgtcttctgagaaaccaccaggcttgaaggcttcaagtgccgagaaagattctgttttgaatatagccagaggaaaaaaggatggagaaaaaactaagagagtgtcttctcggaaaaaaccatccttggagg

SEQ ID NO: 107694 - DNA, 4297 bp, Homo sapiens
  Payload ID: 1142
  Gene Symbol: ANKRD36B
  Gene Name: ankyrin repeat domain 36B
  Uniprot ID: Q8N2N9
  ENST ID: ENST00000359901
  CDS Start-End: 37-4098
aaggaagacgacgagcgggagaggtggcccaccctcatggagcgcttgtgctcggatggcttcgcatttccccattactacattaaaccgtatcatctgaagaggatccacagagctgtcttacgtggtaatctggagaaactgaagtaccttctgctcacgtattatgacgccaataagagagacaggaaggaaaggactgccctacatttggcctgtgccactggccaaccggaaatggtacatctcctggtgtccagaagatgtgagcttaacctctgcgaccgtgaagacaggacacctctgatcaaggctgtacaactgaggcaggaggcttgtgcaactcttctgctgcaaaatggcgccgatccaaatattacggatgtctttggaaggactgctctgcactacgctgtgtataatgaagatacatccatgatagaaaaacttctttcacatggtacaaatattgaagaatgcagcaagaatgaatatcagccactgttacttgctgtgagtcgaagaaaagtgaaaatggtggaatttttattaaagaaaaaagcaaatgtaaatgccattgattatcttggcagatcagccctcatacttgctgttactcttggagaaaaagatatagtcattcttcttctgcagcacaatattgatgtgttttctcgagatgtgtatggaaagcttgcagaagattatgccagtgaggctgagaatagagtcatttttgatctaatttatgaatacaaaagaaagagatatgaagatcttcctataaatagcaatccagtgtctcctcagaaacaacgagctgagaaggctacaagtgacgacaaagattctgtttcaaatatagccacagaaataaaggagggacctatatctgggacagtgtcttctcagaaacaaccagctgagaaggctacaagtgacgagaaagattctgtttcaaatatagccacagaaataaaggagggacaacaatctgggacagtgtctcctcagaaacaatcggcccagaaggttatatttaaaaagaaagtttctcttttgaatattgccacaagaataatgggcggtgggaaatctggaacagtgtcttctcagaaacaaccagcctcaaagactgcaagtgacaagacagattctgctttgaatacagctacagaaataaaggatggactacaatgtgggacagtgtcttctcagaaacaacaagccttgaaggctacaactgacgaggaaggttctgtttctaatatagccacagaaataaaggatggagaaaaatctgggacagtgtcttctcagaaaaaaccagccttgaaggccacaagtgatgagaaagattctttttcgaatataaccagagaaaaaaaggatggagaaatatctaggacagtgtcttctcagaaaccaccagccttgaaggctacaagtgtcaaggaagattctgttttgaatatagccagagaaaaaaaggatggagaaaaatctaggacagtgtcttttgagcaaccaccaggcttgaaggctacaagagacgagaaagattctcttttgaatatagccagaggaaaaaaagatggagaaaaaactaggagagtgtcttctcataaacaaccatccttgaaggctacaagtgacaaggaagattctgttccgaatatggccacagaaacaaaggatgaacaaatatctgggacagtgtcttgtcagaaacaaccagccttgaaggctacaagtgacaagaaagattctgtttcgaatatacccacagaaataaaggatggacaacaatctggaacagtgtcttctcagaaacaaccggcctggaaggctacaagtgtcaagaaagattctgtttcgaatatagccacagaaataaaggatggacaaatacgtgggacagtgtcttctcagagacgaccagccttgaagactacaggtgatgagaaagattctgtttcgaatatagccagagaaataaaggatggagaaaaatctgggacagtgtctcctcagaaacaatcggcccagaaggttatatttaaaaagaaagtttctcttttgaatattgccacaagaataacgggcggtgggaaatctggaacagagtatcctgagaatctgcgcaccttgaaggctacaattgaaaataaagattctgttctgaatacagccaccaaaatgaaggaggtacaaacatccacaccagcagaacaagacttagaaatggcatcagagggagagcaaaagaggcttgaagaatatgaaaataaccagccacaggtgaaaaaccaaatacattctagggatgaccttgatgacataattcagtcatctcaaacagtctcagaggacggtgactcgctttgctgtaattgtaagaatgtcatattactcattgatcaacatgaaatgaagtgtaaagattgtgttcacctattgaaaattaaaaatacattttgtttatggaaaagattaataaaacttaaagataaccactgtgagcaacttagagtaaaaattcgaaaactgaaaaataaggctagtgtactacaaaagagaatatctgaaaaagaagaaataaaatcgcagttaaagcatgaaatacttgaattggaaaaagaactctgtagtttgagatttgccatacagcaagaaaaaaagaaaagaagaaatgttgaagagttgcaccaaaaagttagggaaaagttaagaataacagaagagcaatataggatagaagctgatgtgacaaaaccaattaaaccggctctcaaatcagcagaggtggaattgaagacaggaggaaataattcaaatcaggtttctgaaactgatgaaaaagaagacctgctgcatgaaaaccgcttgatgcaagatgaaattgccaggctcaggctggaaaaagacacaataaaaaaccaaaacctggaaaagaaatacttaaaagactttgaaattgtgaaaagaaagcatgaagaccttcaaaaggctctaaaacggaatggggaaacattagcaaaaacgatagcctgttatagtggacagcttgctgctctgacagatgaaaacacaacgctccgttccaaactggagaagcaaagagagagcaggcaaagactggaaacagaaatgcaatcataccgttgtagactgaatgctgctcgatgtgatcatgatcaaagtcactcatcaaaaagagaccaagagcttgctttccagggcacagtagataaatgtcgtcacttacaggaaaatttgaattctcatgttctgattctttctctgcaactttctaaagctgagagtaagtccagagtcctcaaaactgagctccattacacaggagaggctctgaaagaaaaggctttggtttttgaacacgtgcaaagtgagctaaagcaaaaacagagtcaaatgaaggacattgaaaaaatgtacaaaagtggatacaatacaatggaaaaatgcatagaaaaacaggaaagattttgtcaactaaaaaaacaaaatatgttgcttcaacagcaactggatgatgctcgcaacaaagctgacaatcaagaaaaagcaatacttaatattcaagccagatgtgatgctagagtacaaaaccttcaagctgagtgcagaaagcaccgtcttttactagaagaagacaataaaatgttggtcaatgaactgaatcattcgaaagaaaaagaatgccaatatgaaaaagagaaagcagaaagagaagtagctgtgagacagcttcaacaaaaacgagatgatgtcttaaacaaaggatcagcaacaaaagctctgctggatgcttcatcgcgtcactgcacctatttagaaaatgggatgcaggattcaaggaagaaattagaccagatgagaagtcaatttcaagaaatacaggatcaacttacagctactataagatgtactaaggagatggaaggcgacacacaaaagcttgaagtagaacatgtgatgatgagaaaaattattaaaaaacaggatgaccaaattgagcggcttgagaaaatcctgcagcattcaagtttgatgctgcaggtgtttgagagctagatgaagatatggacatttctggaattaagagccccctctacattgagcacaagacagtgacgaatccacattcttcagccagaaagtcacctctgagagccaaatgtctgactatagaaaggagagtcaaagaatgataacgacatctcaggaaaattgtgaaaataatcagcagccggatgtggataaccctttcaaa

SEQ ID NO: 107695 - DNA, 1169 bp, Homo sapiens
  Payload ID: 1142
  Gene Symbol: ANKRD36B
  Gene Name: ankyrin repeat domain 36B
  ENST ID: ENST00000419390
  CDS Start-End: 131-646
acagactgctttgcctgttgttgctcttcggaggcggcgatccccgaaggcgagctgaaatacggctgcaggctacaatttgcagccgacgattaaggaagacgacgagcgggagaggtggcccaccctcatggagcgcttgtgctcggatggcttcgcatttccccattactacattaaaccgtatcatctgaagaggatccacagagctgtcttacgtggtaatctggagaaactgaagtaccttctgctcacgtattatgacgccaataagagagacaggaaggaaaggactgccctacatttggcctgtgccactggccaaccggaaatggtacatctcctggtgtccagaagatgtgagcttaacctctgcgaccgtgaagacaggacacctctgatcaaggctgtacaactgaggcaggaggcttgtgcaactcttctgctgcaaaatggcgccgatccaaatattacggatgtctttggaaggactgctctgcactacgctgtgtataatgaagatacatccatgatagaaaaacttctttcacatggtacaaatattgaagaatgcagcaagtgtctcctcagaaacaacgagctgagaaggctacaagtgacgacaaagattctgtttcaaatatagccacagaaataaaggagggacctatatctgggacagtgtcttctcagaaacaaccagctgagaaggctacaagtgacgagaaagattctgtttcaaatatagccacagaaataaaggagggacaacaatctgggacagtgtctcctcagaaacaatcggcccagaaggttatatttaaaaagaaagtttctcttttgaatattgccacaagaataatgggcggtgggaaatctggaacagtgtcttctcagaaacaaccagcctcaaagactgcaagtgacaagacagattctgctttgaatacagctacagaaataaaggatggactacaatgtgggacagtgtcttctcagaaacaacaagccttgaaggctacaactgacgaggaaggttctgtttctaatatagccacagaaataaaggatggagaaaaatctgggacagtgtcttctcagaaaaaaccagccttgaaggccacaagtgatgagaaagattctttttcgaatataaccagagaaaaaaa

SEQ ID NO: 107696 - DNA, 5986 bp, Homo sapiens
  Payload ID: 1142
  Gene Symbol: ANKRD36B
  Gene Name: ankyrin repeat domain 36B
  Uniprot ID: Q8N2N9
  ENST ID: ENST00000258459
  CDS Start-End: 281-4342
gggcgcgcgagagctgctagggcggtttctctgcctcgggcctgttgggcagggccggctaaggtgcgcgtgctcgctggttctaacccttctgttgggcgtttctgcggagaggcgggaggcgctgagagtctgcgcggaggtccgtgcacagactgctttgcctgttgttgctcttcggaggcggcgatccccgaaggcgagctgaaatacggctgcaggctacaatttgcagccgacgattaaggaagacgacgagcgggagaggtggcccaccctcatggagcgcttgtgctcggatggcttcgcatttccccattactacattaaaccgtatcatctgaagaggatccacagagctgtcttacgtggtaatctggagaaactgaagtaccttctgctcacgtattatgacgccaataagagagacaggaaggaaaggactgccctacatttggcctgtgccactggccaaccggaaatggtacatctcctggtgtccagaagatgtgagcttaacctctgcgaccgtgaagacaggacacctctgatcaaggctgtacaactgaggcaggaggcttgtgcaactcttctgctgcaaaatggcgccgatccaaatattacggatgtctttggaaggactgctctgcactacgctgtgtataatgaagatacatccatgatagaaaaacttctttcacatggtacaaatattgaagaatgcagcaagaatgaatatcagccactgttacttgctgtgagtcgaagaaaagtgaaaatggtggaatttttattaaagaaaaaagcaaatgtaaatgccattgattatcttggcagatcagccctcatacttgctgttactcttggagaaaaagatatagtcattcttcttctgcagcacaatattgatgtgttttctcgagatgtgtatggaaagcttgcagaagattatgccagtgaggctgagaatagagtcatttttgatctaatttatgaatacaaaagaaagagatatgaagatcttcctataaatagcaatccagtgtctcctcagaaacaacgagctgagaaggctacaagtgacgacaaagattctgtttcaaatatagccacagaaataaaggagggacctatatctgggacagtgtcttctcagaaacaaccagctgagaaggctacaagtgacgagaaagattctgtttcaaatatagccacagaaataaaggagggacaacaatctgggacagtgtctcctcagaaacaatcggcccagaaggttatatttaaaaagaaagtttctcttttgaatattgccacaagaataatgggcggtgggaaatctggaacagtgtcttctcagaaacaaccagcctcaaagactgcaagtgacaagacagattctgctttgaatacagctacagaaataaaggatggactacaatgtgggacagtgtcttctcagaaacaacaagccttgaaggctacaactgacgaggaaggttctgtttctaatatagccacagaaataaaggatggagaaaaatctgggacagtgtcttctcagaaaaaaccagccttgaaggccacaagtgatgagaaagattctttttcgaatataaccagagaaaaaaaggatggagaaatatctaggacagtgtcttctcagaaaccaccagccttgaaggctacaagtgtcaaggaagattctgttttgaatatagccagagaaaaaaaggatggagaaaaatctaggacagtgtcttttgagcaaccaccaggcttgaaggctacaagagacgagaaagattctcttttgaatatagccagaggaaaaaaagatggagaaaaaactaggagagtgtcttctcataaacaaccatccttgaaggctacaagtgacaaggaagattctgttccgaatatggccacagaaacaaaggatgaacaaatatctgggacagtgtcttgtcagaaacaaccagccttgaaggctacaagtgacaagaaagattctgtttcgaatatacccacagaaataaaggatggacaacaatctggaacagtgtcttctcagaaacaaccggcctggaaggctacaagtgtcaagaaagattctgtttcgaatatagccacagaaataaaggatggacaaatacgtgggacagtgtcttctcagagacgaccagccttgaagactacaggtgatgagaaagattctgtttcgaatatagccagagaaataaaggatggagaaaaatctgggacagtgtctcctcagaaacaatcggcccagaaggttatatttaaaaagaaagtttctcttttgaatattgccacaagaataacgggcggtgggaaatctggaacagagtatcctgagaatctgcgcaccttgaaggctacaattgaaaataaagattctgttctgaatacagccaccaaaatgaaggaggtacaaacatccacaccagcagaacaagacttagaaatggcatcagagggagagcaaaagaggcttgaagaatatgaaaataaccagccacaggtgaaaaaccaaatacattctagggatgaccttgatgacataattcagtcatctcaaacagtctcagaggacggtgactcgctttgctgtaattgtaagaatgtcatattactcattgatcaacatgaaatgaagtgtaaagattgtgttcacctattgaaaattaaaaatacattttgtttatggaaaagattaataaaacttaaagataaccactgtgagcaacttagagtaaaaattcgaaaactgaaaaataaggctagtgtactacaaaagagaatatctgaaaaagaagaaataaaatcgcagttaaagcatgaaatacttgaattggaaaaagaactctgtagtttgagatttgccatacagcaagaaaaaaagaaaagaagaaatgttgaagagttgcaccaaaaagttagggaaaagttaagaataacagaagagcaatataggatagaagctgatgtgacaaaaccaattaaaccggctctcaaatcagcagaggtggaattgaagacaggaggaaataattcaaatcaggtttctgaaactgatgaaaaagaagacctgctgcatgaaaaccgcttgatgcaagatgaaattgccaggctcaggctggaaaaagacacaataaaaaaccaaaacctggaaaagaaatacttaaaagactttgaaattgtgaaaagaaagcatgaagaccttcaaaaggctctaaaacggaatggggaaacattagcaaaaacgatagcctgttatagtggacagcttgctgctctgacagatgaaaacacaacgctccgttccaaactggagaagcaaagagagagcaggcaaagactggaaacagaaatgcaatcataccgttgtagactgaatgctgctcgatgtgatcatgatcaaagtcactcatcaaaaagagaccaagagcttgctttccagggcacagtagataaatgtcgtcacttacaggaaaatttgaattctcatgttctgattctttctctgcaactttctaaagctgagagtaagtccagagtcctcaaaactgagctccattacacaggagaggctctgaaagaaaaggctttggtttttgaacacgtgcaaagtgagctaaagcaaaaacagagtcaaatgaaggacattgaaaaaatgtacaaaagtggatacaatacaatggaaaaatgcatagaaaaacaggaaagattttgtcaactaaaaaaacaaaatatgttgcttcaacagcaactggatgatgctcgcaacaaagctgacaatcaagaaaaagcaatacttaatattcaagccagatgtgatgctagagtacaaaaccttcaagctgagtgcagaaagcaccgtcttttactagaagaagacaataaaatgttggtcaatgaactgaatcattcgaaagaaaaagaatgccaatatgaaaaagagaaagcagaaagagaagtagctgtgagacagcttcaacaaaaacgagatgatgtcttaaacaaaggatcagcaacaaaagctctgctggatgcttcatcgcgtcactgcacctatttagaaaatgggatgcaggattcaaggaagaaattagaccagatgagaagtcaatttcaagaaatacaggatcaacttacagctactataagatgtactaaggagatggaaggcgacacacaaaagcttgaagtagaacatgtgatgatgagaaaaattattaaaaaacaggatgaccaaattgagcggcttgagaaaatcctgcagcattcaagtttgatgctgcaggtgtttgagagctagatgaagcatccagccaaactagactacatggagctccacagtgatcgtcttcacctccagctgtttgcatttacttcttccctctatcctacatgtgttttccttccccttcagatatcaacctatgaattgcctctaccaaaaagcctacaatattgacacaaacctgggctagtatcccttctatgtcttccaataagtgctgtcttatgcttgtcattgtatgtatgactctgtatgggaattgcctgtttgttttttcagattatagcatacagttgttgaggggcggaccgtatcatctttatcttgtaattccagtgcttgtcctagtaccttagcacatggttgctgaatacatgaacgaagagtgagaaaccagaagctctgatacttaactgccatgataatgaattcggtgtgcaactatgggcaaattatatttaatagtaattgcatattgtacatatttttcattcttattaacactgataagcttttcagcatatactgactttctcttagttaactgtgaaatcatttagataaagaatataattctttttcattctaacttctgaatttaaatctgaatcctctatagcaggggtccccaactcccaggccacacacagttccatgacctgttaggaagcaggctgcacagcaggaggtgagtggcaggcaagcgagtgaagcttcatctgtatttccagccactccctgttgctcacattatcacctgagctctgcctcctgtcagatcagcaaagccattagattctcacaggagtgaaaatcctactgtgaactgctcgttcaagggatctaggtcacatgctccttatgagactctaatgcctgatgatatgtcattgtctcctatctcttcacgatgggaccatctagttacagaaaaacaagctcaggactcccattgattctccattatgatgagttgtgtaattatttcattatgtattacaatgtagtcataataggaataaagtgcacaatagatgtaatacgcttgaatcaccatcctgaaaccatcccccaaacccccatctgtggaaaaattatctttcacaaaactgctgcctggtgccaaaaaggctggggactgctgctctatagcttctgcactagaatctactaatgagtaaaatttaaatcaataactagttttaaaagcataacaagaatatgtgctgtctggctgcagtggctcatgcctgtattctcagcactttgggaggccagtgcaggtggatcacttgaggtcaggagttcaagaccagcctggccaatatggtgaaatcctgtctctactaaaaatacaaaaattagctgggtgtggtggtgcatgcctgtagtctcagctactcgggaggctgaggtgggagaatcacttgaacccgggaggcagaggtttcagtgagccaagatcgtgccactgcactccagcctgagcaacagagtgactccatctcaaatgcaaaacaaaacagaaagaatacatgctgacgaaaaaaatctaagacaataaaattgtattactaggctgttaacatgatattttgtttcccgttaaatgtgtgacatgcaaaagtatttattaaatgaaaatattttttatctttt

SEQ ID NO: 107697 - DNA, 649 bp, Homo sapiens
  Payload ID: 1142
  Gene Symbol: ANKRD36B
  Gene Name: ankyrin repeat domain 36B
  ENST ID: ENST00000497329
  CDS Start-End: 41-454
gtgcagaaagcaccgtcttttactagaagaagacaataaaatgttggtcaatgaactgaatcattcgaaagaaaaagaatgccaatatgaaaaagagaaagcagaaagagaagtagctgtgagacagcttcaacaaaaacgagatgatgtcttaaacaaaggatcagcaacaaaagctctgctggatgcttcatcgcgtcactgcacctatttagaaaatgggatgcaggattcaaggaagaaattagaccagatgagaagtcaatttcaagaaatacaggatcaacttacagctactataagatgtactaaggagatggaaggcgacacacaaaagcttgaagtagaacatgtgatgatgagaaaaattattaaaaaacaggatgaccaaattgagcggcttgagaaaatcctgcagcattcaagtttgatgctgcaggtgtttgagagctagatgaagatatggacatttctggaattaagagccccctctacattgagcacaagacagtgacgaatccacattcttcagccagaaagtcacctctgagagccaaatgtctgactatagaaaggagagtcaaagaatgataacgacatctcaggaaaattgtgaaaataatcagcagccggatgtggataacccttt

SEQ ID NO: 107698 - DNA, 1661 bp, Homo sapiens
  Payload ID: 1142
  Gene Symbol: ANKRD36B
  Gene Name: ankyrin repeat domain 36B
  Uniprot ID: Q8N2N9
  ENST ID: ENST00000443455
  CDS Start-End: 180-899
tttctgcggagaggcgggaggcgctgagagtctgcgcggaggtccgtgcacagactgctttgcctgttgttgctcttcggaggcggcgatccccgaaggcgagctgaaatacggctgcaggctacaatttgcagccgacgattaaggaagacgacgagcgggagaggtggcccaccctcatggagcgcttgtgctcggatggcttcgcatttccccattactacattaaaccgtatcatctgaagaggatccacagagctgtcttacgtggtaatctggagaaactgaagtaccttctgctcacgtattatgacgccaataagagagacaggaaggaaaggactgccctacatttggcctgtgccactggccaaccggaaatggtacatctcctggtgtccagaagatgtgagcttaacctctgcgaccgtgaagacaggacacctctgatcaaggctgtacaactgaggcaggaggcttgtgcaactcttctgctgcaaaatggcgccgatccaaatattacggatgtctttggaaggactgctctgcactacgctgtgtataatgaagatacatccatgatagaaaaacttctttcacatggtacaaatattgaagaatgcagcaagaatgaatatcagccactgttacttgctgtgagtcgaagaaaagtgaaaatggtggaatttttattaaagaaaaaagcaaatgtaaatgccattgattatcttggcagatcagccctcatacttgctgttactcttggagaaaaagatatagtcattcttcttctgcagcacaatattgatgtgttttctcgagatgtgtatggaaagcttgcagaagattatgccagtgaggctgagaatagagttgtctcctcagaaacaacgagctgagaaggctacaagtgacgacaaagattctgtttcaaatatagccacagaaataaaggagggacctatatctgggacagtgtcttctcagaaacaaccagctgagaaggctacaagtgacgagaaagattctgtttcaaatatagccacagaaataaaggagggacaacaatctgggacagtgtctcctcagaaacaatcggcccagaaggttatatttaaaaagaaagtttctcttttgaatattgccacaagaataatgggcggtgggaaatctggaacagtgtcttctcagaaacaaccagcctcaaagactgcaagtgacaagacagattctgctttgaatacagctacagaaataaaggatggactacaatgtgggacagtgtcttctcagaaacaacaagccttgaaggctacaactgacgaggaaggttctgtttctaatatagccacagaaataaaggatggagaaaaatctgggacagtgtcttctcagaaaaaaccagccttgaaggccacaagtgatgagaaagattctttttcgaatataaccagagaaaaaaaggatggagaaatatctaggacagtgtcttctcagaaaccaccagccttgaaggctacaagtgtcaaggaagattctgttttgaatatagccagagaaaaaaaggatggagaaaaatctaggacagtgtcttttgagcaaccaccaggcttgaaggctacaagagacgagaaagattctcttttgaatatagccagagg

SEQ ID NO: 107699 - DNA, 6067 bp, Homo sapiens
  Payload ID: 1142
  Gene Symbol: ANKRD36B
  Gene Name: ankyrin repeat domain 36B
  ENST ID: ENST00000438709
  CDS Start-End: 1325-4423
gggcgcgcgagagctgctagggcggtttctctgcctcgggcctgttgggcagggccggctaaggtgcgcgtgctcgctggttctaacccttctgttgggcgtttctgcggagaggcgggaggcgctgagagtctgcgcggaggtccgtgcacagactgctttgcctgttgttgctcttcggaggcggcgatccccgaaggcgagctgaaatacggctgcaggctacaatttgcagccgacgattaaggaagacgacgagcgggagaggtggcccaccctcatggagcgcttgtgctcggatggcttcgcatttccccattactacattaaaccgtatcatctgaagaggatccacagagctgtcttacgtggtaatctggagaaactgaagtaccttctgctcacgtattatgacgccaataagagagacaggaaggaaaggactgccctacatttggcctgtgccactggccaaccggaaatggtacatctcctggtgtccagaagatgtgagcttaacctctgcgaccgtgaagacaggacacctctgatcaaggctgtacaactgaggcaggaggcttgtgcaactcttctgctgcaaaatggcgccgatccaaatattacggatgtctttggaaggactgctctgcactacgctgtgtataatgaagatacatccatgatagaaaaacttctttcacatggtacaaatattgaagaatgcagcaagaatgaatatcagccactgttacttgctgtgagtcgaagaaaagtgaaaatggtggaatttttattaaagaaaaaagcaaatgtaaatgccattgattatcttggcagatcagccctcatacttgctgttactcttggagaaaaagatatagtcattcttcttctgcagcacaatattgatgtgttttctcgagatgtgtatggaaagcttgcagaagattatgccagtgaggctgagaatagagtcatttttgatctaatttatgaatacaaaagaaagagatatgaagatcttcctataaatagcaatccagtgtctcctcagaaacaacgagctgagaaggctacaagtgacgacaaagattctgtttcaaatatagccacagaaataaaggagggacctatatctgggacagtgtcttctcagaaacaaccagctgagaaggctacaagtgacgagaaagattctgtttcaaatatagccacagaaataaaggagggacaacaatctgggacagtgtctcctcagaaacaatcggcccagaaggttatatttaaaaagaaagtttctcttttgaatattgccacaagaataatgggcggtgggaaatctggaacagtgtcttctcagaaacaaccagcctcaaagactgcaagtgacaagacagattctgctttgaatacagctacagaaataaaggatggactacaatgtgggacagtgtcttctcagaaacaacaagccttgaaggctacaactgacgaggaaggttctgtttctaatatagccacagaaataaaggatggagaaaaatctgggacagtgtcttctcagaaaaaaccagccttgaaggccacaagtgatgagaaagattctttttcgaatataaccagagaaaaaaaggatggagaaatatctaggacagtgtcttctcagaaaccaccagccttgaaggctacaagtgtcaaggaagattctgttttgaatatagccagagaaaaaaaggatggagaaaaatctaggacagtgtcttttgagcaaccaccaggcttgaaggctacaagagacgagaaagattctcttttgaatatagccagaggaaaaaaagatggagaaaaaactaggagagtccgggtagataagaaattctcttccctgaataaatctgcggggggctcgttgaagctgcacattctgattcagcataagggtggaaggagaaagagaggaatgtcttctcataaacaaccatccttgaaggctacaagtgacaaggaagattctgttccgaatatggccacagaaacaaaggatgaacaaatatctgggacagtgtcttgtcagaaacaaccagccttgaaggctacaagtgacaagaaagattctgtttcgaatatacccacagaaataaaggatggacaacaatctggaacagtgtcttctcagaaacaaccggcctggaaggctacaagtgtcaagaaagattctgtttcgaatatagccacagaaataaaggatggacaaatacgtgggacaggtattttggaatacacctttaatgtaatgttcgatcaaatagaagagaaattcacttccccaaataaatcagcggggggtgtgtctcctcagaaacaatcggcccagaaggttatatttaaaaagaaagtttctcttttgaatattgccacaagaataacgggcggtgggaaatctggaacagagtatcctgagaatctgcgcaccttgaaggctacaattgaaaataaagattctgttctgaatacagccaccaaaatgaaggaggtacaaacatccacaccagcagaacaagacttagaaatggcatcagagggagagcaaaagaggcttgaagaatatgaaaataaccagccacaggtgaaaaaccaaatacattctagggatgaccttgatgacataattcagtcatctcaaacagtctcagaggacggtgactcgctttgctgtaattgtaagaatgtcatattactcattgatcaacatgaaatgaagtgtaaagattgtgttcacctattgaaaattaaaaatacattttgtttatggaaaagattaataaaacttaaagataaccactgtgagcaacttagagtaaaaattcgaaaactgaaaaataaggctagtgtactacaaaagagaatatctgaaaaagaagaaataaaatcgcagttaaagcatgaaatacttgaattggaaaaagaactctgtagtttgagatttgccatacagcaagaaaaaaagaaaagaagaaatgttgaagagttgcaccaaaaagttagggaaaagttaagaataacagaagagcaatataggatagaagctgatgtgacaaaaccaattaaaccggctctcaaatcagcagaggtggaattgaagacaggaggaaataattcaaatcaggtttctgaaactgatgaaaaagaagacctgctgcatgaaaaccgcttgatgcaagatgaaattgccaggctcaggctggaaaaagacacaataaaaaaccaaaacctggaaaagaaatacttaaaagactttgaaattgtgaaaagaaagcatgaagaccttcaaaaggctctaaaacggaatggggaaacattagcaaaaacgatagcctgttatagtggacagcttgctgctctgacagatgaaaacacaacgctccgttccaaactggagaagcaaagagagagcaggcaaagactggaaacagaaatgcaatcataccgttgtagactgaatgctgctcgatgtgatcatgatcaaagtcactcatcaaaaagagaccaagagcttgctttccagggcacagtagataaatgtcgtcacttacaggaaaatttgaattctcatgttctgattctttctctgcaactttctaaagctgagagtaagtccagagtcctcaaaactgagctccattacacaggagaggctctgaaagaaaaggctttggtttttgaacacgtgcaaagtgagctaaagcaaaaacagagtcaaatgaaggacattgaaaaaatgtacaaaagtggatacaatacaatggaaaaatgcatagaaaaacaggaaagattttgtcaactaaaaaaacaaaatatgttgcttcaacagcaactggatgatgctcgcaacaaagctgacaatcaagaaaaagcaatacttaatattcaagccagatgtgatgctagagtacaaaaccttcaagctgagtgcagaaagcaccgtcttttactagaagaagacaataaaatgttggtcaatgaactgaatcattcgaaagaaaaagaatgccaatatgaaaaagagaaagcagaaagagaagtagctgtgagacagcttcaacaaaaacgagatgatgtcttaaacaaaggatcagcaacaaaagctctgctggatgcttcatcgcgtcactgcacctatttagaaaatgggatgcaggattcaaggaagaaattagaccagatgagaagtcaatttcaagaaatacaggatcaacttacagctactataagatgtactaaggagatggaaggcgacacacaaaagcttgaagtagaacatgtgatgatgagaaaaattattaaaaaacaggatgaccaaattgagcggcttgagaaaatcctgcagcattcaagtttgatgctgcaggtgtttgagagctagatgaagcatccagccaaactagactacatggagctccacagtgatcgtcttcacctccagctgtttgcatttacttcttccctctatcctacatgtgttttccttccccttcagatatcaacctatgaattgcctctaccaaaaagcctacaatattgacacaaacctgggctagtatcccttctatgtcttccaataagtgctgtcttatgcttgtcattgtatgtatgactctgtatgggaattgcctgtttgttttttcagattatagcatacagttgttgaggggcggaccgtatcatctttatcttgtaattccagtgcttgtcctagtaccttagcacatggttgctgaatacatgaacgaagagtgagaaaccagaagctctgatacttaactgccatgataatgaattcggtgtgcaactatgggcaaattatatttaatagtaattgcatattgtacatatttttcattcttattaacactgataagcttttcagcatatactgactttctcttagttaactgtgaaatcatttagataaagaatataattctttttcattctaacttctgaatttaaatctgaatcctctatagcaggggtccccaactcccaggccacacacagttccatgacctgttaggaagcaggctgcacagcaggaggtgagtggcaggcaagcgagtgaagcttcatctgtatttccagccactccctgttgctcacattatcacctgagctctgcctcctgtcagatcagcaaagccattagattctcacaggagtgaaaatcctactgtgaactgctcgttcaagggatctaggtcacatgctccttatgagactctaatgcctgatgatatgtcattgtctcctatctcttcacgatgggaccatctagttacagaaaaacaagctcaggactcccattgattctccattatgatgagttgtgtaattatttcattatgtattacaatgtagtcataataggaataaagtgcacaatagatgtaatacgcttgaatcaccatcctgaaaccatcccccaaacccccatctgtggaaaaattatctttcacaaaactgctgcctggtgccaaaaaggctggggactgctgctctatagcttctgcactagaatctactaatgagtaaaatttaaatcaataactagttttaaaagcataacaagaatatgtgctgtctggctgcagtggctcatgcctgtattctcagcactttgggaggccagtgcaggtggatcacttgaggtcaggagttcaagaccagcctggccaatatggtgaaatcctgtctctactaaaaatacaaaaattagctgggtgtggtggtgcatgcctgtagtctcagctactcgggaggctgaggtgggagaatcacttgaacccgggaggcagaggtttcagtgagccaagatcgtgccactgcactccagcctgagcaacagagtgactccatctcaaatgcaaaacaaaacagaaagaatacatgctgacgaaaaaaatctaagacaataaaattgtattactaggctgttaacatgatattttgtttcccgttaaatgtgtgacatgcaaaagtatttattaaatgaaaatattttttatctttt

SEQ ID NO: 107700 - DNA, 2272 bp, Homo sapiens
  Payload ID: 1143
  Gene Symbol: ANKRD36C
  Gene Name: ankyrin repeat domain 36C
  Uniprot ID: Q5JPF3
  ENST ID: ENST00000295246
  CDS Start-End: 206-2062
tagatgctgcatgtggcattgacaaaacagaaaatggaaccttgtttgaagaccaaaatgttgataaggaaggaaaagcactaccagcaactggacaaaaagcaaatgtgtctcctgagcaaccgcctttattcacgaatcttctgagcgacctcctttatccacgcttactctgaaagaggcagatcccagttcaaaagcagccatgagaaggaaggattcaccacctccaggaaaagtgtcttctcagaaacaaccagctgagaaggctacaagtgacgacaaagattctgtttcaaatatagccacagaaataaaggagggaccaatatctgggacagtgtcttctcagaaacaaccagctgagaaggctacaagtgatgagaaagattctgtttcaaatatagccacagaaataaaggagggacaacaatctgggacagtgtctcctcagaaacaatcagcctggaaggttatatttaaaaagaaagtttctcttttgaatattgccacaagaataacgggcggtgggaaatctggaacagtgtcttctcagaaacaaccaccctcaaaggctacaagtgacaagacagattctgctttgaatatagctacagaaataaaggatggactacaatgtgggacagtgtcttctcagaaacaaccagccttgaaggctacaactgacgaggaagattctgtttcgaatatagccacagaaataaaggatggagaaaaatctgggacagtgtcttctcagaaacaaccagccttgaaggctacaactgacgaggaagattctgtttcgattatagccacagaaataaaggacggagaaaaatctgggacagtgtcttctcggaaaaaaccagccttgaaggctacaagtgatgagaaagattctttttcgaatataaccagagaaaaaaaggatggagaaatatctaggacagtgacttctgagaaaccagcaggcttgaaggctacaagtgacgaggaagattctgttttgaatatagccagaggaaaagaggatggagaaaaaactaggagagtgtcttctcggaaaaaaccagccttgaaggctacaagtgatgagaaagattctttttcgaatataaccagagaaaaaaaggatggagaaacatctaggacagtgtcttctcagaaaccaccagccttgaaggctacaagtgacgaggaagattctgttttgaatatagccagagaaaaaaaggatggagaaaaatctagaacagtgtcttctgagaaaccatcaggcttgaaggctacaagtgacgagaaagattctgttttgaatatagccagaggaaaaaagcatggagaaaaaactaggagagtgtcttctcataaacaaccagccttgaaggctacaagtgacaaggaaaattctgttccgaatatggccacagaaacaaaggatgaacaaatatctgggacagtgtcttctcagaaacaaccagccttgaaggctacaagtgacaagaaagattctgtttcgaatatacccacagaaataaaggatggacaacaatctggaacagtgtcttctcagaaacaactggcctggaaggctacaagtgtcaagaaagattctgtttcgaatatagccacagagataaaggatggacaaatacgtgggacagtgtcttctcagagacaaccagccttgaaggctacaggtgatgagaaagattctgtttcgaatatagccagagaaataaaggatggagaaaaatctgggacagtgtctcctcagaaacaatcggcccagaaggttatatttaaaaagaaagtttctcttttgaatattgccacaagaataacgggcggttggaaatctggaacagagtatcctgagaatctgcccaccttgaaggctacaattgaaaataaaaattctgttctgaatacagccaccaaaatgaaagatgtacaaacatccacaccagaacaagacttagaaatggcatcagagggagagcaaaagaggcttgaagaatatgaaaataaccagccacagattgtgttcacctattgaaaattaaaaagacattttgtttatgtaaaagattaacagaacttaaagataatcactgtgagcaacttagagtaaaaattcgaaaactgaaaaataaggctagtgtactacaaaagagactatctgaaaaagaagaaataaaatcgcagttaaagcatgaaacacttgaattggaaaaagaactctgtagtttgagatttgccatacagc

SEQ ID NO: 107701 - DNA, 5428 bp, Homo sapiens
  Payload ID: 1143
  Gene Symbol: ANKRD36C
  Gene Name: ankyrin repeat domain 36C
  Uniprot ID: Q5JPF3
  ENST ID: ENST00000456556
  CDS Start-End: 86-5422
tttgcctgttgttgctcttcggaggcggcgatccccgaaggcgagctgaaatacggctgcaggctacaatttgcagccgaccattatggatgacaaggagccgaagaggtggcccaccctcagggaccgcttgtgctcggatggcttcttatttccccaataccccattaaaccgtatcatctgaaggggatccacagagctgtcttctatcgtgatctggaggaactgaagttcgttctgctcacgcgttatgacatcaataagagagacaggaaggaaaggaccgccctacatttggcctgtgccactggccaaccggaaatggtacatctcctggtgtccagaagatgtgagcttaacctctgcgaccgtgaagacaggacacctctgatcaaggctgtacaactgaggcaggaggcttgtgcaactcttctgctgcaaaatggcgccgatccaaatattacggatgtctttggaaggactgctctgcactacgctgtgtataatgaagatacatccatgatagaaaaacttctttcatatggtgcaaatattgaagaatgcagcgaggatgaatatccgccactgttccttgctgtgagtcaaagaaaagtgaaaatggtggaatttttattaaagaaaaaagcaaatataaatgccgttgattatcttggcagatcagccctcatacatgctgttactcttggagaaaaagatatagtcattcttcttctgcagcacaatattgatgtgttttctcgagatgtgtatggaaagcttgcagaagattatgccagcgaggctaagaacagagtcatttttgaactaatttatgaatatgaaagaaagaaacatgaagagctttctataaatagcaatccagtgtcttctcagaaacaaccagccttgaaggctacaagtggcaaggaagattctatctcgaatatagccacagaaataaaggatggacaaaaatctgggacagtgtcttctcagaaacaaccggccttgaagggtacaagtgacaagaacgattctgtttcgaacacagccacagaaataaaagatgaacaaaaatctgggacagtgtcttctcagaaacaaccggccttgaaggatacaagtgacaagaacgattctgtttcgaacacagccacagaaataaaagatgaacaaaaatctgggacagtgcttcctgctgttgaacagtgtttaaacaggagtctctacagaccggatgctgttgcacagcctgtgacagaggatgagtttgctttggaatctgagattatttcaaaactatacatcccaaagagaaagattatttctccacgatctatagaagatgtgcttcctcctgttgaagaggctgttgacaggtgtctctacctactggaccgttttgcacaggctgtgacaaaggataagtttgctttggaatctgagaatatttcagaaccatactttacaaacagaaggactatttctcaacaatctgcagaaaagttagatgctgcatgtggcattgacaaaacagaaaatggaaccttgtttgaagaccaaaatgttgataaggaaggaaaagcactaccagcaactggacaaaaagcaaatgtgtctcctgagcaaccgcctttattcacgcatacggtgaaagacagtgatcacatttcaactagattcttaggaagtatggattcactaacttccagtgaagaatcttctgagcgacctcctttatccacgcttactctgaaagaggcagatcccagttcaaaagcagccatgagaaggaaggattcaccacctccaggaaaagtgtcttctcagaaacaaccagctgagaaggctacaagtgacgacaaagattctgtttcaaatatagccacagaaataaaggagggaccaatatctgggacagtgtcttctcagaaacaaccagctgagaaggctacaagtgatgagaaagattctgtttcaaatatagccacagaaataaaggagggacaacaatctgggacagtgtctcctcagaaacaatcagcctggaaggttatatttaaaaagaaagtttctcttttgaatattgccacaagaataacgggcggtgggaaatctggaacagtgtcttctcagaaacaaccaccctcaaaggctacaagtgacaagacagattctgctttgaatatagctacagaaataaaggatggactacaatgtgggacagtgtcttctcagaaacaaccagccttgaaggctacaactgacgaggaagattctgtttcgaatatagccacagaaataaaggatggagaaaaatctgggacagtgtcttctcagaaacaaccagccttgaaggctacaactgacgaggaagattctgtttcgattatagccacagaaataaaggacggagaaaaatctgggacagtgtcttctcggaaaaaaccagccttgaaggctacaagtgatgagaaagattctttttcgaatataaccagagaaaaaaaggatggagaaatatctaggacagtgacttctgagaaaccagcaggcttgaaggctacaagtgacgaggaagattctgttttgaatatagccagaggaaaagaggatggagaaaaaactaggagagtgtcttctcggaaaaaaccagccttgaaggctacaagtgatgagaaagattctttttcgaatataaccagagaaaaaaaggatggagaaacatctaggacagtgtcttctcagaaaccaccagccttgaaggctacaagtgacgaggaagattctgttttgaatatagccagagaaaaaaaggatggagaaaaatctagaacagtgtcttctgagaaaccatcaggcttgaaggctacaagtgacgagaaagattctgttttgaatatagccagaggaaaaaagcatggagaaaaaactaggagagtgtcttctcataaacaaccagccttgaaggctacaagtgacaaggaaaattctgttccgaatatggccacagaaacaaaggatgaacaaatatctgggacagtgtcttctcagaaacaaccagccttgaaggctacaagtgacaagaaagattctgtttcgaatatacccacagaaataaaggatggacaacaatctggaacagtgtcttctcagaaacaactggcctggaaggctacaagtgtcaagaaagattctgtttcgaatatagccacagagataaaggatggacaaatacgtgggacagtgtcttctcagagacaaccagccttgaaggctacaggtgatgagaaagattctgtttcgaatatagccagagaaataaaggatggagaaaaatctgggacagtgtctcctcagaaacaatcggcccagaaggttatatttaaaaagaaagtttctcttttgaatattgccacaagaataacgggcggttggaaatctggaacagagtatcctgagaatctgcccaccttgaaggctacaattgaaaataaaaattctgttctgaatacagccaccaaaatgaaagatgtacaaacatccacaccagaacaagacttagaaatggcatcagagggagagcaaaagaggcttgaagaatatgaaaataaccagccacaggtgaaaaaccaaatacattctagggatgaccttgatgacataattcagtcatctcaaacagtctcagaggacggtgactcgctttgctgtaattgtaagaatgtcatattactcattgatcaacatgaaatgaagtgtaaagattgtgttcacctattgaaaattaaaaagacattttgtttatgtaaaagattaacagaacttaaagataatcactgtgagcaacttagagtaaaaattcgaaaactgaaaaataaggctagtgtactacaaaagagactatctgaaaaagaagaaataaaatcgcagttaaagcatgaaacacttgaattggaaaaagaactctgtagtttgagatttgccatacagcaagaaaaaaagaaaagaagaaatgttgaagagttgcaccaaaaagttagggaaaagttaagaatcacagaagagcaatataggatagaagctgatgtgacaaaaccaattaaaccggctctcaaatcagcagaggtggaattgaagacaggaggaaataattcaaatcaggtttctgaaactgatgaaaaagaagacctgctgcatgaaaaccgcttgatgcaagatgaaattgccaggctcaggctggaaaaagacacaataaaaaaccaaaacctggaaaagaaatacttaaaagactttgaaattgtgaaaagaaagcatgaagaccttcaaaaggctctaaaacggaatgaggaaacattagcagaaacgatagcctgttatagtggacagcttgctgctctgacggatgaaaacacaacgctccgttctaaactggagaagcaaagagagagcgggcaaagactggaaacagaaatgcaatcataccgttgtagactgaatgctgctctatgtgatcatgatcaaagtcactcatcaaaaagagaccaagagcttgctttccagggcacagtagataaatgttgtcatttacaggaaaatttgaattctcatgttctgattctttctctgcaactttctaaagctgagagtaagttcagagtcctcgaaactgagctccattacacaggagaggctctgaaagaaaaggctttggtttttgaacacgtgcaaagtgagctaaagcaaaaacagagtcaaatgaaggacattgaaaaaatgtacaaaagtggatacaatacaatggaaaaatgcatagaaaagcaggaaagattttgtcaactaaaaaaacaaaatatgttgcttcaacagcaactggatgatgctcgcaacaaagctgacaatcaagaaaaagcaatacttaatattcaagccagatgtgatgctagagtagaaaaccttcaagctgagtgcagaaagcaccgtctcttactagaagaagacaataaaatgttggtgaatgaattgaatcattcgaaagaaaaaaaatgccaatatgaaaaagagaaagcagaaagagaagtagctgtgagacagcttcaacaaaaacaagatgatgtcttaaacaaacgatcagcaacaaaagctttgctggatgcttcatcgcgtcactgcatctatttagaaaatgggatgcaggattcaaggaagaaattagaccagatgagaagtcaatttcaagaaatacaggatcaacttacagctactataagatgtactaaggagatggaaggcgacgcacaaaagcttgaagtagaaaatgtcatgatgagaaaaattattaaaaaacaggatgaacaaattgagcggtttgagaaaatcctgcagcattcaagtttgatgctgcaggtgtttgagagctagatgaag

SEQ ID NO: 107702 - DNA, 1907 bp, Homo sapiens
  Payload ID: 1143
  Gene Symbol: ANKRD36C
  Gene Name: ankyrin repeat domain 36C
  ENST ID: ENST00000528268
  CDS Start-End: 86-1684
tttgcctgttgttgctcttcggaggcggcgatccccgaaggcgagctgaaatacggctgcaggctacaatttgcagccgaccattatggatgacaaggagccgaagaggtggcccaccctcagggaccgcttgtgctcggatggcttcttatttccccaataccccattaaaccgtatcatctgaaggggatccacagagctgtcttctatcgtgatctggaggaactgaagttcgttctgctcacgcgttatgacatcaataagagagacaggaaggaaaggaccgccctacatttggcctgtgccactggccaaccggaaatggtacatctcctggtgtccagaagatgtgagcttaacctctgcgaccgtgaagacaggacacctctgatcaaggctgtacaactgaggcaggaggcttgtgcaactcttctgctgcaaaatggcgccgatccaaatattacggatgtctttggaaggactgctctgcactacgctgtgtataatgaagatacatccatgatagaaaaacttctttcatatggtgcaaatattgaagaatgcagcgaggatgaatatccgccactgttccttgctgtgagtcaaagaaaagtgaaaatggtggaatttttattaaagaaaaaagcaaatataaatgccgttgattatcttggcagatcagccctcatacatgctgttactcttggagaaaaagatatagtcattcttcttctgcagcacaatattgatgtgttttctcgagatgtgtatggaaagcttgcagaagattatgccagcgaggctaagaacagagtcatttttgaactaatttatgaatatgaaagaaagaaacatgaagagctttctataaatagcaatccagtgtcttctcagaaacaaccagccttgaaggctacaagtggcaaggaagattctatctcgaatatagccacagaaataaaggatggacaaaaatctgggacagtgtcttctcagaaacaaccggccttgaagggtacaagtgacaagaacgattctgtttcgaacacagccacagaaataaaagatgaacaaaaatctgggacagtgtcttctcagaaacaaccggccttgaaggatacaagtgacaagaacgattctgtttcgaacacagccacagaaataaaagatgaacaaaaatctgggacagtgcttcctgctgttgaacagtgtttaaacaggagtctctacagaccggatgctgttgcacagcctgtgacagaggatgagtttgctttggaatctgagattatttcaaaactatacatcccaaagagaaagattatttctccacgatctatagaagatgtgcttcctcctgttgaagaggctgttgacaggtgtctctacctactggaccgttttgcacaggctgtgacaaaggataagtttgctttggaatctgagaatatttcagaaccatactttacaaacagaaggactatttctcaacaatctgcagaaaagttagatgctgcatgtggcattgacaaaacagaaaatggaaccttgtttgaagaccaaaatgttgataaggaaggaaaagcactaccagcaactggacaaaaagcaaatgtgtctcctgagcaaccgcctttattcacgaatcttctgagcgacctcctttatccacgcttactctgaaagaggcagatcccagttcaaaagcagccatgagaaggaaggattcaccacctccaggaaaagtgtcttctcagaaacaaccagctgagaaggctacaagtgacgacaaagattctgtttcaaatatagccacagaaataaaggagggaccaatatctgggacagtgtcttctcagaaacaaccagctgagaaggctacaagtgatgagaaagattctgtttc

SEQ ID NO: 107703 - DNA, 2301 bp, Homo sapiens
  Payload ID: 1143
  Gene Symbol: ANKRD36C
  Gene Name: ankyrin repeat domain 36C
  ENST ID: ENST00000534304
  CDS Start-End: 1-184
agaaaagttagatgctgcatgtggcattgacaaaacagaaaatggaaccttgtttgaagaccaaaatgttgataaggaaggaaaagcactaccagcaactggacaaaaagcaaatgtgtctcctgagcaaccgcctttattcacgaatcttctgagcgacctcctttatccacgcttactctgaaagaggcagatcccagttcaaaagcagccatgagaaggaaggattcaccacctccaggaaaagtgtcttctcagaaacaaccagctgagaaggctacaagtgacgacaaagattctgtttcaaatatagccacagaaataaaggagggaccaatatctgggacagtgtcttctcagaaacaaccagctgagaaggctacaagtgatgagaaagattctgtttcaaatatagccacagaaataaaggagggacaacaatctgggacagtgtctcctcagaaacaatcagcctggaaggttatatttaaaaagaaagtttctcttttgaatattgccacaagaataacgggcggtgggaaatctggaacagtgtcttctcagaaacaaccaccctcaaaggctacaagtgacaagacagattctgctttgaatatagctacagaaataaaggatggactacaatgtgggacagtgtcttctcagaaacaaccagccttgaaggctacaactgacgaggaagattctgtttcgaatatagccacagaaataaaggatggagaaaaatctgggacagtgtcttctcagaaacaaccagccttgaaggctacaactgacgaggaagattctgtttcgattatagccacagaaataaaggacggagaaaaatctgggacagtgtcttctcggaaaaaaccagccttgaaggctacaagtgatgagaaagattctttttcgaatataaccagagaaaaaaaggatggagaaatatctaggacagtgacttctgagaaaccagcaggcttgaaggctacaagtgacgaggaagattctgttttgaatatagccagaggaaaagaggatggagaaaaaactaggagagtgtcttctcggaaaaaaccagccttgaaggctacaagtgatgagaaagattctttttcgaatataaccagagaaaaaaaggatggagaaacatctaggacagtgtcttctcagaaaccaccagccttgaaggctacaagtgacgaggaagattctgttttgaatatagccagagaaaaaaaggatggagaaaaatctagaacagtgtcttctgagaaaccatcaggcttgaaggctacaagtgacgagaaagattctgttttgaatatagccagaggaaaaaagcatggagaaaaaactaggagagtgtcttctcataaacaaccagccttgaaggctacaagtgacaaggaaaattctgttccgaatatggccacagaaacaaaggatgaacaaatatctgggacagtgtcttctcagaaacaaccagccttgaaggctacaagtgacaagaaagattctgtttcgaatatacccacagaaataaaggatggacaacaatctggaacagtgtcttctcagaaacaactggcctggaaggctacaagtgtcaagaaagattctgtttcgaatatagccacagagataaaggatggacaaatacgtgggacagtgtcttctcagagacaaccagccttgaaggctacaggtgatgagaaagattctgtttcgaatatagccagagaaataaaggatggagaaaaatctgggacagtgtctcctcagaaacaatcggcccagaaggttatatttaaaaagaaagtttctcttttgaatattgccacaagaataacgggcggttggaaatctggaacagagtatcctgagaatctgcccaccttgaaggctacaattgaaaataaaaattctgttctgaatacagccaccaaaatgaaagatgtacaaacatccacaccagaacaagacttagaaatggcatcagagggagagcaaaagaggcttgaagaatatgaaaataaccagccacagattgtgttcacctattgaaaattaaaaagacattttgtttatgtaaaagattaacagaacttaaagataatcactgtgagcaacttagagtaaaaattcgaaaactgaaaaataaggctagtgtactacaaaagagactatctgaaaaagaagaaataaaatcgcagttaaagcatgaaacacttgaattggaaaaagaactctgtagtttgagatttgccatacagcaagaaaaaaagaaaagaagaa

SEQ ID NO: 107704 - DNA, 737 bp, Homo sapiens
  Payload ID: 1143
  Gene Symbol: ANKRD36C
  Gene Name: ankyrin repeat domain 36C
  ENST ID: ENST00000619511
  CDS Start-End: 124-615
gcgctgagagtctgtgcgaaggtccgtggacagactgctttgcctgttgttgctcttcggaggcggcgatccccgaaggcgagctgaaatacggctgcaggctacaatttgcagccgaccattatggatgacaaggagccgaagaggtggcccaccctcagggaccgcttgtgctcggatggcttcttatttccccaataccccattaaaccgtatcatctgaaggggatccacagagctgtcttctatcgtgatctggaggaactgaagttcgttctgctcacgcgttatgacatcaataagagagacaggaaggaaaggaccgccctacatttggcctgtgccactggccaaccggaaatggtacatctcctggtgtccagaagatgtgagcttaacctctgcgaccgtgaagacaggacacctctgatcaaggctgtacaactgaggcaggaggcttgtgcaactcttctgctgcaaaatggcgccgatccaaatattacggatgtctttggaaggactgctctgcactacgctgtgtataatgaagatacatccatgatagaaaaacttctttcatatggtgcaaatattgaagaatgcagcgaggtataggtcaaccaatgttattttcaaactatctgaaatgcatttattttaacattgacacatgtaagggtcaatttttcatatttggaagctcaaacattccttgaatgaaaatattttgaaatgcc

SEQ ID NO: 107705 - DNA, 650 bp, Homo sapiens
  Payload ID: 1143
  Gene Symbol: ANKRD36C
  Gene Name: ankyrin repeat domain 36C
  ENST ID: ENST00000612359
  CDS Start-End: 41-454
gtgcagaaagcaccgtctcttactagaagaagacaataaaatgttggtgaatgaattgaatcattcgaaagaaaaaaaatgccaatatgaaaaagagaaagcagaaagagaagtagctgtgagacagcttcaacaaaaacaagatgatgtcttaaacaaacgatcagcaacaaaagctttgctggatgcttcatcgcgtcactgcatctatttagaaaatgggatgcaggattcaaggaagaaattagaccagatgagaagtcaatttcaagaaatacaggatcaacttacagctactataagatgtactaaggagatggaaggcgacgcacaaaagcttgaagtagaaaatgtcatgatgagaaaaattattaaaaaacaggatgaacaaattgagcggtttgagaaaatcctgcagcattcaagtttgatgctgcaggtgtttgagagctagatgaagatatggacatttctggaattacagagccccctctacattgagcacaagacagtgacgaatccacattcttcagccagaaagtcacctctgagagccaaatgtctgataatagacaagagagtcagagaatgataacgacatctcaggaaaattgtgaaaataatcagcaaccgtatgtggataacccttt

SEQ ID NO: 107706 - DNA, 1141 bp, Homo sapiens
  Payload ID: 1144
  Gene Symbol: ANKRD37
  Gene Name: ankyrin repeat domain 37
  Uniprot ID: Q7Z713
  ENST ID: ENST00000335174
  CDS Start-End: 441-917
gcggccgcggagccccacccgctcctactccagtcctctcacgcccactgacttaccctgcgcacgcgcgctgaggctccgtggggccgccgcgggccccgccccgaggtgggagggcctgacgcatccacagctggccaatcggcggatggcctcgcgcgcccgccccctccccctgcccccggcgccgggctccacgtgccagtgtttgtgtacgtgcggccgtggcggggctggacagggtccgggtcgttgaggattaggctgctcgggcgtaaccggagctggggcgcggctgccaagggccggcccggaagtcccagcggtctttaaattctcccgtgctagggccagcctgcgcattcttacctgtcggggtgcggcgagtgtctcacctctctgcacttccaaggactcttgtcatctgccttaggcgggaaatgctgttgctggattgcaaccccgaggtggatggtctgaagcatttgctggagacaggggcctcggtcaacgcacccccggatccctgcaagcagtcgcctgtccacttagccgcaggaagcggccttgcttgctttcttctctggcagctgcaaacgggcgctgacctcaaccagcaggatgttttaggagaagctccactacacaaggcagcaaaagttggaagcctggagtgcctaagcctgcttgtagccagtgatgcccaaattgatttatgtaataagaacgggcaaacagctgaagatctcgcttggtcatgtggatttccagactgtgccaagtttcttacaacaattaaatgtatgcagacaataaaagcaagtgaacaccctgacaggaatgattgtgttgccgtgctcagacagaaacggagtctcggaagtgtagaaaataccagtgggaaaaggaagtgctgatgtcacgtgggttatgaagaagtctgaagaacgccttcatttcatgcaaatctataagctcctgcttttggctttaccatatgttgtgtctaatctccttctgagaaggacgaaaaactttcttccaagtgaagatccatttaagaacacatgtatttacatgcctataatatgctggttgtgtatgctttgtcttttaagttattaaaggaacgtctaaaaaa

SEQ ID NO: 107707 - DNA, 605 bp, Homo sapiens
  Payload ID: 1144
  Gene Symbol: ANKRD37
  Gene Name: ankyrin repeat domain 37
  ENST ID: ENST00000507753
  CDS Start-End: 473-605
ccgaatcgcacgcggccgggtccgctctcccgggaggagagcccggcgtggaccagcgtgacgaccccagcgtgctgcggcctctccccgagggcccctccacaagggtccctgcgcgggccgggctcggccgttgccactcgggacagccatcccctcgagttcgcgctcgccgtccccgccttcacctcccgggttgggaggcgggcgactgcgcgcgaggtaaaggaacttgcgttccccggcgccgaggcggcagcagcgcagtgcacagcggcttctgaaggcggcgtcgacggggagctgcgcgtggctcccagtttcctggttacgtgcgcgccggcagagccaaaacctgcagccgaaactcccgcttctccggccagcctgcgcattcttacctgtcggggtgcggcgagtgtctcacctctctgcacttccaaggactcttgtcatctgccttaggcgggaaatgctgttgctggattgcaaccccgaggtggatggtctgaagcatttgctggagacaggggcctcggtcaacgcacccccggatccctgcaagcagtcgcctgtccacttagccgcaggaagcggccttgctt

SEQ ID NO: 107708 - DNA, 976 bp, Homo sapiens
  Payload ID: 1145
  Gene Symbol: ANKRD39
  Gene Name: ankyrin repeat domain 39
  Uniprot ID: Q53RE8
  ENST ID: ENST00000393537
  CDS Start-End: 109-660
gcggacgccgagcggccagatcagggacgcggggcgggccctgcgtccgcccctcccgccgaggctgagcctgagacccggggcggatcgactgacgccggggccgggatggcgacgcctcggccctgcgcggacgggccctgctgctcgcatcccagcgcggtgctcggcgtacagcagacgctggaggagatggacttcgagaggggaatctggtcggcagccctgaatggagacctgggccgagtgaagcatttaatccagaaggccgaggacccaagtcagcccgactcggccggctacactgcgctgcactatgccagccgcaatgggcactacgctgtgtgccagttcctgctggaaagcggagctaagtgtgatgcccagacccacgggggtgccactgctctgcaccgagccagctactgcgggcacactgaaatcgcgcggctcctgctatcacatgggtccaaccccagggtggtggatgacgacggcatgaccagtctgcataaggctgctgagaggggtcacggggacatctgctccctcctcctgcaacacagcccagccctgaaggccatccgggaccgaaaggcacggctagcatgtgacctgctgccttgcaacagtgacctgcgggacctgctatccagctgagccgccaccctatctccagctgcctttaaagggtacacagaccagttctccaagcccctgccttggtcagcatccatgctgctgggcagggaactgaggccagaccacccaggaagagccccagtctggtcactgtggaagcgagggagtagatttggtgtggctaaaagtgtttaagactggacagatgatcatattctaaattagttcatatgagacatctatttatttggaaaaaaataaagttatatccttacctcatcccacacccaaagataaattgcaagattaaagatctaaatataaaaacacaaaa

SEQ ID NO: 107709 - DNA, 4965 bp, Homo sapiens
  Payload ID: 1145
  Gene Symbol: ANKRD39
  Gene Name: ankyrin repeat domain 39
  Uniprot ID: Q53RE8
  ENST ID: ENST00000443120
  CDS Start-End: 28-579
ggcggatcgactgacgccggggccgggatggcgacgcctcggccctgcgcggacgggccctgctgctcgcatcccagcgcggtgctcggcgtacagcagacgctggaggagatggacttcgagaggggaatctggtcggcagccctgaatggagacctgggccgagtgaagcatttaatccagaaggccgaggacccaagtcagcccgactcggccggctacactgcgctgcactatgccagccgcaatgggcactacgctgtgtgccagttcctgctggaaagcggagctaagtgtgatgcccagacccacgggggtgccactgctctgcaccgagccagctactgcgggcacactgaaatcgcgcggctcctgctatcacatgggtccaaccccagggtggtggatgacgacggcatgaccagtctgcataaggctgctgagaggggtcacggggacatctgctccctcctcctgcaacacagcccagccctgaaggccatccgggaccgaaaggcacggctagcatgtgacctgctgccttgcaacagtgacctgcgggacctgctatccagctgagccgccaccctatctccagctgcctttaaagggtaagtggagaaagagttgaagggaaagtgttgggatttggacatggagttcctgaccctggagcctggcctagtgactggaggaggggcccccaagaggctgtggcccgggagaagctgaaattggaagaagagaagaagaagaaacttgaaagatttaacagtaccagatttaatctggataacctggctgacttggaaaacttggttcaaagacggaaaaagcgactgagacacagagtcccccccaggaaacctgagcccctggttaagccgcagtcccaggcccaggtggagcctgtgggcctggagatgttcctgaaggcagctgctgagaaccaggagtacctgattgacaagtacttgacagacggaggggaccccaatgcccatgacaaggtagcacaggttgggtgagtcggctggcagcagctgcagctgcaggagcgctgccttcagtgtgttcaagtcctggcctaggaggctgcagggattttcactcttatgggcatgaatccagtggcacctgcagacggaggagagggagcggcccatcgcgtggtgggggaagtggcaattccattcagggacctggccctgggaaggggaccgcgtggggtctctaggggtggctgcactccctctgcctaatcttccatctctgccctcagctccaccgcaccgccttgcactgggcctgtctgaagggtcacagccagctggtgaacaagctgctggtggcaggtgccacagtggacgcgcgagacttgctggacaggacacctgtgttctgggcctgccgcggaggacatctggtcatcctcaaacagctgcttaaccagggagcccgggtcaatgcccgggacaagatcgggagcacccccctgcacgtggcagtgcgcacccggcaccccgactgcctggagcacctcatcgagtgtggcgcccacctgaacgcacaggataaggtaaggcaggcgcttggtcttttccggctcggacagctccagaggagcagggactgaggagccccagccaggaccagaggtgctgtctgctcggtgacagcagccctgaccttcctgcatgaggagggcagcacgcggaggcagaagcttgactgcctgcgttctcagcaggaaggggacacggctctgcacgaggccgtgcggcacggcagctacaaagccatgaagctactgctgctctatggggccgagctgggggtgcggaacgcggtgagtgtgggcgcagccctggctcctgacccgagggcgggtggagcgcctgcaagggactgacccacaccgttgctcccaggcctccgtgaccccggtgcagctggctcgagactggcagcgcggcatccgggaggccctgcaggcccacgtggcgcatccccgcacccggtgctgaccgcagcaccgccccccgccgcgcctttcgcactgccaccattccatcctgtgccccgcccccgcgtctgcacctctgtggttcctgccctcagccctggttcctccctctctggcctgtgccgcctcagcagccctggcagaactgaagagcggcaccgggcccagcaggcaaagagagaggcctccctggcttcgagtgtcaggggagccgcgttccctcccagggctggagcagaggaccacaaggcagcagaaagcgcgggtccagatgagggccaggaaggggaggagagtgagggccaagaacgagccttaagggagcagtcccaagctggagccacccagggctgggtctgggagtcctcagtgtccacttgtcccaggttagggggcttgccttgctctctccagggccagtctgtgtgtgtggggactcagcccgtggccggcagatgccatccaggatgtacaaggtgcagccaaggcaggccatgcaggggccgggcctgtctgcagctggtggatgcctgtgggcatggctttctctggggaccccattcctgtcagtagcaaccctggcagtgtccggagcggctctagacaactttggtcataggaactctggaggtgggttctggtcatctgaggtggctactcaacaggtttgaggccccacagcaacagaagtccaggacccactaggttgcctcagaagccctaagactgatgagctggagcgcgcatttgagagaagcctcgcacccactgtgtactggccccgctcaggccggcctggcacaccgttgcctgctggcggctctcatggggaagcgcctgggcactggggattgcttgtggcccactcaactcttggggcagtggcccgtaaccctagtttgcctgaggcccttatgtccccttatgttcctggtactggagcttgagctcttgcctggaacgctgcagctgcacccaccctgcttgatcccacctgggaggccaggacactgaggagctctgaacccagcccacagggaagcagaggaaggtgagcccccgccgccccccagcccttcccatcccttccctgctccctggtggtctaaggacccaagctccctagacttcctcttccaccgtctgtacgtttcaaattacactggtgtaggcctgtactgctggtggggctgggcccctaaacgccagaaagtgaatcttaagaagctctgccctaaactgagaaccacatgctgagggaagggctgaaaggtgaaggctcagcctccctcacatgggtcctgggttacattaggtaccgggctgattgataggcatttggccatggttccttttcgtctacctttgggggccttctcaggcccagaacaaggctgttgttactatgtggaaaagctgaccagtgctgcacactaggggcacacacctttccatgagcagctcctgccctgtggcgacagccagcgtgcacccagacgctggtgccatggcgaagcaggcgttcaagaccatggagaagacaactcctcatctagaaaatgaggacacctcagtgacaaacacacctttttataccaatcagtatcctctgttcattaaaactggctatccattacagcctagccgtctttcctgggccgagaggagcccatgcttcagtcaccagggactgtctgatagggcccacgcctgttagccatgccggccgacagcaagataggccgagtgcagagtgggcgggatgcggggtcctggcactaggcttttgtgcttaaggcacctctgctcactgacgacaaggtcaaagagcagtggttctccacctcagctgcttatcagaatcaccaggaaggtttaaaaagtcctgatgtccagaccctaagtcagaagccctgaggggaggatccaggtattctcatgcagaggccatgcttgtctatgtgggaaatcctaggaatctacagaaagcagacaactagggagtccagcaaaatctcgggtgcaagataaacacacaaaaacctgtttctacctcctagaaatgaacatgtagacacaaaagttaaaaatatgtactgtttacaattgctgaaaaagggaaatacttcggtttaaatctaacaaaatatgcaaggacttgtatgctgaaaattataaaacgtgatgaaatcaaagatttaaatagacatgccatgttcatggattgctagacagaatacagtaaagatatcaattctcctcaaattaacatacaggttaaatgcagttcctatcaaaatcctagaagatgttttgtagatgtagacaaggttattctaaaattcatatacaaatttatagcaaaaatattttgaaaaagaatagagtgagaggaggaatcagtccagctgatttcaagatctactatatagctatgtgaaccaagagtgcaatgctggcagaggcacagacacacagatcgacagagccgagatcatcacgggaacaggaccacacaaatatgcccagctgactttaaggtgcaaaagtaattcaatggaggaaggacagcctttcaacaaacggtgctggagcagctggaccagctataggattaaaaaaaaagaactttagcctaagtcttacacattatacaaaaattaacatggctcacatgcatacttaaatttaaaactataaaacttcttttaggaaaaaacagataacctttgggatctaagactaggtagagttgttcttaaatgcaacactaaaagcaacagtccataaaggaaatatcagtaaagtggactttatcaaaactgaaaacttttgctctgtataaaaccctgttaagagggtgaaaagatggccgggcacggtggctcacacctgtaattgtagtactttgggaggttgaggcaggcagatcacttgag

SEQ ID NO: 107710 - DNA, 4184 bp, Homo sapiens
  Payload ID: 1146
  Gene Symbol: ANKRD40
  Gene Name: ankyrin repeat domain 40
  Uniprot ID: Q6AI12
  ENST ID: ENST00000285243
  CDS Start-End: 271-1377
ttgtcacactgaacagggtcccccggagccggccttcgggaggcgcggcccgggaggaggcctgggcctgcgggccgggagcagcaggggcggcccgcgggagggagcggaagtcccggggcgggcgcgggcagcggcgcgagcagggcgggcgagttccgcgctccctccccatggccgggagcgggccgcggcgacggcggcggcgctgacaggccccgggcggggcggggcaggcgggcctgggcgggggcctggggctgtgggaagatgaacgccctcctagagcagaaggagcagcaggagaggctgcgggaggccgcggccttaggggacattcgggaggtgcagaaactggtggagagcggggtggatgtgaactcccaaaatgaggtcaacggctggacttgtttacactgggcatgtaaacgaaaccatggtcaggtggtctcttacctgttaaaatcaggagctgacaaagaaattcttaccacaaaaggagaaatgccagtccagttaacatcaaggagagaaatcaggaagattatgggagtggaagaagaagatgatgatgatgatgatgatgacaacctcccccagctgaagaaggagtcagaactgccctttgttcccaactatttggccaacccagccttcccttttatctatacacccacagcagaggattcagcccagatgcagaatgggggcccctccacaccccctgcatcaccccctgcagatggctcacctccattgcttccccctggggaacctcccctgttagggacctttccccgggaccacacctctttggcactagttcagaatggtgatgtgtcggccccctctgccatactcagaacaccagaaagcacaaaaccgggtcctgtttgtcagccaccagtgagtcagagccgctccctgttttcttctgtcccgtccaagccaccaatgtctctggagcctcaaaatgggacgtatgcaggaccagcgccagcattccagccatttttcttcactggagcatttccatttaatatgcaagagctggtactcaaggtgagaattcagaacccatctcttcgagaaaatgatttcattgaaattgaactggaccgacaggagctcacctaccaagagttgctcagagtgtgttgctgtgagctgggtgttaatccagatcaagtggagaagatcagaaagttacccaatactctgttaaggaaggacaaggatgttgctcgactccaagatttccaggagctggaactggttctgatgataagtgaaaataattttctgttcagaaatgctgcatccacactgactgaaaggccttgctataacaggagagcttcaaaactgacttactaatgcagcagggacttttatcactgagtattatgacagtgtgcatcacctctgggccaaggacaagccattgatctaaatgcctcagatgcccgggagggcctctggtgccactgcatagtatatactaacatcattctgccaaggtaggaagcccctgacccccaagcagtggtgccactcttccaagcctcttggtgcacagtaaacctattgcttgaagctttgaacagctgagaagtggtctggagaggcagaagctgaaggttctatatccagtgtgttttatgtccagaatgtaagagagttgtctaagcagcagctgagagagagcggagcctatttctagccactcctgttgacagtgcacctgaagggctgggatgcgtttttcttggtgttgcatgctcacaactctgctgacattgggaacttatgagagaggaagactcgggaaagcacagatactggacagatggattctggtgtggggaaagcacagatactggacagatggattctagtgtgacttgtgactgtgaggtttcctataacatatttataaatgttactcaggttaaaagtatttaagaatacagttaactaattgtaaatatgctgttaaccaaaagagctttccctccctcactttttcctttgtaaacactcatgactgcttctctgtctcgagtcatctctgcattaactccccttcgtggtcactagagggctctctgatgccttctaaaagaacaactgcttttttacaatgccccccacccccaccccgcccatagagacagggtctcactatgtggcccaggctggtctcaaacttctggccttaagtgatgctcctgtccttggcctcccaaagtgctgggattacaggtgtgagccactgcacccagcccactttttttttactctgaagtgattccagtcatatgtgtgtgtaactgcatcctatgagaagagcacaaatattgctgttccatgttctccactttcattttccactacaaatgaaaagcaatttttgagactgaatctgttgctattttaaaggttattgtgggaaactgagctaaaggagttagcatctttatttttgtatcaaaaataaaggttattttgaaattattaggatttttacacaattctgaaatctgttgcttttgtaaacaaattgtttgatcttagtgatccccctactactaccaccaattcacttcacaaagtcagttatgagtctaccagactttgttctgaaaaatagaaacaaaacacctgattaagctcttgagtatggcataggaattttttagaagaatgcattcaaggattcttttcctttccttcagtgtcattaatgttaaaagagcagccactgttttgttgaaacaaacagcttaacttcagaaataagaactagcacacttagacaaacaggagagcaggggtttgaagccagctgtcgaagagcatccctgctgtcttaagaagctttttccccatagtgcctatagtttccaaagaaactcaacttcctaactgtgttaacttaattttattagaacactacagttgagtgagaacgtgcagaagatgtcaacagaagagaatgttgtgctaagataatggcctcctgctgctgcctaaatgctgaaatgaggttgagatgtttttcaaggctaacttcatggactcactctgtttagtgacttaattgtatcccaccaattactgctggtgacttactcacccttgtacagtgtttgcatagcagagtgaaggttacttattaccctctttctctcaagtgctttaaagaagaaacctccctggtgtttcttttctttttttttttgagacggagtcttgctttgttgcccaggctgaagtgcagtggcataatctcagctcactgaaacctctgcctcccgggttcaaacgattctcctgcctcagcctcccaagtagctgggattacaagcatgtgccaccatgcccagctaatttctgtattttagtagagacaaggtttcaccatgttggccaggctggtctcgaactcctggcctcaagtgatccacctgccttggcctcccaaagtgctccgattacaggtgtgagccacccggcccagcccctcccttgtgtttcaaccaatcggaagtgaatttaactagatgtagtaaccttttttttctttacttctaaaacagttacagtttactaataaagttaagtctggttctgtcctagaggaaataaattcactattaattcatgtcttaagttacttgggttaaaacactttcagccacccagattaattaaagtggagcagtggagcccctggctgggagatggcctccagaggagcagctgcagggcatgttctgggcttagcgacagaggcaagcaagggactggtgtctctggtgagaggtgggtttgatgtatctctgtcctatgctggtctctcttctcctttataaaatcctctgtggtcaactgactactgcgtatcgcagtggaataagactgcacagttgctggtaggtgagtttaaagtcttaatctatgcattcagagaaatatttttatatgctttgtgtaatttataacaaggattttttttttagctttgttaactgtgaattcacccctcctcctccactgcatatttaaagcatgtgttcacactgtgtgtaaacattcactgaagattttttctttgtgcattgctgactgttcaaacataacaagtattattaaaattaaatattaactgaccgatccta

SEQ ID NO: 107711 - DNA, 848 bp, Homo sapiens
  Payload ID: 1146
  Gene Symbol: ANKRD40
  Gene Name: ankyrin repeat domain 40
  ENST ID: ENST00000513072
  CDS Start-End: 483-848
tccatagtccctgaaaaggaatatagcaatagaaaaatatgtttcagagactgagatgatctaatgagcgatactgatagagtatattccacggtatcattggagttagccagccagtgagcttaccttctggaggctattgaaattaaaactcctaggttaagttagtttttctcaggagccagaaatgaaatttaaaaacaaaatttaagcatattaaatattttgctcatcggctttgtgaaaagttgagattaccagcccggttacctggttctagctgaactctaacaggcttgtttatacattatttactaatgtttagaatctgaaatccaaaatcacttctcctctttttcaatcattattttctttggtacaggacttgtttacactgggcatgtaaacgaaaccatggtcaggtggtctcttacctgttaaaatcaggagctgacaaagaaattcttaccacaaaaggagaaatgccagtccagttaacatcaaggagagaaatcaggaagattatgggagtggaagaagaagatgatgatgatgatgatgatgacaacctcccccagctgaagaaggagtcagaactgccctttgttcccaactatttggccaacccagccttcccttttatctatacacccacagcagaggattcagcccagatgcagaatgggggcccctccacaccccctgcatcaccccctgcagatggctcacctccattgcttccccctggggaacctcccctgttagggacctttccccgggaccacacctctttggcactagttcagaatggtgatgtgtcggccccctctgccatactcagaacacca

SEQ ID NO: 107712 - DNA, 2514 bp, Homo sapiens
  Payload ID: 1147
  Gene Symbol: ANKRD42
  Gene Name: ankyrin repeat domain 42
  ENST ID: ENST00000260047
  CDS Start-End: 796-2349
tggaggataaacggtctacacggccattccggcgccgagtctagggaaagagttagcgacgacggggaaagaaaatgtgaagagagcgaccgccgctccagggtcgctgcaggaagcctaagtgcagacgccggcttctcccgcagtgacttgagaagggtcagtgaaaacctcggccactgccgcagcgtctctagggagagagttaggggagatagtggccacagtcacagctgctcttgggagagagttaggggagacagcaccttctgcagcagcgacgtgaattttagtgaagttggaggccaccaaactaccgactccaggggaacagccagagaagaccgaggcctccgcctcagtggtccttgggagggagtcagtgacattcgggacccgcgaactagtgacttcggggatagagtcagtgacgatcgcagtcgccgcttcagtggctcctgggagggagggagtgtcgaaggcggccacagcgttggtagttcttgggaggaagtaagtggagaccgcggctacgcagccagcgactcctctggtgtgagcggcagtgaagacgccagctaccgcttcagtggcttttgggagagagaaagtgaagacgaaggtttccgctgcagcttctgggagagagcaagagaggaccttgggccccgtcctagtgacgacggagaagagggccgctgccgctgcagtggctcgtgggtgagagcaagtgaagaccgccgcagcatcaggggcctggactcaactcctccccagagtcggaggtgttgcgccatgcccggggtggccaattcaggcccctccacttcctctagggagactgcaaacccctgttccaggaagaaggtgcattttggcagcatacatgatgcagtacgagctggagatgtaaagcagctttcagaaatagtggtacgtggagccagcattaatgaacttgatgttctccataagtttacccctttacattgggcagcacattctggaagtttggagtgtcttcattggctgctctggcatggagctgatatcacacacgtaacaacgagaggttggacagcatctcacatagctgcaatcaggggtcaggatgcttgtgtacaggctcttataatgaatggagcaaatctgacagcccaggatgaccggggatgcactcctttacatcttgctgcaactcatggacattctttcactttacaaataatgctccgaagtggagatcccagtgtgactgataagagagaatggagacctgtgcattatgcagcttttcatgggcggcttggctgcttgcaacttcttgttaaatggggttgtagcatagaagatgtggactacaatggaaaccttccagttcacttagcagccatggaaggccaccttcactgtttcaaattcctagtcagtagaatgagcagtgcgacgcaagttttaaaagctttcaatgataatggagaaaatgtactggatttggcccagaggttcttcaagcagaacattttacagtttatccagggggctgagtatgaaggaaaagacctagaggatcaggaaactttagcatttccaggtcatgtggctgcctttaagggtgatttggggatgcttaagaaattagtggaagatggagtaatcaatattaatgagcgtgctgataatggatcaactcctatgcataaagctgctggacaaggccacatagagtgtttgcagtggttaattaaaatgggagcagacagtaatattaccaacaaagcaggggagagacccagtgatgtggcaaagaggtttgcccatttggcagcagtgaagctgttagaggagctacagaaatatgatatagatgacgaaaatgaaattgatgaaaatgatgtgaaatattttataagacatggtgttgagggaagcactgatgccaaggatgatttatgtctgagtgacttggataaaacagatgccagaatgagagcttacaagaaaattgtagaattgagacacctcctggaaattgccgagagcaactataaacacttgggaggcataacagaagaagatttaaagcagaagaaagaacagcttgagtctgaaaagaccatcaaagaactgcagggccagctggagtatgaacgactacgtagagaaaaattagaatgtcagcttgatgaatatcgagcagaagttgatcaactcagggaaacactggaaaaaattcaagtcccaaactttgtggctatggaagacagcgcttcttgtgagtcaaacaaagagaagaggcgagtaaaaaaaaaggtttcttctggaggggtgtttgtgagaaggtactaatcagtgaaataactaaattgacctgctagatttttctctttcattaaaaaaattgatataaatgtgagtctatacaaactatctcagaattactctgatatgcttctgttccaattctgatggcagaaatgttatattaaagagatttagagattttttaaatga

SEQ ID NO: 107713 - DNA, 4066 bp, Homo sapiens
  Payload ID: 1147
  Gene Symbol: ANKRD42
  Gene Name: ankyrin repeat domain 42
  Uniprot ID: Q8N9B4
  ENST ID: ENST00000393389
  CDS Start-End: 933-1529
gcctctccagccaagtggctggagtcgggaggctggaaagagactccgagaaagtaccagcggaaggcggccgccgctacggcgattcgcagggagtagcagacgaagacggtggccgccgcactagccaccacgtgtggaggataaacggtctacacggccattccggcgccgagtctagggaaagagttagcgacgacggggaaagaaaatgtgaagagagcgaccgccgctccagggtcgctgcaggaagcctaagtgcagacgccggcttctcccgcagtgacttgagaagggtcagtgaaaacctcggccactgccgcagcgtctctagggagagagttaggggagatagtggccacagtcacagctgctcttgggagagagttaggggagacagcaccttctgcagcagcgacgtgaattttagtgaagttggaggccaccaaactaccgactccaggggaacagccagagaagaccgaggcctccgcctcagtggtccttgggagggagtcagtgacattcgggacccgcgaactagtgacttcggggatagagtcagtgacgatcgcagtcgccgcttcagtggctcctgggagggagggagtgtcgaaggcggccacagcgttggtagttcttgggaggaagtaagtggagaccgcggctacgcagccagcgactcctctggtgtgagcggcagtgaagacgccagctaccgcttcagtggcttttgggagagagaaagtgaagacgaaggtttccgctgcagcttctgggagagagcaagagaggaccttgggccccgtcctagtgacgacggagaagagggccgctgccgctgcagtggctcgtgggtgagagcaagtgaagaccgccgcagcatcaggggcctggactcaactcctccccagagtcggaggtgttgcgccatgcccggggtggccaattcaggcccctccacttcctctagggagactgcaaacccctgttccaggaagaaggtgcattttggcagcatacatgatgcagtacgagctggagatgtaaagcagctttcagaaatagtggtacgtggagccagcattaatgaacttgatgttctccataagtttacccctttacattgggcagcacattctggaagtttggagtgtcttcattggctgctctggcatggagctgatatcacacacgtaacaacgagaggttggacagcatctcacatagctgcaatcaggggtcaggatgcttgtgtacaggctcttataatgaatggagcaaatctgacagcccaggatgaccggggatgcactcctttacatcttgctgcaactcatggacattctttcactttacaaataatgctccgaagtggagtggatcccagtgtgactgataagagagaatggagacctgtgcattatgcagcttttcatgggcggcttggctgcttgcaacttcttgttaaatggggttgtagcatagaagatgtggactacaatggaaaccttccagaacctccttagatccctgtggagcctctgattccttggcttggcatgctggacttacataatttggcacctacctacctgcatggcctcatctttctatatctttacactactgtccaggatcattttgtttttttctgaaggtcgtctttcagtgttcatttagtgaagtcttttggtatgaactctttcaatttttgtgtatctgaaaatttattttgttctcattctttttactttgtattttgtaagtttttttttttaaagtaaaatttaaattgaagtctcaaaaaacaaaaagcccctctctcggcgctgcctacggaggtggcagccatctcctcctcagcatcatggccaccctcagaccccttgtgaagcccaggatcatcaaaaagagaactaagaagttcttccggcaccagactgactgatatgtcaaaattaagtgtaactggcagaaacccagaggtattgacaacagggttcgtagaaggttcaaggaccaatcttgatgcccaacattggttgtgggagcgacaaaaaaaacaaagcacatgctgcctactgacttctggaagttcctggtccacaacatcaaggagctggaagtgctgctgatgtgcaacagatcttactgtgctgagatgtttcctccaagaactgcaaagccatcgtggaaagagctgcccagctgtccatcggagtcacaccaaccccaacgccaggctgcgcagtgaagaaaatgaatagacagctcatgtgcatgttttgtgtttaaataaaactgtaaaaactgcaaagaaaaaccaaaaaacaacaacaaaaaattattttgtgttaggcttccttcgctttttcagactgctttcaatttccattttcacatatggtattattagtttttttttttagttttagtctttctgatggatgtatctcattgcagtttcaaatttacatttttcctgatgactaaagatgttgaacatcatttcgtacgtttaaaggctatttggtttttttgtgtgtgtgatgtactagttcaaatcttttgcctattggctgttagagtgtgtctttttcttattgaatcataggagttctttatatattctagatacaagccctttgtcagttacgtttattaccaatatcttttcatgcaaatatctttctaatctttctacttcatggcttgctctttcattctttggtattttttgataaatgaggttttaattattttttttttttgaaatagagtcttgctctgtcgcacaggctggagtgcagtggtgcagtctcggcttgctgcaacctctgcctcccggattcaagcgattcttctgcctcagcctcccgagtagctgggattacaggtgtgcaccaccacgcttggctaatttttgtatttttagtagaaacagaattttagcatgttggccacgctggtcttgaactcctgaccttgtgatccacccacctcggcctcccaaagtgctgggattacaggtgtgagccaccgcgcttggccagaggttttaattttaacgtagtccattttaataatctcttcctttgtagttagtcctttctgtactttccctattttgtgatcatgaagacattcctttatgttatctgttagaaattttatttatctttcatatttatattcccaatcctcctagaactgacttttccgtgtgtaatacaaggtaggggtcagttttatttttgtattgtcctttatcaaatatacttgatcatttttgttggtcttgtctggtcattaaaaaatccaattgtttctttaaacatgtatgattattttatttataaccaggtagagtatttataataatatagatgttaagaaagaatgtggccttaggtctagactgcttgtgttcaaatcgctctcataaaattattttttattgataaatgtacatatttttggtgtacatgtgataatttgatacattcatttgtatcaaatttgataatgtataaagatcaaatcaaggtaattggggtagccatcccttaaatatttcttttatactaggaacatttgaattatttttttctagttatttttaaatacacaatagattatggttaactataatcaccctactgatctgtcaaacactagatcttatttcttctactcaattgtatatttatacccattaatcaacttctgttcttgctctctccgtgctacccttctggcctttggtaatcgccaatcaatctactctctatcttcatgagaccagcgtattttagctcccacatatgaatgaaaacatataatatttgtctttctgtgcttgacttattttacttaacataatgacctccaattccatccatcttgtggcactgacagtatttcattcatttttgtgtgaattatatttcgttgtgaatatacattacattttctttatccattcatcactgatgtgcacttaggttgattccatattttggctattgtgaatagtgtgttaataaacatgagagtgcagtta

SEQ ID NO: 107714 - DNA, 2302 bp, Homo sapiens
  Payload ID: 1147
  Gene Symbol: ANKRD42
  Gene Name: ankyrin repeat domain 42
  Uniprot ID: Q8N9B4
  ENST ID: ENST00000393392
  CDS Start-End: 163-1332
agcttctgggagagagcaagagaggaccttgggccccgtcctagtgacgacggagaagagggccgctgccgctgcagtggctcgtgggtgagagcaagtgaagaccgccgcagcatcaggggcctggactcaactcctccccagagtcggaggtgttgcgccatgcccggggtggccaattcaggcccctccacttcctctagggagactgcaaacccctgttccaggaagaaggtgcattttggcagcatacatgatgcagtacgagctggagatgtaaagcagctttcagaaatagtgtgtcttcattggctgctctggcatggagctgatatcacacacgtaacaacgagaggttggacagcatctcacatagctgcaatcaggggtcaggatgcttgtgtacaggctcttataatgaatggagcaaatctgacagcccaggatgaccggggatgcactcctttacatcttgctgcaactcatggacattctttcactttacaaataatgctccgaagtggagtggatcccagtgtgactgataagagagaatggagacctgtgcattatgcagcttttcatgggcggcttggctgcttgcaacttcttgttaaatggggttgtagcatagaagatgtggactacaatggaaaccttccagttcacttagcagccatggaaggccaccttcactgtttcaaattcctagtcagtagaatgagcagtgcgacgcaagttttaaaagctttcaatgataatggagaaaatgtactggatttggcccagaggttcttcaagcagaacattttacagtttatccagggggctgagtatgaaggaaaagacctagaggatcaggaaactttagcatttccaggtcatgtggctgcctttaagggtgatttggggatgcttaagaaattagtggaagatggagtaatcaatattaatgagcgtgctgataatggatcaactcctatgcataaagctgctggacaaggccacatagagtgtttgcagtggttaattaaaatgggagcagacagtaatattaccaacaaagcaggggagagacccagtgatgtggcaaagaggtttgcccatttggcagcagtgaagctgttagaggagctacagaaatatgatatagatgacgaaaatgaaattgatgaaaatgatgtgaaatattttataagacatggtgttgagggaagcactgatgccaaggatgatttatgtctgagtgacttggataaaacagatgccagaagaccatcaaagaactgcagggccagctggagtatgaacgactacgtagagaaaaattagaatgtcagcttgatgaatatcgagcagaagttgatcaactcagggaaacactggaaaaaattcaagtcccaaactttgtggctatggttggtgtcctttttaatacatttatttttctcaagaagtatatacaagagtggccaagagtacaagctttgggctggggctctttggacttgaatcctggctatagtcttttttgatttgggctactcatttaacctttttgtgcctcaactataaactggagatgataacttatactttctagagctgatgacaggattaaaggaatacacacacacacacacacacacacacacacacacacacactctatatgtaactataactttctagatacatacacacatctgtctatctatcttcaaacagcagcctagttcataagtattattgttaacattgtaccatagaaggagaaaatgttttcataagtaatcaatcagaattctaagacagctagaggatatgtatattttaatattctaaataaccaaaataaagtgctttgaatggaatccatattttctttccatagggaagtttcttcatcaatcatcatggatgaattaattctgtttgaggcttgtgtcacctcaaatctgatctattaatattatagaatcttcctggcttctttttattttgcacaaactagtcattggtctctttaataaccactttaaaaatattaaaataataaaacatgtttgttgtatagtgttaaaaacaagatagatgttccttctgacactaagttccactctccagaggaagctattgttaacaatttagtacataccatattagacaaaattctatttatctgcaaacatgtatgtgtatttctatgcatatgcaaatataaccacttcctcagtttctctgggttttggtgtctcaccagtggttgattttccaagaaatataattaactataataatt

SEQ ID NO: 107715 - DNA, 954 bp, Homo sapiens
  Payload ID: 1147
  Gene Symbol: ANKRD42
  Gene Name: ankyrin repeat domain 42
  ENST ID: ENST00000528722
  CDS Start-End: 566-823
aagtggctggagtcgggaggctggaaagagactccgagaaagtaccagcggaaggcggccgccgctacggcgattcgcagggagtagcagacgaagacggtggccgccgcactagccaccacgtgtggaggataaacggtctacacggccattccggcgccgagtctagggaaagagttagcgacgacggggaaagaaaatgtgaagagagcgaccgccgctccagggtcgctgcaggaagcctaagtgcagacgccggcttctcccgcagtgacttgagaagggttccaggaagaaggtgcattttggcagcatacatgatgcagtacgagctggagatgtaaagcagctttcagaaatagtggtacgtggagccagcattaatgaacttgatgttctccataagtttacccctttacattgggcagcacattctggaagtttggagtgtcttcattggctgctctggcatggagctgatatcacacacgtaacaacgagaggttggacagcatctcacatagctgcaatcaggggtcaggatgcttgtgtacaggctcttataatgaatggagcaaatctgacagcccaggatgaccggggatgcactcctttacatcttgctgcaactcatggacattctttcactttacaaataatgctccgaagtggagtggatcccagtgtgactgataagagagaatggagacctgtgcattatgcagcttttcatgggcggcttggctgcttgcaacttcttgttaaatggggttgtagcatagaagatgtggactacaatggaaaccttccagaacctccttagatccctgtggagcctctgattccttggcttggcatgctggacttacataatttggcacctacctacctgcatggcctcatctttctatatctttacactactgtccaggatcattttgtttttttctgaag

SEQ ID NO: 107716 - DNA, 3230 bp, Homo sapiens
  Payload ID: 1147
  Gene Symbol: ANKRD42
  Gene Name: ankyrin repeat domain 42
  ENST ID: ENST00000526731
  CDS Start-End: 423-1115
agggagtcagtgacattcgggacccgcgaactagtgacttcggggatagagtcagtgacgatcgcagtcgccgcttcagtggctcctgggagggagggagtgtcgaaggcggccacagcgttggtagttcttgggaggaagtaagtggagaccgcggctacgcagccagcgactcctctggtgtgagcggcagtgaagacgccagctaccgcttcagtggcttttgggagagagaaagtgaagacgaaggtttccgctgcagcttctgggagagagcaagagaggaccttgggccccgtcctagtgacgacggagaagagggccgctgccgctgcagtggctcgtgggtgagagcaagtgaagaccgccgcagcatcaggggcctggactcaactcctccccagagtcggaggtgttgcgccatgcccggggtggccaattcaggcccctccacttcctctagggagactgcaaacccctgttccaggaagaaggtgcattttggcagcatacatgatgcagtacgagctggagatgtaaagcagctttcagaaatagtggtacgtggagccagcattaatgaacttgatgttctccataagtttacccctttacattgggcagcacattctggaagtttggagtgtcttcattggctgctctggcatggagctgatatcacacacgtaacaacgagaggttggacagcatctcacatagctgcaatcaggggtcaggatgcttgtgtacaggctcttataatgaatggagcaaatctgacagcccaggatgaccggggatgcactcctttacatcttgctgcaactcatggacattctttcactttacaaataatgctccgaagtggagtggatcccagtgtgactgataagagagaatggagacctgtgcattatgcagcttttcatgggcggcttggctgcttgcaacttcttgttaaatggggttgtagcatagaagatgtggactacaatggaaaccttccaggtggcagccatctcctcctcagcatcatggccaccctcagaccccttgtgaagcccaggatcatcaaaaagagaactaagaagttcttccggcaccagactgactgatatgtcaaaattaagtgtaactggcagaaacccagaggtattgacaacagggttcgtagaaggttcaaggaccaatcttgatgcccaacattggttgtgggagcgacaaaaaaaacaaagcacatgctgcctactgacttctggaagttcctggtccacaacatcaaggagctggaagtgctgctgatgtgcaacagatcttactgtgctgagatgtttcctccaagaactgcaaagccatcgtggaaagagctgcccagctgtccatcggagtcacaccaaccccaacgccaggctgcgcagtgaagaaaatgaatagacagctcatgtgcatgttttgtgtttaaataaaactgtaaaaactgcaaagaaaaaccaaaaaacaacaacaaaaaattattttgtgttaggcttccttcgctttttcagactgctttcaatttccattttcacatatggtattattagtttttttttttagttttagtctttctgatggatgtatctcattgcagtttcaaatttacatttttcctgatgactaaagatgttgaacatcatttcgtacgtttaaaggctatttggtttttttgtgtgtgtgatgtactagttcaaatcttttgcctattggctgttagagtgtgtctttttcttattgaatcataggagttctttatatattctagatacaagccctttgtcagttacgtttattaccaatatcttttcatgcaaatatctttctaatctttctacttcatggcttgctctttcattctttggtattttttgataaatgaggttttaattattttttttttttgaaatagagtcttgctctgtcgcacaggctggagtgcagtggtgcagtctcggcttgctgcaacctctgcctcccggattcaagcgattcttctgcctcagcctcccgagtagctgggattacaggtgtgcaccaccacgcttggctaatttttgtatttttagtagaaacagaattttagcatgttggccacgctggtcttgaactcctgaccttgtgatccacccacctcggcctcccaaagtgctgggattacaggtgtgagccaccgcgcttggccagaggttttaattttaacgtagtccattttaataatctcttcctttgtagttagtcctttctgtactttccctattttgtgatcatgaagacattcctttatgttatctgttagaaattttatttatctttcatatttatattcccaatcctcctagaactgacttttccgtgtgtaatacaaggtaggggtcagttttatttttgtattgtcctttatcaaatatacttgatcatttttgttggtcttgtctggtcattaaaaaatccaattgtttctttaaacatgtatgattattttatttataaccaggtagagtatttataataatatagatgttaagaaagaatgtggccttaggtctagactgcttgtgttcaaatcgctctcataaaattattttttattgataaatgtacatatttttggtgtacatgtgataatttgatacattcatttgtatcaaatttgataatgtataaagatcaaatcaaggtaattggggtagccatcccttaaatatttcttttatactaggaacatttgaattatttttttctagttatttttaaatacacaatagattatggttaactataatcaccctactgatctgtcaaacactagatcttatttcttctactcaattgtatatttatacccattaatcaacttctgttcttgctctctccgtgctacccttctggcctttggtaatcgccaatcaatctactctctatcttcatgagaccagcgtattttagctcccacatatgaatgaaaacatataatatttgtctttctgtgcttgacttattttacttaacataatgacctccaattccatccatcttgtggcactgacagtatttcattcatttttgtgtgaattatatttcgttgtgaatatacattacattttctttatccattcatcactgatgtgcacttaggttgattccatattttggctattgtgaatagtgtgttaataaacatgagagtgcagtta

SEQ ID NO: 107717 - DNA, 1887 bp, Homo sapiens
  Payload ID: 1147
  Gene Symbol: ANKRD42
  Gene Name: ankyrin repeat domain 42
  ENST ID: ENST00000531895
  CDS Start-End: 274-1782
gaccgcggctacgcagccagcgactcctctggtgtgagcggcagtgaagacgccagctaccgcttcagtggcttttgggagagagaaagtgaagacgaaggtttccgctgcagcttctgggagagagcaagagaggaccttgggccccgtcctagtgacgacggagaagagggccgctgccgctgcagtggctcgtgggtgagagcaagtgaagaccgccgcagcatcaggggcctggactcaactcctccccagagtcggaggtgttgcgccatgcccggggtggccaattcaggcccctccacttcctctagggagactgcaaacccctgttccaggaagaaggtgcattttggcagcatacatgatgcagtacgagctggagatgtaaagcagctttcagaaatagtggtacgtggagccagcattaatgaacttgatgttctccataagtttacccctttacattgggcagcacattctggaagtttggagtgtcttcattggctgctctggcatggagctgatatcacacacgtaacaacgagaggttggacagcatctcacatagctgcaatcaggggtcaggatgcttgtgtacaggctcttataatgaatggagcaaatctgacagcccaggatgaccggggatgcactcctttacatcttgctgcaactcatggacattctttcactttacaaataatgctccgaagtggagtggatcccagtgtgactgataagagagaatggagacctgtgcattatgcagcttttcatgggcggcttggctgcttgcaacttcttgttaaatggggttgtagcatagaagatgtggactacaatggaaaccttccagttcacttagcagccatggaaggccaccttcactgtttcaaattcctagtcagtagaatgagcagtgcgacgcaagttttaaaagctttcaatgataatggagaaaatgtactggatttggcccagaggttcttcaagcagaacattttacagtttatccagggggctgagtatgaaggaaaagacctagaggatcaggaaactttagcatttccaggtcatgtggctgcctttaagggtgatttggggatgcttaagaaattagtggaagatggagtaatcaatattaatgagcgtgctgataatggatcaactcctatgcataaagctgctggacaaggccacatagagtgtttgcagtggttaattaaaatgggagcagacagtaatattaccaacaaagcaggggagagacccagtgatgtggcaaagaggtttgcccatttggcagcagtgaagctgttagaggagctacagaaatatgatatagatgacgaaaatgaaattgatgaaaatgatgtgaaatattttataagacatggtgttgagggaagcactgatgccaaggatgatttatgtctgagtgacttggataaaacagatgccagaatgagagcttacaagaaaattgtagaattgagacacctcctggaaattgccgagagcaactataaacacttgggaggcataacagaagaagatttaaagcagaagaaagaacagcttgagtctgaaaagaccatcaaagaactgcagggccagctggagtatgaacgactacgtagagaaaaattagaatgtcagcttgatgaatatcgagcagaagttgatcaactcagggaaacactggaaaaaattcaagtcccaaactttgtggctatgacagcgcttcttgtgagtcaaacaaagagaagaggcgagtaaaaaaaaaggtttcttctggaggggtgtttgtgagaaggtactaatcagtgaaataactaaattgacctgctagatttttctctttcattaaaaaaattgatataa

SEQ ID NO: 107718 - DNA, 594 bp, Homo sapiens
  Payload ID: 1147
  Gene Symbol: ANKRD42
  Gene Name: ankyrin repeat domain 42
  ENST ID: ENST00000531815
  CDS Start-End: 1-429
gatttggggatgcttaagaaattagtggaagatggagtaatcaatattaatgagcgtgctgataatggatcaactcctatgcataaagctgctggacaaggccacatagagtgtttgcagtggttaattaaaatgggagcagacagtaatattaccaacaaagcaggggagagacccagtgatgtggcaaagaggaccatcaaagaactgcagggccagctggagtatgaacgactacgtagagaaaaattagaatgtcagcttgatgaatatcgagcagaagttgatcaactcagggaaacactggaaaaaattcaagtcccaaactttgtggctatggaagacagcgcttcttgtgagtcaaacaaagagaagaggcgagtaaaaaaaaaggtttcttctggaggggtgtttgtgagaaggtactaatcagtgaaataactaaattgacctgctagatttttctctttcattaaaaaaattgatataaatgtgagtctatacaaactatctcagaattactctgatatgcttctgttccaattctgatggcagaaatgttatattaaagagatttagagattttttaaatga

SEQ ID NO: 107719 - DNA, 1949 bp, Homo sapiens
  Payload ID: 1147
  Gene Symbol: ANKRD42
  Gene Name: ankyrin repeat domain 42
  ENST ID: ENST00000533342
  CDS Start-End: 27-1610
ctccccagagtcggaggtgttgcgccatgcccggggtggccaattcaggcccctccacttcctctagggagactgcaaacccctgttccaggaagaaggtgcattttggcagcatacatgatgcagtacgagctggagatgtaaagcagctttcagaaatagtggtacgtggagccagcattaatgaacttgatgttctccataagtttacccctttacattgggcagcacattctggaagtttggagtgtcttcattggctgctctggcatggagctgatatcacacacgtaacaacgagaggttggacagcatctcacatagctgcaatcaggggtcaggatgcttgtgtacaggctcttataatgaatggagcaaatctgacagcccaggatgaccggggatgcactcctttacatcttgctgcaactcatggacattctttcactttacaaataatgctccgaagtggagtggatcccagtgtgactgataagagagaatggagacctgtgcattatgcagcttttcatgggcggcttggctgcttgcaacttcttgttaaatggggttgtagcatagaagatgtggactacaatggaaaccttccagttcacttagcagccatggaaggccaccttcactgtttcaaattcctagtcagtagaatgagcagtgcgacgcaagttttaaaagctttcaatgataatggagaaaatgtactggatttggcccagaggttcttcaagcagaacattttacagtttatccagggggctgagtatgaaggaaaagacctagaggatcaggaaactttagcatttccaggtcatgtggctgcctttaagggtgatttggggatgcttaagaaattagtggaagatggagtaatcaatattaatgagcgtgctgataatggatcaactcctatgcataaagctgctggacaaggccacatagagtgtttgcagtggttaattaaaatgggagcagacagtaatattaccaacaaagcaggggagagacccagtgatgtggcaaagaggtttgcccatttggcagcagtgaagctgttagaggagctacagaaatatgatatagatgacgaaaatgaaattgatgaaaatgatgtgaaatattttataagacatggtgttgagggaagcactgatgccaaggatgatttatgtctgagtgacttggataaaacagatgccagaatgagagcttacaagaaaattgtagaattgagacacctcctggaaattgccgagagcaactataaacacttgggaggcataacagaagaagatttaaagcagaagaaagaacagcttgagtctgaaaagaccatcaaagaactgcagggccagctggagtatgaacgactacgtagagaaaaattagaatgtcagcttgatgaatatcgagcagaagttgatcaactcagggaaacactggaaaaaattcaagtcccaaactttgtggctatggttggtgtcctttttaatacatttatttttctcaagaagtatatacaagagtggccaagagtacaagctttgggctggggctctttggacttgaatcctggctatagtcttttttgatttgggctactcatttaacctttttgtgcctcaactataaactggagatgataacttatactttctagagctgatgacaggattaaaggaatacacacacacacacacacacacacacacacacacacacactctatatgtaactataactttctagatacatacacacatctgtctatctatcttcaaacagcagcctagttcataagtattattgttaacattgtaccatagaaggagaaaatgttttcataagtaatcaatcagaattctaagacagctagaggatatgtatattttaatattctaaataaccaaaataaagtgctttgaatggaa

SEQ ID NO: 107720 - DNA, 6104 bp, Homo sapiens
  Payload ID: 1148
  Gene Symbol: ANKRD44
  Gene Name: ankyrin repeat domain 44
  Uniprot ID: Q8N8A2
  ENST ID: ENST00000282272
  CDS Start-End: 194-3175
tgcaaaccccactagccagtgtcagcctctcggcgggaggaggcggcggcggaggaggagcagggggagggctgtcaaattcgggagccagattttttcccttctcctggcaatcccttccgcttccccggctcccggcgtgacatctgcgggccggggacctgcatgtgtgtgcgcgcgaaggagcggaagaatggcagtgctcaaactcaccgaccagccaccattggttcaggcaatcttcagcggtgatccagaggagatccggatgctcatccataaaactgaagatgtgaatactctggattctgagaaacgaacccctcttcatgtggccgcatttctgggagatgcagagatcattgaactcctgattttgtcaggagctcgtgtaaatgccaaggacaacatgtggctgactccactgcaccgggctgttgcttccagaagtgaagaagcagtacaggttttgattaagcactcagctgatgtcaatgcaagggacaagaactggcagacccctcttcatgtggcagcagccaacaaggctgtcaaatgtgcagaagtgatcattcccctgctgagcagtgtcaatgtctccgaccgaggggggcgcacagccttgcaccatgcggctctgaacggccacgtggagatggtcaatttactcttggccaaaggggcaaatatcaatgcatttgacaagaaggaccggcgtgctctgcactgggcagcatacatgggccacttggatgttgtagcattgctcattaaccatggcgcagaagtgacctgtaaggataagaagggttatacccctctgcatgctgcagcctccaatggacagattaatgttgtcaagcatctcctgaacctgggggtggagattgatgaaatcaatgtctatggaaatacagcgcttcacatcgcctgctacaatggacaggatgctgtggttaacgagttgattgactacggtgctaacgtgaaccagccaaacaataatgggttcacccctttgcattttgctgctgcctccactcatggtgctttgtgtcttgaattgttagtaaacaacggggcagatgttaacattcagagtaaagatggcaaaagtccactgcacatgacagctgtccatggaaggttcacacggtcacagaccctcattcagaatggaggtgaaattgactgtgtggataaggacggcaacactcctctccatgtggctgcaagatacggtcatgagcttttgattaacaccttaataaccagcggagctgacacagccaagtgtggaatccatagcatgttccctttacatttagctgccctaaatgctcactctgactgctgcagaaagttgttatcatcgggctttgaaatagacaccccagataaatttggaagaacgtgccttcatgctgctgctgcaggaggtaatgtggaatgtataaaactcttgcagagcagcggagcagatttccataaaaaggacaagtgtgggaggacccctttgcactatgcagctgcgaattgtcatttccactgtattgagacattagtgaccacaggggccaacgttaatgaaacagatgactggggacgcacagctttgcattacgccgctgcatcagacatggatagaaataagactatcttaggaaatgcccatgataattcagaagaacttgaaagagccagggagctgaaggaaaaggaagccacactatgtctagagtttctgcttcaaaatgatgcaaatccatctatccgggacaaggaaggttacaatagcatacattatgctgccgcctatgggcacaggcagtgtctggaattgcttttggaaagaacaaacagtggatttgaagaatcagattctggtgctactaagagtccactccacttagctgcctacaatgggcaccatcaagccttggaagtccttctgcagtcgttggtggacctggacatcagggatgagaaaggccgcactgctctggatctggctgcctttaaaggacacacagaatgtgtggaagcgcttatcaatcagggcgcatccatctttgtgaaagacaatgtaaccaaaagaaccccacttcatgcctcagtaattaatggtcacacactgtgtttacggctgttgctagaaattgcagacaacccggaggcggtcgatgtgaaagatgccaaaggacaaacaccactgatgcttgcagtagcatatggacatattgacgctgtttcattgttacttgaaaaggaagccaacgtagacactgttgacatcctaggatgcacagctttacacagagggattatgacaggacacgaggaatgtgtgcaaatgctgctggaacaagaagtgtcaattctctgtaaagattccagagggaggacgcccttgcactatgcagctgctcgtggccacgccacgtggctgagcgagctgctccaaatggctctttctgaggaggactgttgtttcaaagataaccaaggctacacgccgctgcactgggcttgttacaatggtaatgaaaactgtatagaggtacttttggagcaaaaatgttttcgcaaatttatcggtaatccctttactccactgcactgtgcaataatcaatgatcatgggaattgtgcatcattgctgcttggggccatagattccagtatcgtcagttgtagagatgacaaaggcaggacaccccttcatgcggcagcatttgctgatcatgtggagtgcttgcagcttcttctgagacacagtgctccagtgaacgcagtagataattcagggaaaacagcactgatgatggctgctgagaatgggcaggcaggcgctgtggatattttggtgaacagtgcccaggctgatctgactgtaaaggataaggacttgaatacacccttacatttggcttgtagtaaaggtcatgaaaaatgtgccttgttaatacttgacaagatacaagacgagagccttattaatgaaaaaaataatgcactgcagacacccctccacgtcgctgcgcgcaatggcttaaaggtggtagttgaggagttgctggccaaaggggcctgtgtacttgctgtagatgaaaatgcttctaggtcaaatggaccccgttccacacctggaaccgctgtacaaaaagaagaatgagactctttaaaaattatgcacatacacatgcacacatatatgtgtgcgtgtgtatatatatatatatgtgtgtgtgtgtgtagttcatcagccagctacacatgaggaccaaaatgcttcagtctaaaatggaagatacacatttttttccttcaaaatgcaagtgagaactgaagtagcttttttatggagttaaatgtaatctttctgtgtaccagtctttgttgtattttatatttcttaggacacagatttctagttgaccacttaacatttgtaactgatgatgtgctgacctttttttttttttttgccaaactagagaaaatgtccatatacttttgctgtaaatgtgtttatatttatttgaaatgaaacaaatggtgaggaaacatccattatttgttctctattttaattgctatgtatcttatttagaataacaaaaaaaaagtgaaaaaaaaaacacttgaccctgggctagccaaaagcccaagggccaaacctagcatttccactgctaaggtttccagatgaccctcaggttcttccgcgttggttagagagggctacgcatcttctactgctcagccacagtctgtagccagcttagagcttagaagacattgcagtctggatgcccttctgcgagatgaaaactcagatgtgtagtggatcatatacacaaaggcagcacaaagaaatatctagaaattaccctaagtacactgaaaagctcacatagtctcagtaacctgatgagaaatgatggcagtgtgtgggcacatgtgccaaaaggagaaataaaaatcaccagctcaagtgctattttctacttgaggaagagacagaaaagaaatgtgtcgaattagagcagtactctctgacgttttataatgagttccatttccaccctggaaattgctattttatagtgtatgtgagatatttcaaaaataatgttctatcatatctggatcaaagacagataactgtattatatttttcatctagctataaaactttaatcttactcttaatatcctggatttaattaaaactcctgttgggttcttcacaaatgagaacttgttcaaaggatttattgaactggtattgatttcactgaaaattttccacaccaccaccattgtttttttgaattcttggtgttgtgcttcccaccttctgtccttttcgtttgtttagagaagatgaatttttaaaaagcagataaattgctaatgagcaataatgaccttatctttaccaaaacactgaaaattaagagaggttcagtgttgaagaagcacaatatgctgcggtgtctttttctagaagtgaatggaaatcttgctcagttggcatttcaagcaggaaatgaaatgcttgctttaatggcaaagcagcgttaacatttttcctgtcgtgtagcagagagtacaagaatcatttcagcaaagcagtgactcaccatgagacgttatctccatggagctgcgttttgacttttcccactctcttactcatagaaggaggacaaaggaacgaaatgaaatcatgctcacaatgaactgttcattacatcaactgatctctctctctctctcttcctctctttctctttctcccataccccaaggcaaaatttttttaaagaaatgactttaaaaactatcatttctgtattttaattacatctcttagaaataaaattatgtttgcaccatagctttctaagaaaaaaaaatgtgtttttaactgagtcttagttgcttagtgcttttatttgtgttatttttagactgtattttaaccacaactacaaggatcatgtttcattgcacttacttatttgccagtgtctgcctgtctttgctaaatacattactatctccaaattgcctaaaatctgctatgattctacagtaaatagctcagggtatttctatttatcactactaaaagggcaccatagtatgttttggtactttaggcagtaaacactgcttggtttatcattttgttattaaattagaacaagaacatcaaatggatttgctgcactagttattctttgtactgttgagcaacttggtgtgcttatatgttgtgttggttgaagaactcatccgttttattgtcttgtaatatgaagttagagtgcctttttatatttgtatattctgaaaatgttctgtggaatgttttgtattttttcatttgagtgttatcagagcaatatgataccagtgagttttcatttcaacttttctttgaatgtataaagtgtcttttttcctatttccccttgtacttgcattgaaatgaatatgaaaatgcttaagttttctataggaattgtttgattttgcagtgctaaaatgctttcgtcttacgaaactataaaccataggtcagtattataggggaaaagcattttaagatagtgacaatctgagtgtttgtataaaatgtaattctatgcgtttcttatgtgatctaaaaattcaatgcaaatatcttttatttggtagttttgtctacatattttatgctctagcatgtgcaatatatctttgtaaagcacgatgatacaaatctggtgccagtgttatattttgcataacatatttgtaacagcataaaatattgtttgatgatttcagtgggattttgtctataatgttttcttatgtaaattggagttgaatgactctggtaaatgtcatgactgtaaaaatggggaaaatgacttttagttcagtgaatgactttgaaacaatctgaatcttctcaagcacagtttaatacttttgcaactactgaatgctctaataacgtaatgaagtacttaactgtaatatactatggaaatgcattcagatggttatttttacaaataaaaacggtacaaatattgttggaa

SEQ ID NO: 107721 - DNA, 3686 bp, Homo sapiens
  Payload ID: 1148
  Gene Symbol: ANKRD44
  Gene Name: ankyrin repeat domain 44
  Uniprot ID: Q8N8A2
  ENST ID: ENST00000328737
  CDS Start-End: 78-2837
ttcagaggctgcgtctttcaggaggccagccaccattggttcaggcaatcttcagcggtgatccagaggagatccggatgctcatccataaaactgaagatgtgaatactctggattctgagaaacgaacccctcttcatgtggccgcatttctgggagatgcagagatcattgaactcctgattttgtcaggagctcgtgtaaatgccaaggacaacatgtggctgactccactgcaccgggctgttgcttccagaagtgaagaagcagtacaggttttgattaagcactcagctgatgtcaatgcaagggacaagaactggcagacccctcttcatgtggcagcagccaacaaggctgtcaaatgtgcagaagtgatcattcccctgctgagcagtgtcaatgtctccgaccgaggggggcgcacagccttgcaccatgcggctctgaacggccacgtggagatggtcaatttactcttggccaaaggggcaaatatcaatgcatttgacaagaaggaccggcgtgctctgcactgggcagcatacatgggccacttggatgttgtagcattgctcattaaccatggcgcagaagtgacctgtaaggataagaagggttatacccctctgcatgctgcagcctccaatggacagattaatgttgtcaagcatctcctgaacctgggggtggagattgatgaaatcaatgtctatggaaatacagcgcttcacatcgcctgctacaatggacaggatgctgtggttaacgagttgattgactacggtgctaacgtgaaccagccaaacaataatgggttcacccctttgcattttgctgctgcctccactcatggtgctttgtgtcttgaattgttagtaaacaacggggcagatgttaacattcagagtaaagatggcaaaagtccactgcacatgacagctgtccatggaaggttcacacggtcacagaccctcattcagaatggaggtgaaattgactgtgtggataaggacggcaacactcctctccatgtggctgcaagatacggtcatgagcttttgattaacaccttaataaccagcggagctgacacagccaagtgtggaatccatagcatgttccctttacatttagctgccctaaatgctcactctgactgctgcagaaagttgttatcatcgggctttgaaatagacaccccagataaatttggaagaacgtgccttcatgctgctgctgcaggaggtaatgtggaatgtataaaactcttgcagagcagcggagcagatttccataaaaaggacaagtgtgggaggacccctttgcactatgcagctgcgaattgtcatttccactgtattgagacattagtgaccacaggggccaacgttaatgaaacagatgactggggacgcacagctttgcattacgccgctgcatcagacatggatagaaataagactatcttaggaaatgcccatgataattcagaagaacttgaaagagccagggagctgaaggaaaaggaagccacactatgtctagagtttctgcttcaaaatgatgcaaatccatctatccgggacaaggaaggttacaatagcatacattatgctgccgcctatgggcacaggcagtgtctggaattgcttttggaaagaacaaacagtggatttgaagaatcagattctggtgctactaagagtccactccacttagctgcctacaatgggcaccatcaagccttggaagtccttctgcagtcgttggtggacctggacatcagggatgagaaaggccgcactgctctggatctggctgcctttaaaggacacacagaatgtgtggaagcgcttatcaatcagggcgcatccatctttgtgaaagacaatgtaaccaaaagaaccccacttcatgcctcagtaattaatggtcacacactgtgtttacggctgttgctagaaattgcagacaacccggaggcggtcgatgtgaaagatgccaaaggacaaacaccactgatgcttgcagtagcatatggacatattgacgctgtttcattgttacttgaaaaggaagccaacgtagacactgttgacatcctaggatgcacagctttacacagagggattatgacaggacacgaggaatgtgtgcaaatgctgctggaacaagaagtgtcaattctctgtaaagattccagagggaggacgcccttgcactatgcagctgctcgtggccacgccacgtggctgagcgagctgctccaaatggctctttctgaggaggactgttgtttcaaagataaccaaggctacacgccgctgcactgggcttgttacaatggtaatgaaaactgtatagaggtacttttggagcaaaaatgttttcgcaaatttatcggtaatccctttactccactgcactgtgcaataatcaatgatcatgggaattgtgcatcattgctgcttggggccatagattccagtatcgtcagttgtagagatgacaaaggcaggacaccccttcatgcggcagcatttgctgatcatgtggagtgcttgcagcttcttctgagacacagtgctccagtgaacgcagtagataattcagggaaaacagcactgatgatggctgctgagaatgggcaggcaggcgctgtggatattttggtgaacagtgcccaggctgatctgactgtaaaggataaggacttgaatacacccttacatttggcttgtagtaaaggtcatgaaaaatgtgccttgttaatacttgacaagatacaagacgagagccttattaatgaaaaaaataatgcactgcagacgtaagtgtaactactaaagttggacttgaacccagggtcatagtcatttattcaataagtattaagagcctgctgtgtgccagactagctctggggagcacagtggtgaaagatgcagtcctggcttcccctgcatgaaggtgacagtcacatacctacaagtgctgaccaagctgggcagttttagttagaatccttcttttgatatgtcttcatttaattttgtgaagtctctctttttctttgctgatatttctggggtaatattataaatttagtgggctgttagaaaaattttatggactgacatatttggggaaactatttgtattatgtattagcattatgtattctgactggaaaatgacagttttgcaaatcagtttcccagaatacatttgaagagtttctaagctatttgtcttgattatattttaatataattcagtgtaacccttggtgtgaaagatctaaaagctgtttcattttccgctttaggaaattatttatgcatttgttttaaaggcaaaggaatttttttcatttaagattcttaagccgggcgtggtggctcatgcctttaatcccagcactttgggaggccgaggcagttggattacttgaggccaggagttcatgacccgcctggccaacatggtgaaaccccgtctctactaaaaatacaacaacaacaaaattagctgggcatgatggtgggtgcctgtaacctcagctacttgggaggctgaggcaggagaatcacttgaacctgggaggtggaggttgctgtgagctgagatcgtgccactgcaccactccagcctgggcaacaagagcgagactgtccccccac

SEQ ID NO: 107722 - DNA, 2724 bp, Homo sapiens
  Payload ID: 1148
  Gene Symbol: ANKRD44
  Gene Name: ankyrin repeat domain 44
  Uniprot ID: Q8N8A2
  ENST ID: ENST00000409153
  CDS Start-End: 184-1923
actagccagtgtcagcctctcggcgggaggaggcggcggcggaggaggagcagggggagggctgtcaaattcgggagccagattttttcccttctcctggcaatcccttccgcttccccggctcccggcgtgacatctgcgggccggggacctgcatgtgtgtgcgcgcgaaggagcggaagaatggcagtgctcaaactcaccgaccagccaccattggttcaggcaatcttcagcggtgatccagaggagatccggatgctcatccataaaactgaagatgtgaatactctggattctgagaaacgaacccctcttcatgtggccgcatttctgggagatgcagagatcattgaactcctgattttgtcaggagctcgtgtaaatgccaaggacaacatgtggctgactccactgcaccgggctgttgcttccagaagtgaagaagcagtacaggttttgattaagcactcagctgatgtcaatgcaagggacaagaactggcagacccctcttcatgtggcagcagccaacaaggctgtcaaatgtgcagaagtgatcattcccctgctgagcagtgtcaatgtctccgaccgaggggggcgcacagccttgcaccatgcggctctgaacggccacgtggagatggtcaatttactcttggccaaaggggcaaatatcaatgcatttgacaagaaggaccggcgtgctctgcactgggcagcatacatgggccacttggatgttgtagcattgctcattaaccatggcgcagaagtgacctgtaaggataagaagggttatacccctctgcatgctgcagcctccaatggacagattaatgttgtcaagcatctcctgaacctgggggtggagattgatgaaatcaatgtctatggaaatacagcgcttcacatcgcctgctacaatggacaggatgctgtggttaacgagttgattgactacggtgctaacgtgaaccagccaaacaataatgggttcacccctttgcattttgctgctgcctccactcatggtgctttgtgtcttgaattgttagtaaacaacggggcagatgttaacattcagagtaaagatggcaaaagtccactgcacatgacagctgtccatggaaggttcacacggtcacagaccctcattcagaatggaggtgaaattgactgtgtggataaggacggcaacactcctctccatgtggctgcaagatacggtcatgagcttttgattaacaccttaataaccagcggagctgacacagccaagtgtggaatccatagcatgttccctttacatttagctgccctaaatgctcactctgactgctgcagaaagttgttatcatcgggctttgaaatagacaccccagataaatttggaagaacgtgccttcatgctgctgctgcaggaggtaatgtggaatgtataaaactcttgcagagcagcggagcagatttccataaaaaggacaagtgtgggaggacccctttgcactatgcagctgcgaattgtcatttccactgtattgagacattagtgaccacaggggccaacgttaatgaaacagatgactggggacgcacagctttgcattacgccgctgcatcagacatggatagaaataagactatcttaggaaatgcccatgataattcagaagaacttgaaagagccagggagctgaaggaaaaggaagccacactatgtctagagtttctgcttcaaaatgatgcaaatccatctatccgggacaaggaaggttacaatagcatacattatgctgccgcctatgggcacaggcagtgtctggaattggtgagttgttttgttttgttttctctaacacacacacacacacataccccaaatcacagaggcattaactgtttttttccagagttgtagctctggcttgtgtaaaaagtgggtccatgaatcaggatttcatgaattctgatttcaaaaagtgttttttctactgcaccatgctgccttccattgcaggttagagccccaccaccacccaaggcttttaagcacagcacaaaagcatggtagtcatcgatataaggcagtaccatttctgcctcctaacaccagcattgccatggaagttggtatagacctattagcaaatatggctttgtgtttagatcccatataagaaatgctcctcacaaaatgtgtatgcgtgtgtgtgtgtgtgtgtgtgtgtgtgtgtgtgtgtggtaatcagtggcagagtgaaggctttctactgtcactacatattatgagcctgccttccaaaatatacttaagacacagctgtctttaattggttttctctatgaaaaccatgtcataattgtcatgataaaacaaacttttattatacagtttgttattatagtcttaataatgtgtgctgttctatagtacttttgtgagttatctttaatccttcatagtctagaaactcaggataattatcctaacaccttctttgtatagaaataacatatcgcatgcaatatcttcattttttcaggaagaccattttggtaccattatttctgttattcaagtaagagtttttcctgtccataagaaggtttcacaaattttgtctgaaaatgaaattacccccctttgattagatcaacatttgccctgtgtaatttacaaagagatgactatttgtgacaattataaaacattcaaaaa

SEQ ID NO: 107723 - DNA, 1622 bp, Homo sapiens
  Payload ID: 1148
  Gene Symbol: ANKRD44
  Gene Name: ankyrin repeat domain 44
  Uniprot ID: Q8N8A2
  ENST ID: ENST00000409919
  CDS Start-End: 184-1287
actagccagtgtcagcctctcggcgggaggaggcggcggcggaggaggagcagggggagggctgtcaaattcgggagccagattttttcccttctcctggcaatcccttccgcttccccggctcccggcgtgacatctgcgggccggggacctgcatgtgtgtgcgcgcgaaggagcggaagaatggcagtgctcaaactcaccgaccagccaccattggttcaggcaatcttcagcggtgatccagaggagatccggatgctcatccataaaactgaagatgtgaatactctggattctgagaaacgaacccctcttcatgtggccgcatttctgggagatgcagagatcattgaactcctgattttgtcaggagctcgtgtaaatgccaaggacaacatgtggctgactccactgcaccgggctgttgcttccagaagtgaagaagcagtacaggttttgattaagcactcagctgatgtcaatgcaagggacaagaactggcagacccctcttcatgtggcagcagccaacaaggctgtcaaatgtgcagaagtgatcattcccctgctgagcagtgtcaatgtctccgaccgaggggggcgcacagccttgcaccatgcggctctgaacggccacgtggagatggtcaatttactcttggccaaaggggcaaatatcaatgcatttgacaagaaggaccggcgtgctctgcactgggcagcatacatgggccacttggatgttgtagcattgctcattaaccatggcgcagaagtgacctgtaaggataagaagggttatacccctctgcatgctgcagcctccaatggacagattaatgttgtcaagcatctcctgaacctgggggtggagattgatgaaatcaatgtctatggaaatacagcgcttcacatcgcctgctacaatggacaggatgctgtggttaacgagttgattgactacggtgctaacgtgaaccagccaaacaataatgggttcacccctttgcattttgctgctgcctccactcatggtgctttgtgtcttgaattgttagtaaacaacggggcagatgttaacattcagagtaaagatggcaaaagtccactgcacatgacagctgtccatggaaggttcacacggtcacagaccctcattcagaatggaggtgaaattgactgtgtggataaggacggcaacactcctctccatgtggctgcaagatacggtcatgagcttttgattaacaccttaataaccagcggagctgacacagccaagtaggttaccgcaaaaatacggtggaataattgcctcaagtgggaatactgccaaaaagattcttccgtgcagtagatagttcccatttatccaggttaaggtggatctataccattatactaaatacaaattaaattttaaataaattaagtgccttttaatgacagaggcaaagaagaaccaattttattttttagcttcatccaaatgaggtctatttcagtggttttaattaaggaaacttgaactttattcgtaacttttctttctaatattcttctgtccttcccaatgcttcatattaaacaggaaaaataaaacctaactgagccaattta

SEQ ID NO: 107724 - DNA, 326 bp, Homo sapiens
  Payload ID: 1148
  Gene Symbol: ANKRD44
  Gene Name: ankyrin repeat domain 44
  ENST ID: ENST00000443014
  CDS Start-End: 98-326
ttaggggaagggggcgtaaccccatctccccggttaaagtggacggcatccaccattggttcaggcaatcttcagcggtgatccagaggagatccggatgctcatccataaaactgaagatgtgaatactctggattctgagaaacgaacccctcttcatgtggccgcatttctgggagatgcagagatcattgaactcctgattttgtcaggagctcgtgtaaatgccaaggacaacatgtggctgactccactgcaccgggctgttgcttccagaagtgaagaagcagtacaggttttgattaagcactcagctgatgtcaatg

SEQ ID NO: 107725 - DNA, 2798 bp, Homo sapiens
  Payload ID: 1148
  Gene Symbol: ANKRD44
  Gene Name: ankyrin repeat domain 44
  ENST ID: ENST00000424317
  CDS Start-End: 1-2376
aagaagggttatacccctctgcatgctgcagcctccaatggacagattaatgttgtcaagcatctcctgaacctgggggtggagattgatgaaatcaatgtctatggaaatacagcgcttcacatcgcctgctacaatggacaggatgctgtggttaacgagttgattgactacggtgctaacgtgaaccagccaaacaataatgggttcacccctttgcattttgctgctgcctccactcatggtgctttgtgtcttgaattgttagtaaacaacggggcagatgttaacattcagagtaaagatggcaaaagtccactgcacatgacagctgtccatggaaggttcacacggtcacagaccctcattcagaatggaggtgaaattgactgtgtggataaggacggcaacactcctctccatgtggctgcaagatacggtcatgagcttttgattaacaccttaataaccagcggagctgacacagccaagtgtggaatccatagcatgttccctttacatttagctgccctaaatgctcactctgactgctgcagaaagttgttatcatcgggacaaaagtatagcatagtatccttgtttagtaatgagcacgtgctgtctgcaggctttgaaatagacaccccagataaatttggaagaacgtgccttcatgctgctgctgcaggaggtaatgtggaatgtataaaactcttgcagagcagcggagcagatttccataaaaaggacaagtgtgggaggacccctttgcactatgcagctgcgaattgtcatttccactgtattgagacattagtgaccacaggggccaacgttaatgaaacagatgactggggacgcacagctttgcattacgccgctgcatcagacatggatagaaataagactatcttaggaaatgcccatgataattcagaagaacttgaaagagccagggagctgaaggaaaaggaagccacactatgtctagagtttctgcttcaaaatgatgcaaatccatctatccgggacaaggaaggttacaatagcatacattatgctgccgcctatgggcacaggcagtgtctggaattgcttttggaaagaacaaacagtggatttgaagaatcagattctggtgctactaagagtccactccacttagctgcctacaatgggcaccatcaagccttggaagtccttctgcagtcgttggtggacctggacatcagggatgagaaaggccgcactgctctggatctggctgcctttaaaggacacacagaatgtgtggaagcgcttatcaatcagggcgcatccatctttgtgaaagacaatgtaaccaaaagaaccccacttcatgcctcagtaattaatggtcacacactgtgtttacggctgttgctagaaattgcagacaacccggaggcggtcgatgtgaaagatgccaaaggacaaacaccactgatgcttgcagtagcatatggacatattgacgctgtttcattgttacttgaaaaggaagccaacgtagacactgttgacatcctaggatgcacagctttacacagagggattatgacaggacacgaggaatgtgtgcaaatgctgctggaacaagaagtgtcaattctctgtaaagattccagagggaggacgcccttgcactatgcagctgctcgtggccacgccacgtggctgagcgagctgctccaaatggctctttctgaggaggactgttgtttcaaagataaccaaggctacacgccgctgcactgggcttgttacaatggtaatgaaaactgtatagaggtacttttggagcaaaaatgttttcgcaaatttatcggtaatccctttactccactgcactgtgcaataatcaatgatcatgggaattgtgcatcattgctgcttggggccatagattccagtatcgtcagttgtagagatgacaaaggcaggacaccccttcatgcggcagcatttgctgatcatgtggagtgcttgcagcttcttctgagacacagtgctccagtgaacgcagtagataattcagggaaaacagcactgatgatggctgctgagaatgggcaggcaggcgctgtggatattttggtgaacagtgcccaggctgatctgactgtaaaggataaggacttgaatacacccttacatttggcttgtagtaaaggtcatgaaaaatgtgccttgttaatacttgacaagatacaagacgagagccttattaatgaaaaaaataatgcactgcagacacccctccacgtcgctgcgcgcaatggcttaaaggtggtagttgaggagttgctggccaaaggggcctgtgtacttgctgtagatgaaaatggctgttaaccattcaagatccaagaacatcggttggctgcaaaacaggcaccctgagggaccaattatgaatcagaatgcactttatcccagccacagaacgcaaagggttacactctgcaggagctgcggttggggaagggaaagggagtaaccggattcgccttgcctgtctgtgattgggaagcacgcaccctttattttccaactgggaacaagatactggaaattcctctttcccttagaaaacagaaggcaagggtgttggctgtggaaattagaactgggtaatatttctagagcactttgaaattctttcaggataagtgttatacgaacacaaatgatttctttcattgttaaattgtgttcctatcattggtaacgccccaagtaaagcctttttaattaaaaatctctggatgctataa

SEQ ID NO: 107726 - DNA, 576 bp, Homo sapiens
  Payload ID: 1148
  Gene Symbol: ANKRD44
  Gene Name: ankyrin repeat domain 44
  ENST ID: ENST00000447713
  CDS Start-End: 194-316
tgcaaaccccactagccagtgtcagcctctcggcgggaggaggcggcggcggaggaggagcagggggagggctgtcaaattcgggagccagattttttcccttctcctggcaatcccttccgcttccccggctcccggcgtgacatctgcgggccggggacctgcatgtgtgtgcgcgcgaaggagcggaagaatggcagtgctcaaactcaccgaccagccaccattggttcaggcaatcttcagcggtgatccagaggagatccggatgctcatccataaaactgaagatgtgaatactctggagctcgtgtaaatgccaaggacaacatgtggctgactccactgcaccgggctgttgcttccagaagtgaagaagcagtacaggttttgattaagcactcagctgatgtcaatgcaagggacaagaactggcagacccctcttcatgtggcagcagccaacaaggctgtcaaatgtgcagaagtgatcattcccctgctgagcagtgtcaatgtctccgaccgaggggggcgcacagccttgcaccatgcggctctgaacggccacgtggag

SEQ ID NO: 107727 - DNA, 1000 bp, Homo sapiens
  Payload ID: 1148
  Gene Symbol: ANKRD44
  Gene Name: ankyrin repeat domain 44
  ENST ID: ENST00000448801
  CDS Start-End: 1-547
aatcaatgatcatgggaattgtgcatcattgctgcttggggccatagattccagtatcgtcagttgtagagatgacaaaggcaggacaccccttcatgcggcagcatttgctgatcatgtggagtgcttgcagcttcttctgagacacagtgctccagtgaacgcagtagataattcagggaaaacagcactgatgatggctgctgagaatgggcaggcaggcgctgtggatattttggtgaacagtgcccaggctgatctgactgtaaaggataaggacttgaatacacccttacatttggcttgtagtaaaggtcatgaaaaatgtgccttgttaatacttgacaagatacaagacgagagccttattaatgaaaaaaataatgcactgcagacacccctccacgtcgctgcgcgcaatggcttaaaggtggtagttgaggagttgctggccaaaggggcctgtgtacttgctgtagatgaaaatgcttctaggtcaaatggaccccgttccacacctggaaccgctgtacaaaaagaagaatgagactctttaaaaattatgcacatacacatgcacacatatatgtgtgcgtgtgtatatatatatatatgtgtgtgtgtgtgtagttcatcagccagctacacatgaggaccaaaatgcttcagtctaaaatggaagatacacatttttttccttcaaaatgcaagtgagaactgaagtagcttttttatggagttaaatgtaatctttctgtgtaccagtctttgttgtattttatatttcttaggacacagatttctagttgaccacttaacatttgtaactgatgatgtgctgacctttttttttttttttgccaaactagagaaaatgtccatatacttttgctgtaaatgtgtttatatttatttgaaatgaaacaaatggtgaggaaacatccattatttgttctctattttaattgctatgtatcttatttagaataacaaaaaaaaa

SEQ ID NO: 107728 - DNA, 949 bp, Homo sapiens
  Payload ID: 1148
  Gene Symbol: ANKRD44
  Gene Name: ankyrin repeat domain 44
  ENST ID: ENST00000422886
  CDS Start-End: 1-949
agtaaagatggcaaaagtccactgcacatgacagctgtccatggaaggttcacacggtcacagaccctcattcagaatggaggtgaaattgactgtgtggataaggacggcaacactcctctccatgtggctgcaagatacggtcatgagcttttgattaacaccttaataaccagcggagctgacacagccaagtgtggaatccatagcatgttccctttacatttagctgccctaaatgctcactctgactgctgcagaaagttgttatcatcgggctttgaaatagacaccccagataaatttggaagaacgtgccttcatgctgctgctgcaggagggacccctttgcactatgcagctgcgaattgtcatttccactgtattgagacattagtgaccacaggggccaacgttaatgaaacagatgactggggacgcacagctttgcattacgccgctgcatcagacatggatagaaataagactatcttaggaaatgcccatgataattcagaagaacttgaaagagccagggagctgaaggaaaaggaagccacactatgtctagagtttctgcttcaaaatgatgcaaatccatctatccgggacaaggaaggttacaatagcatacattatgctgccgcctatgggcacaggcagtgtctggaattgcttttggaaagaacaaacagtggatttgaagaatcagattctggtgctactaagagtccactccacttagctgcctacaatgggcaccatcaagccttggaagtccttctgcagtcgttggtggacctggacatcagggatgagaaaggccgcactgctctggatctggctgcctttaaaggacacacagaatgtgtggaagcgcttatcaatcagggcgcatccatctttgtgaaagacaatgtaaccaaaagaaccccacttcatgcctcag

SEQ ID NO: 107729 - DNA, 1446 bp, Homo sapiens
  Payload ID: 1149
  Gene Symbol: ANKRD45
  Gene Name: ankyrin repeat domain 45
  Uniprot ID: Q5TZF3
  ENST ID: ENST00000333279
  CDS Start-End: 62-862
gttgcgccgttgctatggtaaccgaggaggccggggcccgggtgtggtatttttggagttaatggagtcagaaggacctccagagtcagagagttcagaatttttctcacagcaagaagaggaaaatgaagaagaagaagcccaagaaccagaggaaacaggccctaagaacccccttttacaacctgctctcacaggggatgtagagggtttgcagaagatatttgaggatcctgagaatcctcatcatgaacaggccatgcagcttctcttagaagaagacatcgttgggagaaatttgttgtatgcagcttgcatggctgggcaaagtgacgtgattagagctttggcaaaatatggtgtgaatctgaatgaaaaaaccaccagagggtacacactcttacattgtgctgcagcctggggtcgtttggaaactttgaaagcactggtagaactggatgttgatatagaagctttgaacttccgggaagaaagggctcgagatgttgctgctagatattctcagactgagtgtgttgaattcctggactgggcagatgcaaggctgactctgaaaaaatatattgcaaaagtctctttagctgttactgacacagaaaagggatcagggaaactccttaaggaagacaagaataccatcctcagtgcatgccgtgcaaaaaatgagtggttggaaacccatacagaagcttccattaatgagctttttgagcagagacaacaactggaagatattgtgactcctatcttcacaaaaatgactacaccatgtcaagtgaaaagtgccaaatctgtaacaagccatgaccagaagagaagtcaagatgatacctccaactgaacatacgttctgtaaaaggccacattttcttttagtatctgaaaggcaaacctattcatgccatttgaaatcgagaaaacagatgtgggtttctttaagtatttaagtacaacattacatcgcccttgttttgtttgacctgttcagcatgcttatgtccggactctggcctcgcctctgctcctccaagcacagccccatgtgagtttcacgtgctccttcaggaaagcacttgggtataaatcattcgtgaagaccatgtggaggctttaagaactactcagagaatctaataattttctgtgtaattgaggcattccatataaaaggacatatttggctatttccagagaaaaaatttgttctccctgcctaaaaaggaaatcttatggaatgacacttggagcaaggaaatattaagaccagcttggattaggagcctctgggtacaactatcactttttatgtccaaaattaaatttcacctgtgaggtggggtatacctctgagtaaaacccctctttatctttgacctccttctatctgtaaattaataaacacaaatctgtatagttttatactta

SEQ ID NO: 107730 - DNA, 2649 bp, Homo sapiens
  Payload ID: 1150
  Gene Symbol: ANKRD46
  Gene Name: ankyrin repeat domain 46
  Uniprot ID: Q86W74
  ENST ID: ENST00000335659
  CDS Start-End: 180-866
accgcctccttgaagctgccgctgtcgctgctgctcgttcgagtcgcagatccttgccagcacattacagaatatttttgttgaaccttcttgagaattcagagaaactgctgagtgaccactgaacgaaaagatctaatcttaaggcttacgcgtgttccatccaccacatcagaacaatgtcgtatgtttttgtaaatgattcttctcagactaacgtgcccttgctgcaagcctgtattgatggggactttaattattccaagcggcttttggaaagtggctttgacccaaatattcgtgacagcaggggcagaacaggccttcaccttgcagcagctcgagggaatgtagacatctgccagttactgcataaattcggtgccgatcttctggccacagattatcaaggaaacacagctcttcacctctgtggccatgtggatactatccaatttttggtttccaatggactcaaaattgatatttgcaatcatcaaggtgctacccctttagttctggcaaagcgcagaggagtaaataaagatgtcatccgattgctggaatctttggaagaacaggaggtgaaaggatttaacagaggaacccactcgaaactggagaccatgcaaacagctgagagtgaaagtgccatggaaagccattcactcctcaatcccaacctgcagcaaggtgaaggagtcctctccagcttccgaaccacgtggcaggagtttgtggaggatctgggcttctggagagtattgctgttgatcttcgtcattgctttgctgtctcttggcattgcttattatgtgagtggggtgctacccttcgtggaaaaccagcctgaactggtgcattaaaggagctcatggaagatgaggcaattaattgcctgtttcctggcttccaatgtttgttctcagtttctcagaatttttcttagcgcaaagcagtgagggcagtacatgttctttttgcatttttaattattgtaatccttttagataatgatgtgttcatttgaactaactacatactatgatcaagtatattgcatcctaacgctacctctgactcaacctgactttgtaggaaagcctacacgtagccttgtttgataaaaacacggaagtgactagagaatggaagataaaggaagaagctaggaagtccttgctatcaaaaccttatcctaatataggaccaattgaagtattcaaaaagaaaaacagtatcttatatgattagtttttgttggtggttttgttttcatttatttttgcaagagccactttttatttactttctctagggataagagataaaacttgaagtacttttttcaaatcttgtgtgcaaattagtattgttagcatctatttggcttattttagtatttttaagtctagtcacaaaccaaacaaaacttttgaaaatgagctatattttgttcaaagataattgatttgatcttatatttatttgtttttaggataatttttgatctttttgtaaactgctttgcttgttaatatctgtgaaaaataaatgagttcattttgttcactttccaattttcccgagtatcctagtcatcaaagataacagttcatcagaattacagtcagaaaatcctttttctactgaatagttagcagggaaaaataattctgatatttaactgtcataattctgtagtgctattatagtgaaaaactcagttctataagctagctgtgttgtcacagttttatcatagttcataattatttcatgtgcaatcctatttggaggccctgttagacttttaacaatcccatccatatctgtaattctctgatggcaagaatggatggagcatttctgagttaacagtgctggacagtatcgtactgggtgtcataaactctttatgaatggtaatattatgtaaattgaaatctggccctcaaactatattgcagctttcagcagtatgtttgaaggcctcttttgttaatgattctgtaatgtatgaattatgttcttgagtggttaaaaaagaatatgaaggcttgataattatttattgggtaaagtcaggaaattgtagtgaaagaactaatggttttgttttttggaataaaggcacctaagctattgctaattgaattgctgctagaattagaaattatgctttagaatagaattggtatttctgtgattctttttgcttcttggtattttctcttgtatctatgtatctagtattgaggcttgctctttcatgtggctttatcctctctttaatagctgttgtaaaattcctgagtaactggctgcttcaggatcagcttgcagagtcttgcttttaggttagatacaaacaaagtaaatcatagttggtgtaaatccagcaaaaaacagctggctttggaatggagaacactacaattcaaatttgaagtatattcagaagaaaactttggaattagctttacatttgtttgtaaatctaaacaaatatgcaaaattggtcaaaatgtaagtatatagcatttttaaagattaatggttccttttatgtgctgatttctttgtattctgttctctgcattcatcattcaggaataccaccaataaatgtatttatatatcccttaa

SEQ ID NO: 107731 - DNA, 661 bp, Homo sapiens
  Payload ID: 1150
  Gene Symbol: ANKRD46
  Gene Name: ankyrin repeat domain 46
  ENST ID: ENST00000358990
  CDS Start-End: 77-661
accgcctccttgaagctgccgctgtcgctgctgctcgttcgagtcgcaggcgtgttccatccaccacatcagaacaatgtcgtatgtttttgtaaatgattcttctcagactaacgtgcccttgctgcaagcctgtattgatggggactttaattattccaagcggcttttggaaagtggctttgacccaaatattcgtgacagcaggggcagaacaggccttcaccttgcagcagctcgagggaatgtagacatctgccagttactgcataaattcggtgccgatcttctggccacagattatcaaggaaacacagctcttcacctctgtggccatgtggatactatccaatttttggtttccaatggactcaaaattgatatttgcaatcatcaaggtgctacccctttagttctggcaaagcgcagaggagtaaataaagatgtcatccgattgctggaatctttggaagaacaggaggtgaaaggatttaacagaggaacccactcgaaactggagaccatgcaaacagctgagagtgaaagtgccatggaaagccattcactcctcaatcccaacctgcagcaaggtgaaggagtcctctccagcttccgaaccacgtggcaggagtttgtggaggatctgggcttctggagagta

SEQ ID NO: 107732 - DNA, 3270 bp, Homo sapiens
  Payload ID: 1150
  Gene Symbol: ANKRD46
  Gene Name: ankyrin repeat domain 46
  Uniprot ID: Q86W74
  ENST ID: ENST00000520311
  CDS Start-End: 805-1491
ggtacttggcccggggcctgtgggcagcgcctgggctagagccacttgatatctcctgcaccgtccctgtagcactggaggtccagtaggcctggccggggccctgaggggcgagggtgcccgggcttcccacaccttccgcggcgactggagggagccgggccgaggaagcgaccgcgggtccgtgatggcttcttcgcggtctgtgtgttcacgagggccgggcagaggcctgcgagggttctcgtttgcgcttgcgggttagggctgtggtccggggaacccctgggcagcgcgggcagccctggctcgcggttaatcggggggtggagcgcggaagccacgccgcaggtccagctgctcggccggggcgagacggtgctttcgcggcgtgtgcttgcaggagcgcacagttcaggcgccgggacaagctgttggggtgtgagtgagctctccagaatggcacatggctccggggtgcccgggttaaaaggaaggatttgcacaccttccacttagggctcgggtaatcgcaaacttcctcccttaattggcttgcagtgctaaaaagcagatcgttctctctgaggttttcccaacagtacctcaagaaaataacatctgttttttgtaacgttccacggtattcggaattggctacagaacataataagatccttgccagcacattacagaatatttttgttgaaccttcttgagaattcagagaaactgctgagtgaccactgaacgaaaagatctaatcttaaggcttacgcgtgttccatccaccacatcagaacaatgtcgtatgtttttgtaaatgattcttctcagactaacgtgcccttgctgcaagcctgtattgatggggactttaattattccaagcggcttttggaaagtggctttgacccaaatattcgtgacagcaggggcagaacaggccttcaccttgcagcagctcgagggaatgtagacatctgccagttactgcataaattcggtgccgatcttctggccacagattatcaaggaaacacagctcttcacctctgtggccatgtggatactatccaatttttggtttccaatggactcaaaattgatatttgcaatcatcaaggtgctacccctttagttctggcaaagcgcagaggagtaaataaagatgtcatccgattgctggaatctttggaagaacaggaggtgaaaggatttaacagaggaacccactcgaaactggagaccatgcaaacagctgagagtgaaagtgccatggaaagccattcactcctcaatcccaacctgcagcaaggtgaaggagtcctctccagcttccgaaccacgtggcaggagtttgtggaggatctgggcttctggagagtattgctgttgatcttcgtcattgctttgctgtctcttggcattgcttattatgtgagtggggtgctacccttcgtggaaaaccagcctgaactggtgcattaaaggagctcatggaagatgaggcaattaattgcctgtttcctggcttccaatgtttgttctcagtttctcagaatttttcttagcgcaaagcagtgagggcagtacatgttctttttgcatttttaattattgtaatccttttagataatgatgtgttcatttgaactaactacatactatgatcaagtatattgcatcctaacgctacctctgactcaacctgactttgtaggaaagcctacacgtagccttgtttgataaaaacacggaagtgactagagaatggaagataaaggaagaagctaggaagtccttgctatcaaaaccttatcctaatataggaccaattgaagtattcaaaaagaaaaacagtatcttatatgattagtttttgttggtggttttgttttcatttatttttgcaagagccactttttatttactttctctagggataagagataaaacttgaagtacttttttcaaatcttgtgtgcaaattagtattgttagcatctatttggcttattttagtatttttaagtctagtcacaaaccaaacaaaacttttgaaaatgagctatattttgttcaaagataattgatttgatcttatatttatttgtttttaggataatttttgatctttttgtaaactgctttgcttgttaatatctgtgaaaaataaatgagttcattttgttcactttccaattttcccgagtatcctagtcatcaaagataacagttcatcagaattacagtcagaaaatcctttttctactgaatagttagcagggaaaaataattctgatatttaactgtcataattctgtagtgctattatagtgaaaaactcagttctataagctagctgtgttgtcacagttttatcatagttcataattatttcatgtgcaatcctatttggaggccctgttagacttttaacaatcccatccatatctgtaattctctgatggcaagaatggatggagcatttctgagttaacagtgctggacagtatcgtactgggtgtcataaactctttatgaatggtaatattatgtaaattgaaatctggccctcaaactatattgcagctttcagcagtatgtttgaaggcctcttttgttaatgattctgtaatgtatgaattatgttcttgagtggttaaaaaagaatatgaaggcttgataattatttattgggtaaagtcaggaaattgtagtgaaagaactaatggttttgttttttggaataaaggcacctaagctattgctaattgaattgctgctagaattagaaattatgctttagaatagaattggtatttctgtgattctttttgcttcttggtattttctcttgtatctatgtatctagtattgaggcttgctctttcatgtggctttatcctctctttaatagctgttgtaaaattcctgagtaactggctgcttcaggatcagcttgcagagtcttgcttttaggttagatacaaacaaagtaaatcatagttggtgtaaatccagcaaaaaacagctggctttggaatggagaacactacaattcaaatttgaagtatattcagaagaaaactttggaattagctttacatttgtttgtaaatctaaacaaatatgcaaaattggtcaaaatgtaagtatatagcatttttaaagattaatggttccttttatgtgctgatttctttgtattctgttctctgcattcatcattcaggaataccaccaataaatgtatttatatatccc

SEQ ID NO: 107733 - DNA, 1686 bp, Homo sapiens
  Payload ID: 1150
  Gene Symbol: ANKRD46
  Gene Name: ankyrin repeat domain 46
  Uniprot ID: Q86W74
  ENST ID: ENST00000520552
  CDS Start-End: 163-861
gccgctgtcgctgctgctcgttcgagtcgcagatccttgccagcacattacagaatatttttgttgaaccttcttgagaattcagagaaactgctgagtgaccactgaacgaaaagatctaatcttaaggcttacgcgtgttccatccaccacatcagaacaatgtcgtatgtttttgtaaatgattcttctcagactaacgtgcccttgctgcaagcctgtattgatggggactttaattattccaagcggcttttggaaagtggctttgacccaaatattcgtgacagcaggggcagaacaggccttcaccttgcagcagctcgagggaatgtagacatctgccagttactgcataaattcggtgccgatcttctggccacagattatcaaggaaacacagctcttcacctctgtggccatgtggatactatccaatttttggtttccaatggactcaaaattgatatttgcaatcatcaaggtgctacccctttagttctggcaaagcgcagaggagtaaataaagatgtcatccgattgctggaatctttggaagaacaggaggtgaaaggatttaacagaggaacccactcgaaactggagaccatgcaaacagctgagagtgaaagtgccatggaaagccattcactcctcaatcccaacctgcagcaaggtgaaggagtcctctccagcttccgaaccacgtggcaggagtttgtggaggatctgggcttctggagagtattgctgttgatcttcgtcattgctttgctgtctcttggcattgcttattatagaaggacactgaggcttggaagctttgcaaggcaagacagaagccgaatccaggccatctaatctctaggtcagtgtcctgtgctcctgagcctcagaaggcaagaaagaagggatacagacgtcagcgtccctgttgggtggggctgtttccgtcacgacttgtgtcatggagcatcatctcaaagctctgcagttaggaggcagagggacctgctaccacctgtcccctcctctccagtcctgccctgcaggcagcccgggcacctgctgtcttcctggcctcccagatcctcaagatggagctccaggaaccatcccctcctccgcccgggcaggatgccacctccacaaggcaaatcacatccatttgatcttgaacaaaaggctgccgtggtgtctgaaatgacaactcccaggcgggtgatgtcatgctgttttgtttgtctccatggactgtggggatccaatttcagttgtgaagaaaacggtctggggaaaaaagttacttcattcggaaaattccgagaagccataaatacagtttgcagctgaggaaagcactttcacactcagacaatggatttgggtggaagaaaagacttcccgcccctaaggctgagccccttcactcccacccatggccaccggcagcccgcttctgccagcagatagatgtgtgcatggctctggcaagatctcaagcaaccccccttccccaaggagactctccgtgacccagtggcaagttggcaggggatgtgttttccctggttctcatcctaaattgtctcctgcccagagtccatccctgaagtatcaggcacttccctctcgtaaatggttgacctgcatctctgagctgctgttaaagcaaatttaaaataa

SEQ ID NO: 107734 - DNA, 592 bp, Homo sapiens
  Payload ID: 1150
  Gene Symbol: ANKRD46
  Gene Name: ankyrin repeat domain 46
  ENST ID: ENST00000521345
  CDS Start-End: 346-592
agctgccgctgtcgctgctgctcgttcgagtcgcaggtacttggcccggggcctgtgggcagcgcctgggctagagccacttgatatctcctgcaccgtccctgtagcactggaggtccagtaggcctggccggggccctgaggggcgagggtgcccgggcttcccacaccttccgcggcgactggagggagccgggccgaggaagcgaccgcggatccttgccagcacattacagaatatttttgttgaaccttcttgagaattcagagaaactgctgagtgaccactgaacgaaaagatctaatcttaaggcttacgcgtgttccatccaccacatcagaacaatgtcgtatgtttttgtaaatgattcttctcagactaacgtgcccttgctgcaagcctgtattgatggggactttaattattccaagcggcttttggaaagtggctttgacccaaatattcgtgacagcaggggcagaacaggccttcaccttgcagcagctcgagggaatgtagacatctgccagttactgcataaattcggtgccgatcttctggccacagattatcaaggaaacacagctcttc

SEQ ID NO: 107735 - DNA, 2779 bp, Homo sapiens
  Payload ID: 1150
  Gene Symbol: ANKRD46
  Gene Name: ankyrin repeat domain 46
  Uniprot ID: Q86W74
  ENST ID: ENST00000519597
  CDS Start-End: 310-996
gtctggcccctcccctccgcccgtcaccgcctccttgaagctgccgctgtcgctgctgctcgttcgagtcgcagatccttgccagcacattacagaatatttttgttgaaccttcttgagaattcagagaaactgctgagtgaccactgaacgaaaagatctaatcttaaggcttacgcctcactttgatgcccaggctggagtgctgtggctcaatcacagctcatcgcaacctcgacctcccgggctcaagtgatcctctcacctcagcgtcccgaacaggcgtgttccatccaccacatcagaacaatgtcgtatgtttttgtaaatgattcttctcagactaacgtgcccttgctgcaagcctgtattgatggggactttaattattccaagcggcttttggaaagtggctttgacccaaatattcgtgacagcaggggcagaacaggccttcaccttgcagcagctcgagggaatgtagacatctgccagttactgcataaattcggtgccgatcttctggccacagattatcaaggaaacacagctcttcacctctgtggccatgtggatactatccaatttttggtttccaatggactcaaaattgatatttgcaatcatcaaggtgctacccctttagttctggcaaagcgcagaggagtaaataaagatgtcatccgattgctggaatctttggaagaacaggaggtgaaaggatttaacagaggaacccactcgaaactggagaccatgcaaacagctgagagtgaaagtgccatggaaagccattcactcctcaatcccaacctgcagcaaggtgaaggagtcctctccagcttccgaaccacgtggcaggagtttgtggaggatctgggcttctggagagtattgctgttgatcttcgtcattgctttgctgtctcttggcattgcttattatgtgagtggggtgctacccttcgtggaaaaccagcctgaactggtgcattaaaggagctcatggaagatgaggcaattaattgcctgtttcctggcttccaatgtttgttctcagtttctcagaatttttcttagcgcaaagcagtgagggcagtacatgttctttttgcatttttaattattgtaatccttttagataatgatgtgttcatttgaactaactacatactatgatcaagtatattgcatcctaacgctacctctgactcaacctgactttgtaggaaagcctacacgtagccttgtttgataaaaacacggaagtgactagagaatggaagataaaggaagaagctaggaagtccttgctatcaaaaccttatcctaatataggaccaattgaagtattcaaaaagaaaaacagtatcttatatgattagtttttgttggtggttttgttttcatttatttttgcaagagccactttttatttactttctctagggataagagataaaacttgaagtacttttttcaaatcttgtgtgcaaattagtattgttagcatctatttggcttattttagtatttttaagtctagtcacaaaccaaacaaaacttttgaaaatgagctatattttgttcaaagataattgatttgatcttatatttatttgtttttaggataatttttgatctttttgtaaactgctttgcttgttaatatctgtgaaaaataaatgagttcattttgttcactttccaattttcccgagtatcctagtcatcaaagataacagttcatcagaattacagtcagaaaatcctttttctactgaatagttagcagggaaaaataattctgatatttaactgtcataattctgtagtgctattatagtgaaaaactcagttctataagctagctgtgttgtcacagttttatcatagttcataattatttcatgtgcaatcctatttggaggccctgttagacttttaacaatcccatccatatctgtaattctctgatggcaagaatggatggagcatttctgagttaacagtgctggacagtatcgtactgggtgtcataaactctttatgaatggtaatattatgtaaattgaaatctggccctcaaactatattgcagctttcagcagtatgtttgaaggcctcttttgttaatgattctgtaatgtatgaattatgttcttgagtggttaaaaaagaatatgaaggcttgataattatttattgggtaaagtcaggaaattgtagtgaaagaactaatggttttgttttttggaataaaggcacctaagctattgctaattgaattgctgctagaattagaaattatgctttagaatagaattggtatttctgtgattctttttgcttcttggtattttctcttgtatctatgtatctagtattgaggcttgctctttcatgtggctttatcctctctttaatagctgttgtaaaattcctgagtaactggctgcttcaggatcagcttgcagagtcttgcttttaggttagatacaaacaaagtaaatcatagttggtgtaaatccagcaaaaaacagctggctttggaatggagaacactacaattcaaatttgaagtatattcagaagaaaactttggaattagctttacatttgtttgtaaatctaaacaaatatgcaaaattggtcaaaatgtaagtatatagcatttttaaagattaatggttccttttatgtgctgatttctttgtattctgttctctgcattcatcattcaggaataccaccaataaatgtatttatatatcccttaa

SEQ ID NO: 107736 - DNA, 580 bp, Homo sapiens
  Payload ID: 1150
  Gene Symbol: ANKRD46
  Gene Name: ankyrin repeat domain 46
  ENST ID: ENST00000524072
  CDS Start-End: 272-580
tgatggcttcttcgcggtctgtgtgttcacgagggccgggcagaggcctgcgagggttctcgtttgcgcttgcgggttagggctgtggtccggggaacccctgggcagcgcgggcagccctggctcgcggttaatcgggggatccttgccagcacattacagaatatttttgttgaaccttcttgagaattcagagaaactgctgagtgaccactgaacgaaaagatctaatcttaaggcttacgcgtgttccatccaccacatcagaacaatgtcgtatgtttttgtaaatgattcttctcagactaacgtgcccttgctgcaagcctgtattgatggggactttaattattccaagcggcttttggaaagtggctttgacccaaatattcgtgacagcaggggcagaacaggccttcaccttgcagcagctcgagggaatgtagacatctgccagttactgcataaattcggtgccgatcttctggccacagattatcaaggaaacacagctcttcacctctgtggccatgtggatactatccaatttttggtttccaatggactcaaaattgatatt

SEQ ID NO: 107737 - DNA, 567 bp, Homo sapiens
  Payload ID: 1150
  Gene Symbol: ANKRD46
  Gene Name: ankyrin repeat domain 46
  ENST ID: ENST00000523000
  CDS Start-End: 311-567
cttgaagctgccgctgtcgctgctgctcgttcgagtcgcagggttttgctctgttgctcaggctggagtgcagtggcacaatcatggctgaatgcaccctccacctcccaggctcgagtgatcctcctgcctcagccttgaatatctgggacaacaggcacgcacgcaccaccatgcaagatccttgccagcacattacagaatatttttgttgaaccttcttgagaattcagagaaactgctgagtgaccactgaacgaaaagatctaatcttaaggcttacgcgtgttccatccaccacatcagaacaatgtcgtatgtttttgtaaatgattcttctcagactaacgtgcccttgctgcaagcctgtattgatggggactttaattattccaagcggcttttggaaagtggctttgacccaaatattcgtgacagcaggggcagaacaggccttcaccttgcagcagctcgagggaatgtagacatctgccagttactgcataaattcggtgccgatcttctggccacagattatcaaggaaacacagctcttcacctctgtgg

SEQ ID NO: 107738 - DNA, 713 bp, Homo sapiens
  Payload ID: 1150
  Gene Symbol: ANKRD46
  Gene Name: ankyrin repeat domain 46
  ENST ID: ENST00000519316
  CDS Start-End: 145-672
tctatttactgtagatccttgccagcacattacagaatatttttgttgaaccttcttgagaattcagagaaactgctgagtgaccactgaacgaaaagatctaatcttaaggcttacgcgtgttccatccaccacatcagaacaatgtcgtatgtttttgtaaatgattcttctcagactaacgtgcccttgctgcaagcctgtattgatggggactttaattattccaagcggcttttggaaagtggctttgacccaaatattcgtgacagcaggggcagaacaggccttcaccttgcagcagctcgagggaatgtagacatctgccagttactgcataaattcggtgccgatcttctggccacagattatcaaggaaacacagctcttcacctctgtggccatgtggatactatccaatttttggtttccaatggactcaaaattgatatttgtgccatggaaagccattcactcctcaatcccaacctgcagcaaggtgaaggagtcctctccagcttccgaaccacgtggcaggagtttgtggaggatctgggcttctggagagtattgctgttgatcttcgtcattgctttgctgtctcttggcattgcttattatgtgagtggggtgctacccttcgtggaaaaccagcctgaactggtgcattaaaggagctcatggaagatgaggcaattaattgcctgtttcct

SEQ ID NO: 107739 - DNA, 1844 bp, Homo sapiens
  Payload ID: 1151
  Gene Symbol: ANKRD49
  Gene Name: ankyrin repeat domain 49
  Uniprot ID: Q8WVL7
  ENST ID: ENST00000302755
  CDS Start-End: 95-814
tcagatcttgatgaacaaagcagtcataattcatctctagaaagatttatatcctggcatttgaaatgctttttatttagaatagtagtaaaaaatggaaaaagaaaaaggaaatgatgatggaataccagaccaagagaattccttggatttttctgaacactttaaccaacttgaattgttggaaacacatggacaccttattcctactggtactcaaagtctttgggtaggcaattctgatgaagatgaggagcaagatgacaaaaatgaagagtggtatcgattgcaagaaaaaaaaatggaaaaagacccaagcagattgcttctttgggctgctgaaaaaaatcggcttaccacagtgcggagactcctttctgaaaaggccactcacgtgaacactagggatgaagatgagtatacccctcttcatcgagcagcctacagtggacacttagatattgttcaggagctcattgcacagggggccgatgttcatgcagtgactgtggatggctggacgcccctgcacagtgcttgtaagtggaataataccagagtggcttctttcttactgcagcatgatgcagatatcaatgcccaaacaaaaggcctcttgacccccttgcatcttgctgctgggaacagagacagcaaggataccctagaactcctcctgatgaaccgttacgtcaaaccagggctgaaaaacaacttggaagaaactgcatttgatattgccaggaggacaagtatctatcactacctctttgaaattgtggaaggctgtacaaattcttcacctcagtcttaacaattctagtaattttcctaagtttctaaataccagtgcctcctgtgtgtgagatgtattcccataatcaaagttgacgtcaaacatcttactacaaaaattcagtgacattcattataacattcttccaagtgaattgcctgactttgatgtcaaaatgtatttgaaagtaatttgcatatatctttaattatttctgtggagtttgtgatttttttatcagaaataattttaatgtgtgtatacttaaaaacttgacacgggttgtacagaaactggtatttttggtgctgatacaagagaaatgtatttttaaatatcccacatcctggatctttgttgggtatttagtatattgacatatatttttataaggtgaggtaactcagaacttaatttaaaagtcttaaatattctgatacaattcagctgtcttctctaccttaccatagccagttgctttcattttaaaccagagcaagtaacatattagtgacttgaatcttcataagttaaagtaaaaaacagcaaaaaacctagatctttgtcttttagaacacagaccattttcaggaaagcagttagctaagtgtttaattcatgaatattgtatactgcatcccctaccacaatttacacaatcctgtggatagtcctacctcaccctggtcaacctacatgatccttaagctaatggcgaatcacgatgaccttgtagacatgcacacaactatacctttgtccaacagatcataatatatctgctatccaactggttttacctgcctaatcctactgatttgggcactgcttgtatagtctctcaagttcacaggaaatgttgattttctaaggtcctcatttttacagagtatacaggcaaagtgacaggggaaaaggaattagtctaagagtaaggggatgattattatattgaggctaaaaccacaaagtggctcaggctttaaaaaaaaaacactgtggataatgacaaaaagcataagtaaaaatatttgagaaaaataaagta

SEQ ID NO: 107740 - DNA, 573 bp, Homo sapiens
  Payload ID: 1151
  Gene Symbol: ANKRD49
  Gene Name: ankyrin repeat domain 49
  ENST ID: ENST00000540349
  CDS Start-End: 148-525
aggctaggagacgaacccggaagtgagatgcaaggcggcgattttcccttctgtcagatcttgatgaacaaagcagtcataattcatctctagaaagatttatatcctggcatttgaaatgctttttatttagaatagtagtaaaaaatggaaaaagaaaaaggaaatgatgatggaataccagaccaagagaattccttggatttttctgaacactttaaccaacttgaattgttggaaacacatggacaccttattcctactggtactcaaagtctttgggtaggcaattctgatgaagatgaggagcaagatgacaaaaatgaagagtggtatcgattgcaagaaaaaaaaatggaaaaagacccaagcagattgcttctttgggctgctgaaaaaaatcgggtaaaaaaaaaaattacagagggaagtgtgacagtaggaaaagcactgggttcaagccagaagacctgcctttactgttatggccatcatacctatctcttgattgtgaggaccaaatgagacaatcttaccacagtgcggagactcctttctgaaaaggccactcac

SEQ ID NO: 107741 - DNA, 567 bp, Homo sapiens
  Payload ID: 1151
  Gene Symbol: ANKRD49
  Gene Name: ankyrin repeat domain 49
  ENST ID: ENST00000541144
  CDS Start-End: 233-567
ctgtcaggtgggttgttattccctgtcccggacctcgctttttgatggaccggcgccatctaagaactcctgagcccgtgggggtgggtagcctgtggacacaggccgagccctgcaggtcaggccgcttcgtggtccccagatcttgatgaacaaagcagtcataattcatctctagaaagatttatatcctggcatttgaaatgctttttatttagaatagtagtaaaaaatggaaaaagaaaaaggaaatgatgatggaataccagaccaagagaattccttggatttttctgaacactttaaccaacttgaattgttggaaacacatggacaccttattcctactggtactcaaagtctttgggtaggcaattctgatgaagatgaggagcaagatgacaaaaatgaagagtggtatcgattgcaagaaaaaaaaatggaaaaagacccaagcagattgcttctttgggctgctgaaaaaaatcgggtaaaaaaaaaaattacagagggaagtgtgacagtaggaaaagcactgggttcaagccagaagacctgcctttactg

SEQ ID NO: 107742 - DNA, 2268 bp, Homo sapiens
  Payload ID: 1151
  Gene Symbol: ANKRD49
  Gene Name: ankyrin repeat domain 49
  Uniprot ID: Q8WVL7
  ENST ID: ENST00000544612
  CDS Start-End: 498-1217
gggcttccgcctgggaacctgcagaaacaggagacgaatgcgattcctaaattaccccactgctggactcttcgaagccccacaatcgcgacccaaggctgtcttcttttcgggaagaaagggcaggatccgtgaaaagaaaacaacacggtctgaacttgcctctgagaacccgcagggccgtaaacctgaattccgcgggagagaacggcgtccgtttctctcgcgacacttcatggataacgtagatgcttcaagtccagttcggctctcattggctaccgcacgcagtgagggggcggggaaagtagcggcgaggccccgccctcacgcaggagccaatcctgagcaggctaggagacgaacccggaagtgagatgcaaggcggcgattttcccttctgtcagatcttgatgaacaaagcagtcataattcatctctagaaagatttatatcctggcatttgaaatgctttttatttagaatagtagtaaaaaatggaaaaagaaaaaggaaatgatgatggaataccagaccaagagaattccttggatttttctgaacactttaaccaacttgaattgttggaaacacatggacaccttattcctactggtactcaaagtctttgggtaggcaattctgatgaagatgaggagcaagatgacaaaaatgaagagtggtatcgattgcaagaaaaaaaaatggaaaaagacccaagcagattgcttctttgggctgctgaaaaaaatcggcttaccacagtgcggagactcctttctgaaaaggccactcacgtgaacactagggatgaagatgagtatacccctcttcatcgagcagcctacagtggacacttagatattgttcaggagctcattgcacagggggccgatgttcatgcagtgactgtggatggctggacgcccctgcacagtgcttgtaagtggaataataccagagtggcttctttcttactgcagcatgatgcagatatcaatgcccaaacaaaaggcctcttgacccccttgcatcttgctgctgggaacagagacagcaaggataccctagaactcctcctgatgaaccgttacgtcaaaccagggctgaaaaacaacttggaagaaactgcatttgatattgccaggaggacaagtatctatcactacctctttgaaattgtggaaggctgtacaaattcttcacctcagtcttaacaattctagtaattttcctaagtttctaaataccagtgcctcctgtgtgtgagatgtattcccataatcaaagttgacgtcaaacatcttactacaaaaattcagtgacattcattataacattcttccaagtgaattgcctgactttgatgtcaaaatgtatttgaaagtaatttgcatatatctttaattatttctgtggagtttgtgatttttttatcagaaataattttaatgtgtgtatacttaaaaacttgacacgggttgtacagaaactggtatttttggtgctgatacaagagaaatgtatttttaaatatcccacatcctggatctttgttgggtatttagtatattgacatatatttttataaggtgaggtaactcagaacttaatttaaaagtcttaaatattctgatacaattcagctgtcttctctaccttaccatagccagttgctttcattttaaaccagagcaagtaacatattagtgacttgaatcttcataagttaaagtaaaaaacagcaaaaaacctagatctttgtcttttagaacacagaccattttcaggaaagcagttagctaagtgtttaattcatgaatattgtatactgcatcccctaccacaatttacacaatcctgtggatagtcctacctcaccctggtcaacctacatgatccttaagctaatggcgaatcacgatgaccttgtagacatgcacacaactatacctttgtccaacagatcataatatatctgctatccaactggttttacctgcctaatcctactgatttgggcactgcttgtatagtctctcaagttcacaggaaatgttgattttctaaggtcctcatttttacagagtatacaggcaaagtgacaggggaaaaggaattagtctaagagtaaggggatgattattatattgaggctaaaaccacaaagtggctcaggctttaaaaaaaaaacactgtggataatgacaaaaagcataagtaaaaatatttgagaaaaataaagtacaagttttgaacaacacaaaa

SEQ ID NO: 107743 - DNA, 562 bp, Homo sapiens
  Payload ID: 1151
  Gene Symbol: ANKRD49
  Gene Name: ankyrin repeat domain 49
  ENST ID: ENST00000545130
  CDS Start-End: 123-562
agatgcaaggcggcgattttcccttctgtcagatcttgatgaacaaagcagtcataattcatctctagaaagatttatatcctggcatttgaaatgctttttatttagaatagtagtaaaaaatggaaaaagaaaaaggaaatgatgatggaataccagaccaagagaattccttggatttttctgaacactttaaccaacttgaattgttggaaacacatggacaccttattcctactggtactcaaagtctttgggtaggcaattctgatgaagatgaggagcaagatgacaaaaatgaagagtggtatcgattgcaagaaaaaaaaatggaaaaagacccaagcagattgcttctttgggctgctgaaaaaaatcgggtaaaaaaaaaaattacagagggaagtgtgacagtaggaaaagcactgggttcaagccagaagacctgcctttactgttatggccatcatacctatctcttgattcttaccacagtgcggagactcctttctgaaaaggccactcacgtgaacactagggatgaagatgagtatacccctct

SEQ ID NO: 107744 - DNA, 515 bp, Homo sapiens
  Payload ID: 1151
  Gene Symbol: ANKRD49
  Gene Name: ankyrin repeat domain 49
  ENST ID: ENST00000535502
  CDS Start-End: 124-515
gagatgcaaggcggcgattttcccttctgtcagatcttgatgaacaaagcagtcataattcatctctagaaagatttatatcctggcatttgaaatgctttttatttagaatagtagtaaaaaatggaaaaagaaaaaggaaatgatgatggaataccagaccaagagaattccttggatttttctgaacactttaaccaacttgaattgttggaaacacatggacaccttattcctactggtactcaaagtctttggcttaccacagtgcggagactcctttctgaaaaggccactcacgtgaacactagggatgaagatgagtatacccctcttcatcgagcagcctacagtggacacttagatattgttcaggagctcattgcacagggggccgatgttcatgcagtgactgtggatggctggacgcccctgcacagtgcttgtaagtggaataataccagagtggcttctttcttactgcagcatgatgcagatatcaatgcccaaacaaa

SEQ ID NO: 107745 - DNA, 760 bp, Homo sapiens
  Payload ID: 1151
  Gene Symbol: ANKRD49
  Gene Name: ankyrin repeat domain 49
  ENST ID: ENST00000534911
  CDS Start-End: 143-520
aggagacgaacccggaagtgagatgcaaggcggcgattttcccttctgtcagatcttgatgaacaaagcagtcataattcatctctagaaagatttatatcctggcatttgaaatgctttttatttagaatagtagtaaaaaatggaaaaagaaaaaggaaatgatgatggaataccagaccaagagaattccttggatttttctgaacactttaaccaacttgaattgttggaaacacatggacaccttattcctactggtactcaaagtctttgggtaggcaattctgatgaagatgaggagcaagatgacaaaaatgaagagtggtatcgattgcaagaaaaaaaaatggaaaaagacccaagcagattgcttctttgggctgctgaaaaaaatcgggtaaaaaaaaaaattacagagggaagtgtgacagtaggaaaagcactgggttcaagccagaagacctgcctttactgttatggccatcatacctatctcttgattgtgaggaccaaatgagacaatgtacatgaaagcacatattaagctgcaaagtgtcatgctagcttaccacagtgcggagactcctttctgaaaaggccactcacgtgaacactagggatgaagatgagtatacccctcttcatcgagcagcctacagtggacacttagatattgttcaggagctcattgcacagggggccgatgttcatgcagtgactgtggatggctggacgcccctgcacagtgcttgtaagt

SEQ ID NO: 107746 - DNA, 587 bp, Homo sapiens
  Payload ID: 1151
  Gene Symbol: ANKRD49
  Gene Name: ankyrin repeat domain 49
  ENST ID: ENST00000544514
  CDS Start-End: 123-383
agatgcaaggcggcgattttcccttctgtcagatcttgatgaacaaagcagtcataattcatctctagaaagatttatatcctggcatttgaaatgctttttatttagaatagtagtaaaaaatggaaaaagaaaaaggaaatgatgatggaataccagaccaagagaattccttggatttttctgaacactttaaccaacttgaattgttggaaacacatggacaccttattcctactggtactcaaagtctttgggtaggcaattctgatgaagatgaggagcaagatgacaaaaatgaagagtggtatcgattgcaagaaaaaaaaatggaaaaagacccaagcagattgcttctttgggctgctgaaaaaaatcggtagtcctctcctccccaaaaagagatcttaaattattttcattttaaagtcatctactaacaacttaccacagtgcggagactcctttctgaaaaggccactcacgtgaacactagggatgaagatgagtatacccctcttcatcgagcagcctacagtggacacttagatattgttcaggagctcattgcacagggggccgatgtt

SEQ ID NO: 107747 - DNA, 3002 bp, Homo sapiens
  Payload ID: 1151
  Gene Symbol: ANKRD49
  Gene Name: ankyrin repeat domain 49
  ENST ID: ENST00000544253
  CDS Start-End: 119-496
gcaaggcggcgattttcccttctgtcagatcttgatgaacaaagcagtcataattcatctctagaaagatttatatcctggcatttgaaatgctttttatttagaatagtagtaaaaaatggaaaaagaaaaaggaaatgatgatggaataccagaccaagagaattccttggatttttctgaacactttaaccaacttgaattgttggaaacacatggacaccttattcctactggtactcaaagtctttgggtaggcaattctgatgaagatgaggagcaagatgacaaaaatgaagagtggtatcgattgcaagaaaaaaaaatggaaaaagacccaagcagattgcttctttgggctgctgaaaaaaatcgggtaaaaaaaaaaattacagagggaagtgtgacagtaggaaaagcactgggttcaagccagaagacctgcctttactgttatggccatcatacctatctcttgattgtgaggaccaaatgagacaatgtacatgaaagcacatattaagctgcaaagtgtcatgctaggtattatttgggggtttaaggataattatctataaagatagcaagcaatcatctatattttaaaatcatttatataaagtcattaggatcatttaggaaagagaggatggaaactaacatttattaaaaactaactataccaggtaccttattacattattttatttaatcatcatgtatccctataagtaatattcttctcttttatagagtaagaaattgagattcaggaatattaatttgcccaggatcatcgaagtggaatgaacatcaaaagcctattccctctgcttggccacttccacctcattttactaagtttccccatgtctgtgttagtaaactaataactaaaagggtctcgcattttaaatagctttttaacccaagagcatgccacatttaaccagaggcccatagaacaaactgaaaattacaacctaaaaggttgtttctaaggttgtattgagaaggaattgagctcttgaatccctagaattccttattaatactttattcttctgttaaaagttttatttttaaaagtttcatacagtgtgtatattggtgtgataatcctacagaaaaatcaagcagttatgttttcttcacagataacacataaaatattaaacagaaagcctatgttattcattggactgaagcttttatgcaataaaccttagttggaccaggagtaaatgtatggtttgatattcagagaatctcattcttagaagcaacaaagtgtagttaacactaacttgttcattcttaaatcagtagtcctctcctccccaaaaagagatcttaaattattttcattttaaagtcatctactaacaagtaagtttttattcaacttaattaaatctaacaccacaagacaattttgttttagttattgttttggtttgagttgagttgaaagatttcttttttttcttctcagcttaccacagtgcggagactcctttctgaaaaggccactcacgtgaacactagggatgaagatgagtatacccctcttcatcgagcagcctacagtggacacttagatattgttcaggagctcattgcacagggggccgatgttcatgcagtgactgtggatggctggacgcccctgcacagtgcttgtaagtggaataataccagagtggcttctttcttactgcagcatgatgcagatatcaatgcccaaacaaaaggcctcttgacccccttgcatcttgctgctgggaacagagacagcaaggataccctagaactcctcctgatgaaccgttacgtcaaaccagggctgaaaaacaacttggaagaaactgcatttgatattgccaggaggacaagtatctatcactacctctttgaaattgtggaaggctgtacaaattcttcacctcagtcttaacaattctagtaattttcctaagtttctaaataccagtgcctcctgtgtgtgagatgtattcccataatcaaagttgacgtcaaacatcttactacaaaaattcagtgacattcattataacattcttccaagtgaattgcctgactttgatgtcaaaatgtatttgaaagtaatttgcatatatctttaattatttctgtggagtttgtgatttttttatcagaaataattttaatgtgtgtatacttaaaaacttgacacgggttgtacagaaactggtatttttggtgctgatacaagagaaatgtatttttaaatatcccacatcctggatctttgttgggtatttagtatattgacatatatttttataaggtgaggtaactcagaacttaatttaaaagtcttaaatattctgatacaattcagctgtcttctctaccttaccatagccagttgctttcattttaaaccagagcaagtaacatattagtgacttgaatcttcataagttaaagtaaaaaacagcaaaaaacctagatctttgtcttttagaacacagaccattttcaggaaagcagttagctaagtgtttaattcatgaatattgtatactgcatcccctaccacaatttacacaatcctgtggatagtcctacctcaccctggtcaacctacatgatccttaagctaatggcgaatcacgatgaccttgtagacatgcacacaactatacctttgtccaacagatcataatatatctgctatccaactggttttacctgcctaatcctactgatttgggcactgcttgtatagtctctcaagttcacaggaaatgttgattttctaaggtcctcatttttacagagtatacaggcaaagtgacaggggaaaaggaattagtctaagagtaaggggatgattattatattgaggctaaaaccacaaagtggctcaggctttaaaaaaaaaacactgtggataatgacaaaaagcataagtaaaaatatttgagaaaaataaagtacaagttttgaacaac

SEQ ID NO: 107748 - DNA, 4212 bp, Homo sapiens
  Payload ID: 1152
  Gene Symbol: ANKRD50
  Gene Name: ankyrin repeat domain 50
  Uniprot ID: Q9ULJ7
  ENST ID: ENST00000515641
  CDS Start-End: 301-4053
agttactgccctgacggcggcggcggcggcggttggccggtgggggctggggcgagcacgaccgattctgctgggaaagctggaactggcagccgccgggggccaagaggaggatccggagctgggagcgtgccccgggcccggcggaggaggcggctgcagttggagtggagtcttgggagcgctgctggcagcgacttctcagcgaagcaagtgtctgagactgagagtccctaacagcggcagcggcggccacggcggcggctggggccgaggtgtgttctactccctcttctgggaatgaagcctccccagcaaagcctatacctgcttgttgattctgttgatgaagggtgtaacattactgaaggtgaacaaacgtctaccagcttatctgggactgttgcagcacttttagctggtcaccatgagttctttccaccatggctattgcttctctgttctgcccgaaagcagagtaaggctgttactaaaatgtttactggttttcgaaaaataagtttagatgaccttcggaaggcatatatcgtcaaggatgttcagcagtacattcttcatcgtttagatcaagaagaagctttgcgacaacacctcacaaaagaaactgcagagatgttaaatcaactgcacattaaaagcagtggatgctttctttacctagaacgagttttagatggagttgtagaaaattttattatgttaagagaaattcgtgacatcccaggaactctaaatggtttatatctctggctgtgccaaagactttttgtaagaaaacaatttgcaaaggttcagcctattttgaatgtgattcttgcagcctgccgacctttgaccataacggaattatatcacgcagtatggaccaaaaacatgtcgttaactttggaagattttcaacgcaagttagatatcctctccaaacttcttgttgatggactaggaaatacaaaaatactgtttcattatagttttgccgagtggcttctggatgtgaaacactgtactcagaagtatttatgtaatgcagcagaaggacacagaatgttggctatgagttatacctgtcaagccaagaatttaacaccattggaagcacaagaatttgcattgcacttaattaactcaaacttacaattagagacagcggagttagctctgtggatgatatggaatggtacacctgtcagagattccctttctactttgatacccaaggaacaagaagtgctacagctgttggttaaagctggggctcatgtcaacagtgaagacgatcgcacatcatgcatagttcgacaagccttagaaagagaggattccattcggacattattagataatggagcttcagtaaatcagtgtgattcaaatgggagaacattattggctaatgctgcatatagtggcagtcttgatgtagtcaatttacttgtctctaggggagcagatttagagatagaagatgctcatggacatacaccactcactctagcggctagacagggacataccaaggtggttaattgtttgattgggtgtggagcaaatattaatcatactgatcaagatggttggacagcattaagatctgctgcttggggtggccatactgaggtagtttctgcactactttatgctggcgtaaaagtggattgtgcagatgctgatagccgaacagctttgagagcagcagcatggggaggacacgaggatattgtactgaatttgctacaacatggcgctgaagtgaacaaagctgataatgaaggtagaactgctttgatagcagcagcatacatgggacatagagagattgtggaacacctactggaccatggagcagaagtaaatcatgaggatgttgatggcaggactgcactctctgtagctgcactttgtgtgcctgcaagtaaagggcacgcatcagttgttagccttttaattgatcgaggtgctgaagtagatcattgtgataaagatggcatgactccactgctggtagctgcctatgaaggacatgttgatgtggttgacttgcttctagaagggggagcagatgtagatcacacagataacaatggccgtacacccctcttagcagcagcgtctatgggtcatgcatcagttgtaaatacacttttgttttggggtgcagctgtggatagtattgatagtgaaggtaggacagtcctcagtatagcttcagcacaaggaaatgttgaggtggtacgtactctactggatagagggttagatgaaaatcacagagatgatgctggatggacacctttgcacatggcagcttttgaagggcacagattgatatgtgaagcacttattgaacaaggtgctagaacaaatgagattgacaatgatggacgaatccctttcatattagcttcacaagagggtcattatgattgtgttcaaatattactggaaaacaaatccaacattgatcaaagaggttatgatggaagaaatgcactgcgggttgctgcattagaagggcacagggacattgttgaattgctttttagccatggtgctgatgttaactgcaaagatgctgatggtcggcctacactttatatcttggccttagaaaatcagcttacaatggccgaatattttttagaaaatggtgcaaacgtagaagcaagtgatgctgaaggaaggacagcacttcatgtgtcttgttggcaaggccatatggaaatggtgcaggtcctgatagcataccatgctgacgtcaatgctgcagacaatgaaaagcgctctgctttgcagtctgcagcctggcagggccatgtaaaagtggttcagcttctgattgagcatggtgctgtagttgaccatacatgtaaccaaggtgcaactgcactctgtattgcagcccaggaagggcacattgatgttgttcaggtcttattagagcatggtgctgatccaaaccatgctgatcaatttggacgcactgctatgcgtgttgcagccaaaaatggacattctcagataattaaattattagaaaaatatggtgcatctagtttgaatggctgttccccatctcctgttcacacaatggagcaaaaacctctacagtcattgtcttcaaaagtgcagtcattaacaattaaatcaaatagctctggtagtactggtggaggggatatgcagccttcgttacgtggtttacctaatgggcctactcatgcttttagttctccttcagaatctccagattctacagttgaccggcagaagtcatcactgtcaaataattccctgaaaagctcaaaaaattcatctttgagaactacttcatctacagcaacggctcaaacagtgccaattgatagctttcataacttgtcatttacagaacaaattcagcagcattcattgccacgcagtagaagtcgacagtcaattgtttccccatcttccacaacacagtccttaggacagagtcataattcaccaagtagtgaatttgagtggagtcaagtaaagcccagtttgaagtcaactaaagcaagtaaaggggggaaatcagaaaattctgccaagtctggatcagctgggaaaaaagcgaaacaaagtaattcttcacagccaaaggttttagaatatgaaatgactcagtttgatagaagaggacctatagccaaatccgggactgctgcaccacctaaacaaatgccagcagaatctcaatgcaaaattatgataccttcagctcagcaggaaattggtcgatctcaacagcagtttcttattcaccaacaaagtggggaacagaagaagagaaatggaataatgacaaatccaaattatcatcttcagagcaaccaggtttttcttggtagggtttcagtcccacgaacaatgcaagatagagggcatcaggaagtgttggagggatacccttcctcagagacagaattaagccttaaacaagctctgaagcttcagattgaaggttctgaccctagcttcaactataaaaaggaaacaccattataaaagtttcctattctgtgaaacagaagacattgtgatggagtggttcttcagctactggatggaaacatatgcctgttgatttgctgaaaaaacaaaaaaaatgaagaatgtgatctctgcagtacagttaccttaattactgtaatgtgcctaaatagt

SEQ ID NO: 107749 - DNA, 8794 bp, Homo sapiens
  Payload ID: 1152
  Gene Symbol: ANKRD50
  Gene Name: ankyrin repeat domain 50
  Uniprot ID: Q9ULJ7
  ENST ID: ENST00000504087
  CDS Start-End: 1039-5328
agttactgccctgacggcggcggcggcggcggttggccggtgggggctggggcgagcacgaccgattctgctgggaaagctggaactggcagccgccgggggccaagaggaggatccggagctgggagcgtgccccgggcccggcggaggaggcggctgcagttggagtggagtcttgggagcgctgctggcagcgacttctcagcgaagcaagtgtctgagactgagagtccctaacagcggcagcggcggccacggcggcggctggggccgagttacttgtggaaattgttgattacccggacgtcttaaaaccaagaaacctgtgaacaggttcattaagaatctgctgtcttgaaaaatgcatattatgaatgctttgaattaagaaggtgttaacagtggttgtcatttctgccacataagagactataatctgaaacagttcctggcagttgcccagatgcctgaaactggcacgatctagtactcttgagtgatcatccttcaacgagaaatacagagctacttacatactgtacctcataccgtataaatgtaatctctctgatgccatttaatgcagtggacctcttttcagaatctaattgtcagatgcagaattaacacttggaatctggagaagcattttgtacaaattgaaagattgggttttttctttagttttccacatgtattgtctcatctctgttcttgaaacatccacaatcacataaactccagttataaccatggagttatgtgactcattaaaatttaggaaaagtgttgctgagctgtggaatcaggcgtttctccctcagttcaacaactaatacatagactgctgatcaagaataaggaaccaaataaagtcatgcacgttctgttgacagaggaactctgtggctgttgaattttactgtaactagttactctgtcttcagagtcaacttaatatacaagttatgtcataatggatggaaagacctgtgttgatgtatccagactctagcaaatgaagataaaaaacccgttatgactaatccttgggaagagaaagtctgcaaaatggctcaaaccagtttactgcaagggaagcagttttactgtagggagtgggttttccacaagcttcagcattgcctccaggagaaaagtaactgctgcaatagtgctgtcaatgcaccatcacttgtaatgaattctgggaataatgctagtggtgtctctggaaagggagctgcctggggtgtgttgttggtaggagggcctggcagtggcaagacggccctatgtactgaactcttatggccaagttcacctgcaagtttgcagagaggtttacatcgccaagctttggcctttcatttctgcaaagcccaggactctgatactttgtgtgttggagggtttattagaggtctagtagcccagatctgccgcagtggactactccaaggatatgaggacaagctaagggatccagcagtccaaagcctcttacagcctggggagtgcgagagaaacccagccgaagcatttaaaaggtgtgttctactccctcttctgggaatgaagcctccccagcaaagcctatacctgcttgttgattctgttgatgaagggtgtaacattactgaaggtgaacaaacgtctaccagcttatctgggactgttgcagcacttttagctggtcaccatgagttctttccaccatggctattgcttctctgttctgcccgaaagcagagtaaggctgttactaaaatgtttactggttttcgaaaaataagtttagatgaccttcggaaggcatatatcgtcaaggatgttcagcagtacattcttcatcgtttagatcaagaagaagctttgcgacaacacctcacaaaagaaactgcagagatgttaaatcaactgcacattaaaagcagtggatgctttctttacctagaacgagttttagatggagttgtagaaaattttattatgttaagagaaattcgtgacatcccaggaactctaaatggtttatatctctggctgtgccaaagactttttgtaagaaaacaatttgcaaaggttcagcctattttgaatgtgattcttgcagcctgccgacctttgaccataacggaattatatcacgcagtatggaccaaaaacatgtcgttaactttggaagattttcaacgcaagttagatatcctctccaaacttcttgttgatggactaggaaatacaaaaatactgtttcattatagttttgccgagtggcttctggatgtgaaacactgtactcagaagtatttatgtaatgcagcagaaggacacagaatgttggctatgagttatacctgtcaagccaagaatttaacaccattggaagcacaagaatttgcattgcacttaattaactcaaacttacaattagagacagcggagttagctctgtggatgatatggaatggtacacctgtcagagattccctttctactttgatacccaaggaacaagaagtgctacagctgttggttaaagctggggctcatgtcaacagtgaagacgatcgcacatcatgcatagttcgacaagccttagaaagagaggattccattcggacattattagataatggagcttcagtaaatcagtgtgattcaaatgggagaacattattggctaatgctgcatatagtggcagtcttgatgtagtcaatttacttgtctctaggggagcagatttagagatagaagatgctcatggacatacaccactcactctagcggctagacagggacataccaaggtggttaattgtttgattgggtgtggagcaaatattaatcatactgatcaagatggttggacagcattaagatctgctgcttggggtggccatactgaggtagtttctgcactactttatgctggcgtaaaagtggattgtgcagatgctgatagccgaacagctttgagagcagcagcatggggaggacacgaggatattgtactgaatttgctacaacatggcgctgaagtgaacaaagctgataatgaaggtagaactgctttgatagcagcagcatacatgggacatagagagattgtggaacacctactggaccatggagcagaagtaaatcatgaggatgttgatggcaggactgcactctctgtagctgcactttgtgtgcctgcaagtaaagggcacgcatcagttgttagccttttaattgatcgaggtgctgaagtagatcattgtgataaagatggcatgactccactgctggtagctgcctatgaaggacatgttgatgtggttgacttgcttctagaagggggagcagatgtagatcacacagataacaatggccgtacacccctcttagcagcagcgtctatgggtcatgcatcagttgtaaatacacttttgttttggggtgcagctgtggatagtattgatagtgaaggtaggacagtcctcagtatagcttcagcacaaggaaatgttgaggtggtacgtactctactggatagagggttagatgaaaatcacagagatgatgctggatggacacctttgcacatggcagcttttgaagggcacagattgatatgtgaagcacttattgaacaaggtgctagaacaaatgagattgacaatgatggacgaatccctttcatattagcttcacaagagggtcattatgattgtgttcaaatattactggaaaacaaatccaacattgatcaaagaggttatgatggaagaaatgcactgcgggttgctgcattagaagggcacagggacattgttgaattgctttttagccatggtgctgatgttaactgcaaagatgctgatggtcggcctacactttatatcttggccttagaaaatcagcttacaatggccgaatattttttagaaaatggtgcaaacgtagaagcaagtgatgctgaaggaaggacagcacttcatgtgtcttgttggcaaggccatatggaaatggtgcaggtcctgatagcataccatgctgacgtcaatgctgcagacaatgaaaagcgctctgctttgcagtctgcagcctggcagggccatgtaaaagtggttcagcttctgattgagcatggtgctgtagttgaccatacatgtaaccaaggtgcaactgcactctgtattgcagcccaggaagggcacattgatgttgttcaggtcttattagagcatggtgctgatccaaaccatgctgatcaatttggacgcactgctatgcgtgttgcagccaaaaatggacattctcagataattaaattattagaaaaatatggtgcatctagtttgaatggctgttccccatctcctgttcacacaatggagcaaaaacctctacagtcattgtcttcaaaagtgcagtcattaacaattaaatcaaatagctctggtagtactggtggaggggatatgcagccttcgttacgtggtttacctaatgggcctactcatgcttttagttctccttcagaatctccagattctacagttgaccggcagaagtcatcactgtcaaataattccctgaaaagctcaaaaaattcatctttgagaactacttcatctacagcaacggctcaaacagtgccaattgatagctttcataacttgtcatttacagaacaaattcagcagcattcattgccacgcagtagaagtcgacagtcaattgtttccccatcttccacaacacagtccttaggacagagtcataattcaccaagtagtgaatttgagtggagtcaagtaaagcccagtttgaagtcaactaaagcaagtaaaggggggaaatcagaaaattctgccaagtctggatcagctgggaaaaaagcgaaacaaagtaattcttcacagccaaaggttttagaatatgaaatgactcagtttgatagaagaggacctatagccaaatccgggactgctgcaccacctaaacaaatgccagcagaatctcaatgcaaaattatgataccttcagctcagcaggaaattggtcgatctcaacagcagtttcttattcaccaacaaagtggggaacagaagaagagaaatggaataatgacaaatccaaattatcatcttcagagcaaccaggtttttcttggtagggtttcagtcccacgaacaatgcaagatagagggcatcaggaagtgttggagggatacccttcctcagagacagaattaagccttaaacaagctctgaagcttcagattgaaggttctgaccctagcttcaactataaaaaggaaacaccattataaaagtttcctattctgtgaaacagaagacattgtgatggagtggttcttcagctactggatggaaacatatgcctgttgatttgctgaaaaaacaaaaaaaatgaagaatgtgatctctgcagtacagttaccttaattactgtaatgtgcctaaatagtaaggctgccttctcaatgtaaccctctgtgcttaaaaaatttcattttgtgtgctttgtattcactacacaggaataagcactttttaaaaatgcagatacatactgcagttccctgataaaagctgaaaagaaaatttgagtattttaagttaagatgtgataaaaaatgtgcatgtgccataatcaaatatatatgaaaaggcagtgttccttgtatttatttttttttctttttgtggcaaaagaaacttaaacatactgtttcagtcacattgcattgtagtgtatggcctgtttcttgtatctttaaagacgttgctcaataaaacaaatcttgcaactgttctatgttcactacaccttcagcattggataaaaatcattttctatataaatatcacattgaaatgaaaaaatgatttcttggcagtttaaaaaaaatattttatagtagtttagggagctgctttaagtagtttaaatctggattttcccagtagaattcttctcatctctggctaaacatgtcagaacaaacaaccaaccagtctgtaggcagaacaaagtcctatttcatccgctgggatacaatttcatcttccattcactttgtcattccacctctaagaagacagactatcattcctgaggcatgaaaattctcagggacaaagccatgcctcagtcacatgtgtgtgcagagagaaatgcacctgtctatctaagggtagatttttgatccctgaataattcattgactaaactgacctcttcctcctggctaaataaattaattttgctggcttctctctcagcggtttctattttgtaaattgctgcatgaccaaaatagccccactcaaaatcaattggattaattttaatggtttggttggatgaatattctggatgaatataaaatgtgctgcccttcacagatgacaccactcccctgtcaatcatagcacatgtgtactttttattgttacttaatagtgatggatttgcacttttctatcctcatactctttcctgttttcttctttgtacaattgcatgcaggagggctggatgccagggttaagagagaaattcatgacaaggaaggtaaaattggttcaaatgagcatgtgtcccacagccttagtctccttactcttaaatcagtggagctgtagcttagatgggtcgtttatatgtctggaaaagttgtcataacagtttagaagccaaggttgtggatttgatcttagaatgggcctgttaatcttatagaacccagaaattctgttcttttcatgtactgttgatgaggaatgaggaaagagaatttggagattcagcacaaaaccattgctacttctagaacaaaatctttagaatatgtcctaataacaaaggtcagtaatgtcatcttcatatatgaaggacacatgtgatacattgttcgtggaaatagaaatgtataattatgataaatgtttcacttgaatcttattgtaaggcttttcttgcttttattttttaaagtcagcaaaactcattttgtctgtcatctataagtcatagtgaggactacgagataagttgataagttcaattgatattaaggtgacatggcaatattaataactcaaatgtgaatgtttcaagtattgaattcttgtccctatgggacatttattaaataaaattaatgggactcttgcaaagtagccttaaaagtgttaatgagtctattaataaatatgaacacatactattattagaaccaactttactcatatctcaaatacagtacatttacattactgtagaggatgaagctctaatttctattacatgtaattttctttagaaagagaaccctgaaagctgccagtttttctattaactttgaattattgaaattgtatttatttaattttattgtttttacaaaattgcaccttgtgtccaaagggcgaagatatgacattgcataagggatttatgtttttcaaagagctaactgttttcatatccatactatatacacttgaagcaattggtaggaagagaacctattggaaaaatacgattttcaaaagtaagtattcctcgggatgtttttatataaattatgttttggaatagaacataaatgactttgagttaggataaggatgataggatgggtgctggagatgccctgccttgcttatttgtttctgtgggggatttaatactataaatgaaaatggcttctgctccattaaaaagtaaaaattgtcctccaaatataaaactccttaatagatatttttgaaattaaaatctttaaattttataaatcagctgttgccactacacaactatgatggcatgtgcttataacatttttataacattccgtctgtgtctattccctaaatatcatgagtttataataaggaaagtgataaaaatacagtaatgaaataaaaatctgaatgtttctaagaaaggttttggaaggaaaaatgacctgaaatcagtgcgtactgcaaagtacagccaataatttttgttctttgttttcacccccaccctcactggaattctcaccaaaaatagtttgatacttaaaaaacagaagtaaatacttttctcaatattgttttggctatgcaaatatttgttttgcttaatgtcctccatttacacttctcagcaaatgtagttgcaaacaaatgctttctttttatttttcccttggtttgaggtatgtaaatagccaaaaatgtacattgaatttcacattgtaaaagttttattttatcccttgtatgatattactcaaaaaatccctgtgtatatgaaagtgcataataaatatatttgctttacagagaagatcttgttttaattttgtccttgaaccagtagaacatgcatgatatgcatatagcataaacaactgttagttgttttaagttattatcttaaataaatcctgagcaaatgaatttggaaacattttgcaaagaagaaagtgaaatataacactgtccaaaggaaggtagaaaaacaaagatttactgtttatgtcttcctaagcctttttaaagacttaatgttcttttcccccccgtgactgattatatactatatcacaccatgtcaggttttgtgcctctgagaattgcagtaatccaataacttttgtatatgtgtgctccttgatcatcagaatattatggccatcttatggcggatattttgggagtttattgcaaacatggtcattcattttctaaataaaatttgtgtgtttcttcactcag

SEQ ID NO: 107750 - DNA, 8688 bp, Homo sapiens
  Payload ID: 1153
  Gene Symbol: ANKRD52
  Gene Name: ankyrin repeat domain 52
  Uniprot ID: Q8NB46
  ENST ID: ENST00000267116
  CDS Start-End: 123-3353
aggcggggccgcgctctccctgcagccgccaccgcagccgccgcctgggccgctccgtgtccccggtggagccgccgccgccgccgccgggagctcgatgcggacggagcccgggccgagccatggggatcctcagcatcacggaccagccgcccctggtccaggccatctttagccgagatgtggaggaagtgcgttccctactctcgcagaaggagaacatcaatgtgctggaccaagagaggcgaactccattgcatgctgctgcctacgtaggcgatgtccccatcctccagttgctactgatgtcaggtgctaatgtcaatgctaaggacacactgtggctgacccctcttcatcgtgctgctgcctcccgaaacgagaaggtgctggggctgctgctggcacattcagcagatgtgaatgcccgggacaagctgtggcagacaccactgcatgtggctgctgccaaccgggccaccaagtgtgctgaggctctggcacccctgttgagcagcctcaacgtggctgacaggagcgggcgcagtgctctgcaccatgcagtgcatagtgggcatcttgagacggtgaacctgctcctcaacaagggagccagcctgaatgtctgtgacaaaaaggagcggcagcctctgcattgggcagcttttctagggcacttggaggtcctaaaactgctggtggcacggggagcagacctcggctgcaaggaccgcaagggctatgggctgctccatacagctgctgccagtggccagattgaagtggtgaagtacctgcttcggatgggagcggagatcgatgaacccaatgcttttggaaacacagctttgcacatcgcctgctacctgggccaggatgctgtggctattgagctggtgaatgccggagccaatgtcaaccagccgaatgacaagggcttcacgccactgcatgtggctgcagtctccaccaatggcgctctctgcttggagctactggttaataatggggctgacgtcaactaccagagcaaagaagggaaaagtcctctgcacatggctgcaatccatggccgtttcacacgctcccagatcctcatccagaatggcagcgagattgattgtgccgacaaatttgggaacacgccactgcatgtggctgctcgatatggacacgagctgctcatcagcaccctcatgaccaatggcgcagataccgcccggcgtggcatccatgacatgttccccctgcacttagctgttctctttggattctctgactgttgtcgtaagcttctttcctcaggtcagttgtacagcattgtgtcttcactcagcaatgagcatgtgctttcagctgggtttgacatcaatacacctgacaaccttggccgtacctgtcttcatgctgctgcttccggagggaatgttgaatgtcttaatttgctgttgagcagtggagctgacttgaggaggagggacaaatttggcaggaccccactgcactatgcagctgctaacggtagctaccagtgtgcagtaacattggtgactgctggggcaggtgtcaacgaggccgactgtaaaggctgctctcccctccactacgctgccgcttctgacacttacaggagagcggaaccccatacaccttccagccatgatgccgaagaggacgagccactgaaggagtcccgcaggaaggaggccttcttctgtctggagttcttactggataacggtgcagacccctccctgcgggacaggcagggctacacagctgtgcactatgcagccgcctatggcaacagacagaacctcgaactgctcttagaaatgtcctttaactgcctggaggatgtggagagcaccattccagtcagccctttgcacttagctgcctacaacggtcactgtgaagccttgaagacgctggcggagacgctggtgaatctggacgtaagggaccacaagggccggaccgcactcttcctggccacggagcgcggctctactgagtgtgtggaggtgcttacagcccacggcgcctctgccctcatcaaggagcgcaagcgcaagtggacacccctgcacgctgctgctgcctctggccacactgactccctgcacttgctgatcgacagtggggaacgagctgacatcacagatgtcatggatgcctatggacagaccccactgatgctggccatcatgaatggccatgtggactgtgtacatctgctgctagagaaaggatccacagctgatgctgctgacctccggggccgcactgccctccaccgcggggcagtgactggctgtgaggactgcctggctgccctgctggaccacgacgcatttgtgctgtgccgagactttaagggccgcacgcccattcacctggcctcagcctgtggccacactgcagtactgcggaccctgctgcaggctgccctttccacagatcccctggatgccggggtggattacagcggatactcgcccatgcactgggcctcctacactggacatgaagattgtctggagttgttacttgaacacagcccgttttcgtacctggaaggaaaccccttcactcctttgcactgtgcagtgattaataaccaagacagcaccacagagatgctactgggagctctgggtgccaagattgtgaacagccgagatgccaaaggacggaccccccttcacgccgctgccttcgcggacaatgtctctgggctccggatgctgctgcagcatcaagctgaggtgaacgccactgaccacactggccgcactgcgctcatgacggcggctgagaacgggcagaccgctgctgtggaatttctgctgtatcgagggaaggcagaccttactgtgttggatgagaacaagaacacggccctccacttggcttgtagcaagggccatgagaaatgtgccctcatgatcctggcagaaacccaagaccttggccttatcaatgctaccaacagtgcgctgcagatgccactccacattgctgcccggaatggtctagcttctgtggtacaggccctgctgagtcatggggccacagtgctggctgtggatgaagaaggtcacaccccagcactggcctgtgcccccaacaaagatgtggcagactgcctggccttgatcctttccaccatgaagcctttcccacccaaggacgccgtcagtcctttcagcttcagcctgctcaagaactgcagcattgcagccgccaagacggtgggtggctgcggcgccctgccccatggggcctcctgcccctacagccaggagcggcccggcgccattgggttagatggctgctactctgagtagccccctccagtgtccctcccccgccggtggcttgatatctaattctatttatttagaaaaagtctaaacatttagggcactttaaaggagaacacgactgggtggagggggcggaggggaaggaagccctggggagcagctgctcacccctttgccacaccatcttggcctggcaggggtctgggactgacagggagcaccccaggcccttggtacccccagggcgaccccttctgccaagtgtcccaaaatgattgctaaatgcctggctcccccactctttgactccatctcttggttccctctttctgctgccagctcccccgactcttccctggggactcctctctgtgtcccccttctcccctgcccctactgccaggcagatcccctcttcttccatacccatcactgcctccctgctcggccggtccctccatccccgcagcagtgagaagccttaatttctggtactgtgtgagcactctgggggtgtccccctccccccttcaggggcagctagaggatgaggggggaggatatttagcactggggcctggagctttttccccacttctgtaccctatcacccctaaagttcaaatgcaaaacacttgaagcagcaactactgtacctgggccccaatcctgcactctcccctggctcctcatatgcaaatcaagggctggttctgcccccacagcctgccccctccccattccctcccactcctagcctggcccctaaccacgcactttaaccttgcttctttcttttatcttcttttgggagggcagagcctgtggtcattcctgccctggctctccttcccttgaactttgaggcttgtcatgaatttttaagtaagcgttttatcctttaggggaagaaacaaattaatttcctgcccatttcaaaaccacagccctagtatgtccactgtgtttcaggcatgtgtttgcatgtatatggagggagggaccatgttcttcctcctgtgccgccaagcccatagtttatctgtgctccctatctgcctccaccttccgttatgtccaagagtacccactgccccagtcactcctgatctgaagccaaagatggtaggaggggcagggccgacaagggaccgtggctactcgggacccaggcttcccctccagtgtgaggaagaagctctgacctagagagagatgaataggtactggggcttggtccctgccttcccagcagggaggaaagatgggattgagctgggggctgcactgataagatttctaaagtcgcaccccaaaagccaaactgggctggagtgaagagggggcagttttctctctaaatgtagcattgaatttggccctggtccctttaagtgctctgtccacccatctcctagtgcagcctcctggacagttggacccactcctgcagcccagtgttcccttcctcacactcaatacctcagccaggggccaagacacagaacttgaatagaggtcatgccccctccgcccccacactgcatccttgcccagtttggctgccatcagtattgtcccctgagaactggacaggcttcgtttacacagtacagggtctcccctgaggggggatccttcagcctccctcccctactcaagtttgctttattcacagtcttacccatcttttagttgtataccctgaatgtcttgccacccttgtcaagggtgggctgaggggaggggggcgtcccagggaccccctccctccccaacggatacctttaaccatacctcatgctggtttccagaagcctggggtgttgtccaagtccttatcttttcatggtcccttttgatcccctgtctctctgtgttttgcttctcccaaccctcagttcctaaatcatttcaaggcttccaaatgaccattattgatgagaaggattgtgcagcttttagtttttatttttattttcaaagccaaagggccttgtgacgcccctcttgcccacctccctccacaccgtgtcctcccctatatgacaatcaatgtgacctctcttaagggctgcagcccccatccccaaccctgctggctctgcaaagcttgccttcccttcaattctctctcctgaaatcttcccattccaccccctccctctcatcttggtgctgggaattaggtggtggggggcaaggggagtgagaagatgggtcctccagagagaacttgccgggtgtgagtcgtgttctcctttcgtgatgtttggtgatggcgggaagcgtctgagtgtcagagccccgttgtcttgctagatgagatttctgggggctgtctgcgccctgctgccctcagcgcactgtcagcagtgctgggaggtggtggggagtcctctgtccctccatatgtggctgtgaggaagcctgggggacaagcagcctcctctccttatgccaaaggaaaccccacgccccaccctgggctccccagccctagtgttttttgaagcattttgaccattctcatggccactgcatatttattttaatgttaagattttttttaaacctctttgacttaaacgggtgtggagaagtaaaacaggcagaatgccccccagtcttcatgggggagggcggggagggaacagcgccttccctttgccctccccctcccccctctccccaccgcagccctaaagcacttgcttcaagtaataagcacttttgtgaaaaggcctattttaagcgaggaccctgggagcagccccaggtcccagcaaaggaaacagagcgagggcgacataggagacagggaaacagacgtgtgaatcagagggtgagatggaaagagccagtttttagtttctgattttgggggagctatttctgattgggcggtggctctggtagggtcatatactatccttcagaaaaacgaatggcacaaaccgtgggtcccaggaaggaccagcagacccgggtcactgccactgtccactgagactgacgggccacctcccctgccccgtggccccctgagccataggactgctgaaaaccactgaatgtacagcccaggttggggtggggagcagcccctgggggagggggcttctccttttgtttggtgctgtggggcgtgggagagaaaagactgagggactgccaccccacgtagatgtgtttcttggggtggaggggctgaggagggcctacctccctctccaaccccagccatggcccctcttccttcctcacccctatccgttttgactgtaagtccagctcacctttgccttcaatatgtaaccaaaggaaaactcaatactgtttccaccactgtctgcccacccgagcaccttcttactccctggacctagaaggggagaagaggctggaggtggggtggatggggccagagtgaacggttctacagctgtatccccagaacctcctccagggtcttggaaggagtcctgagaggtgggattggggccgggctggcagggctgagtttgcgcactgtgtatcttatgcacatgagtgtttttgtctaaatgactccagtgactgctccagcggggaggccccttcctccttccctctcagccatttctcacccacttcccatacccagtgttcatcccctacctccccttcccaccgcaaaggaaaatagccttacagaccctagcccagaaaccctactcctggggcaaaccagtatgggcccccatcccgcctagtttgaaccctaccttttaagaaggagggataaggaacaaagcagccccttcccctctaattgtggtggctccagccttctgcagccttgacccaggttgggcaagggcggaggtgaggaatctttgaggaccaagcccagtggtctgggaatcgggaggtagagagggaagggtctgccttgggggctccctcctcccaacccaacccctagagaagcgaccaaatcccagagatggggtgaagctggggtggggagggtctgctctttgaattacttgaaggtactgactccaaggctgctgttgcccacttaggtgtgagggggacactgtcactgcatttgggagggcagagggtggcgggtaaccagaggatccaccttggccctcacccactcctgctaggccctttccctggggaatctggaagcctgactttgcccccagggaagttggggaccgccttccctcccttctccacctctcactctgggcaccctctccaattgcactaaagtagctgttgtgccagtctgccccccacaaggggggaggtctctgcttccagtcttcttcccccgctgcctccgctcccaccctggacaatctccttgtttcccttgtgttcctggatagctcagctttgtatgtgtgtttggggggtgggggtgggttctggcttgagtgggtttggcaggggtttgggaagggttaggggaggatggaggatgaagtctcctacccccttctccagctccaggccacagaagcctgggaagggagggtgcctactctcgctgctgtgtgtcttgcagatgtgccaaaatgggggtgggtgggaggggagggtgcctggcagagcagcccctggggtggctctctcaaagcaatatagttcccctgcgggggacagcaagacaggggagagggttggggtggggacctgggggttccccatgtacagctatgtatattcaggggtgttctccgtctggtacccgctgtgggcatctatgtgtgtgtgaacctccccttccccatgccctgcatgacctgtgatgctgcagacaccaccatcctgtgtgcaggtgtgtgttggggggcacggaggggcatgttccatgtcctgttgcaccctccaccctgtgacccatgtactcggttgtaggaagtaaagagaactgagcacaattcactggattctagtggaatctttctctaagcaattttcccattcctgcctctccctgccccggaaccacctgtggtgctagtgttgggatcgggggcgtttaacgctggtgggcagcaataaggggcagatgtgcccagatgcctgcatccccagggtgccgagggcagcaggaaaaagtggggacctcggtgcatttgccccacccctcccctccctgggctaaagcacaatgttctccccgcagattaatgaccctgcaccctccaggcccctactcacatcctcccccaaccggcttcgggtcctcccaccacactctggttttctatgctgttttggtgcaagtacaactgtcgtagtcatggctttgggatgggttctgtttattaaaatcctattgctccta

SEQ ID NO: 107751 - DNA, 2185 bp, Homo sapiens
  Payload ID: 1154
  Gene Symbol: ANKRD53
  Gene Name: ankyrin repeat domain 53
  Uniprot ID: Q8N9V6
  ENST ID: ENST00000272421
  CDS Start-End: 267-1298
ctgagtttcccgggcagcaggactgggaggttgagtgggggttttggctcagaccgggagcagagcggcgggtggggagcggcaggcgggcagggtccccggaggcccccgggctctgcccctccagctagagaggcagccgaaccctagcggcctggaaggggccgggaaaccgcggccagctggcaaggagtggcccccgggggcggggcgccggcgggtgtgtgagtagcccgcccggcccgggtccgagttccagccccgcgatggcctccgcgggcagcaccgctcggcgggcgggctccggaagctggcactcagaaaggggagaagggagaggtgctcggccgcagccaactccaagtggctccatgcagcaggcgaacaaagtctccttgaaggccacctggactgacgcggagtccaagcagcccagccagcccctgcccgacctcgcagaccacctcagtgcgcaggcgactgccctcgccaggccgcgccgccctgcctcgctcaccccgccccgcgctgaccccagccccagcaaggagtccgaccagacggcaatcgaccagacggcgatcgggagctactaccagctgttcgcagcggctgtgggcaacgtggaatggctgcgattctgtctgaaccagagcctcagggaaatccccaccgacgacaagggcttcactgccatccacttcgccgcccaatggggcaagcttgcatgcctgcaggtcctggtagaggagtacaagtttcccgtggacctgctgaccaacaatagccagacacccctgcacctcgtcatccacagggacaacaccaccgtggccctcccctgcatctactacctgctggagaaaggcgcagacctcaatgctcagacatgcaacggctccacgcccctgcacctggcagcccgtgacggcttgctggactgtgtgaaggtcctggtgcagagtggcgccaacgtccatgcccaagatgccatgggctacaaacccattgacttctgcaaaatatggaaccaccgtgcctgtgcccggttcttgaaggatgccatgtggaaaaaggacaagaaggactttgcccgtgagatgacgaaaatgaagatgttcaagagccagctgaccctcatggagcacaactacctgattgagtatcaaggtcaaggatgcagtgtgcacttcccatttgccttttcccccatcacaccagagactctcctatggcaggacatttctctactatcagactgtggattcctttggagaagaagggaattgtctttctaaagagcacaaaattctcagagaagctgctatcagaaagtggctccacggcaagctgcacccaggccactctctggtctccaataccaagcaagcccgggccaccgccctctccaagaccccagagcaacgggaatcgcagcgttccaggagcttccacccctctgtggatgcacgcctgcaatgcattccacagcccacggagatgcccaagcccatctacaggaagcccacggtcaagcggcccacaatgtggaatgttagcaacaaccccgccagaccccccaccacccagatcagccactcgcagggcatccgcctgggcgtgcatccagaccccactccggagcacgacttcagcagcttcctggaggtgaggcctgatgggcacggcggtgcgcggctgcacacagtggacggccactgggtggcgcccgtgccgcggctgccttttgaggtgctgctgcgcatgctgtacccacgtgtatggccatacagaatgaaggtgccccagggcttttaccccatcagcatgagggaagtgcccaggaagcggcacctgggtgacaacaccttctggaccgacactctggccatgaacctgcgtgacacattcgatgaagccttcctggcagctgtgcgatctcatcaaggactccccaccctgccctccccacaaaccaacccataaagttattatggctacctctccccctgaggcagcccagtgaaggctgaagtgtggcaattcacgttgtgggtggcgaggaaagggggaggggtgcctatgggcttcccactcccaagctcgaggagtcacccttcccaatcaaaagcccagaccccaggcctcccttttctctgcaaataaatctcttggcaccccccca

SEQ ID NO: 107752 - DNA, 1666 bp, Homo sapiens
  Payload ID: 1154
  Gene Symbol: ANKRD53
  Gene Name: ankyrin repeat domain 53
  Uniprot ID: Q8N9V6
  ENST ID: ENST00000360589
  CDS Start-End: 35-1627
cccgcccggcccgggtccgagttccagccccgcgatggcctccgcgggcagcaccgctcggcgggcgggctccggaagctggcactcagaaaggggagaagggagaggtgctcggccgcagccaactccaagtggctccatgcagcaggcgaacaaagtctccttgaaggccacctggactgacgcggagtccaagcagcccagccagcccctgcccgacctcgcagaccacctcagtgcgcaggcgactgccctcgccaggccgcgccgccctgcctcgctcaccccgccccgcgctgaccccagccccagcaaggagtccgaccagacggcaatcgaccagacggcgatcgggagctactaccagctgttcgcagcggctgtgggcaacgtggaatggctgcgattctgtctgaaccagagcctcagggaaatccccaccgacgacaagggcttcactgccatccacttcgccgcccaatggggcaagcttgcatgcctgcaggtcctggtagaggagtacaagtttcccgtggacctgctgaccaacaatagccagacacccctgcacctcgtcatccacagggacaacaccaccgtggccctcccctgcatctactacctgctggagaaaggcgcagacctcaatgctcagacatgcaacggctccacgcccctgcacctggcagcccgtgacggcttgctggactgtgtgaaggtcctggtgcagagtggcgccaacgtccatgcccaagatgccatgggctacaaacccattgacttctgcaaaatatggaaccaccgtgcctgtgcccggttcttgaaggatgccatgtggaaaaaggacaagaaggactttgcccgtgagatgacgaaaatgaagatgttcaagagccagctgaccctcatggagcacaactacctgattgagtatcaaaaagagcacaaaattctcagagaagctgctatcagaaagtggctccacggcaagctgcacccaggccactctctggtctccaataccaagcaagcccgggccaccgccctctccaagaccccagagcaacgggaatcgcagcgttccaggagcttccacccctctgtggatgcacgcctgcaatgcattccacagcccacggagatgcccaagcccatctacaggaagcccacggtcaagcggcccacaatgtggaatgttagcaacaaccccgccagaccccccaccacccagatcagccactcgcagggcatccgcctgggcgtgcatccagaccccactccggagcacgacttcagcagcttcctggaggtgaggcctgatgggcacggcggtgcgcggctgcacacagtggacggccactgggtggcgcccgtgccgcggctgccttttgaggtgctgctgcgcatgctgtacccacgtgtatggccatacagaatgaaggtgccccagggcttttaccccatcagcatgagggaagtgcccaggaagcggcacctgggtgacaacaccttctggaccgacactctggccatgaacctgcgtgacacattcgatgaagccttcctggcagctgtgcgatctcatcaaggactccccaccctgccctccccacaaaccaacccataaagttattatggctacctctccccctgaggcagcccagtg

SEQ ID NO: 107753 - DNA, 1797 bp, Homo sapiens
  Payload ID: 1154
  Gene Symbol: ANKRD53
  Gene Name: ankyrin repeat domain 53
  ENST ID: ENST00000441349
  CDS Start-End: 195-959
tggggagcggcaggcgggcagggtccccggaggcccccgggctctgcccctccagctagagaggcagccgaaccctagcggcctggaaggggccgggaaaccgcggccagctggcaaggagtggcccccgggggcggggcgccggcgggtgtgtgagtagcccgcccggcccgggtccgagttccagccccgcgatggcctccgcgggcagcaccgctcggcgggcgggctccggaagctggcactcagaaaggggagaagggagaggtgctcggccgcagccaactccaagtggctccatgcagcaggcgaacaaagtctccttgaaggccacctggactgacgcggagtccaagcagcccagccccagcaaggagtccgaccagacggcaatcgaccagacggcgatcgggagctactaccagctgttcgcagcggctgtgggcaacgtggaatggctgcgattctgtctgaaccagagcctcagggaaatccccaccgacgacaagggcttcactgccatccacttcgccgcccaatggggcaagcttgcatgcctgcaggtcctggtagaggagtacaagtttcccgtggacctgctgaccaacaatagccagacacccctgcacctcgtcatccacagggacaacaccaccgtggccctcccctgcatctactacctgctggagaaaggcgcagacctcaatgcgttcttgaaggatgccatgtggaaaaaggacaagaaggactttgcccgtgagatgacgaaaatgaagatgttcaagagccagctgaccctcatggagcacaactacctgattgagtatcaaggtcaaggatgcagtgtgcacttcccatttgccttttcccccatcacaccagagactctcctatggcaggacatttctctactatcagactgtggattcctttggagaagaagggaattgtctttctaaagagcacaaaattctcagagaagctgctatcagaaagtggctccacggcaagctgcacccaggccactctctggtctccaataccaagcaagcccgggccaccgccctctccaagaccccagagcaacgggaatcgcagcgttccaggagcttccacccctctgtggatgcacgcctgcaatgcattccacagcccacggagatgcccaagcccatctacaggaagcccacggtcaagcggcccacaatgtggaatgttagcaacaaccccgccagaccccccaccacccagatcagccactcgcagggcatccgcctgggcgtgcatccagaccccactccggagcacgacttcagcagcttcctggaggtgaggcctgatgggcacggcggtgcgcggctgcacacagtggacggccactgggtggcgcccgtgccgcggctgccttttgaggtgctgctgcgcatgctgtacccacgtgtatggccatacagaatgaaggtgccccagggcttttaccccatcagcatgagggaagtgcccaggaagcggcacctgggtgacaacaccttctggaccgacactctggccatgaacctgcgtgacacattcgatgaagccttcctggcagctgtgcgatctcatcaaggactccccaccctgccctccccacaaaccaacccataaagttattatggctacctctccccctgaggcagcccagtgaaggctgaagtgtggcaattcacgttgtgggtggcgaggaaagggggaggggtgcctatgggcttcccactcccaagctcgaggagtcacccttcccaatcaaaagcccag

SEQ ID NO: 107754 - DNA, 1671 bp, Homo sapiens
  Payload ID: 1154
  Gene Symbol: ANKRD53
  Gene Name: ankyrin repeat domain 53
  ENST ID: ENST00000457410
  CDS Start-End: 140-1630
ctagagaggcagccgaaccctagcggcctggaaggggccgggaaaccgcggccagctggcaaggagtggcccccgggggcggggcgccggcgggtgtgtgagtagcccgcccggcccgggtccgagttccagccccgcgatggcctccgcgggcagcaccgctcggcgggcgggctccggaagctggcactcagaaaggggagaagggagaggtgctcggccgcagccaactccaagtggctccatgcagcaggcgaacaaagtctccttgaaggccacctggactgacgcggagtccaagcagcccagccccagcaaggagtccgaccagacggcaatcgaccagacggcgatcgggagctactaccagctgttcgcagcggctgtgggcaacgtggaatggctgcgattctgtctgaaccagagcctcagggaaatccccaccgacgacaagggcttcactgccatccacttcgccgcccaatggggcaagcttgcatgcctgcaggtcctggtagaggagtacaagtttcccgtggacctgctgaccaacaatagccagacacccctgcacctcgtcatccacagggacaacaccaccgtggccctcccctgcatctactacctgctggagaaaggcgcagacctcaatgctcagacatgcaacggctccacgcccctgcacctggcagcccgtgacggcttgctggactgtgtgaaggtcctggtgcagagtggcgccaacgtccatgcccaagatgccatgggctacaaacccattgacttctgcaaaatatggaaccaccgtgcctgtgcccggttcttgaaggatgccatgtggaaaaaggacaagaaggactttgcccgtgagatgacgaaaatgaagatgttcaagagccagctgaccctcatggagcacaactacctgattgagtatcaaaaagagcacaaaattctcagagaagctgctatcagaaagtggctccacggcaagctgcacccaggccactctctggtctccaataccaagcaagcccgggccaccgccctctccaagaccccagagcaacgggaatcgcagcgttccaggagcttccacccctctgtggatgcacgcctgcaatgcattccacagcccacggagatgcccaagcccatctacaggaagcccacggtcaagcggcccacaatgtggaatgttagcaacaaccccgccagaccccccaccacccagatcagccactcgcagggcatccgcctgggcgtgcatccagaccccactccggagcacgacttcagcagcttcctggaggtgaggcctgatgggcacggcggtgcgcggctgcacacagtggacggccactgggtggcgcccgtgccgcggctgccttttgaggtgctgctgcgcatgctgtacccacgtgtatggccatacagaatgaaggtgccccagggcttttaccccatcagcatgagggaagtgcccaggaagcggcacctgggtgacaacaccttctggaccgacactctggccatgaacctgcgtgacacattcgatgaagccttcctggcagctgtgcgatctcatcaaggactccccaccctgccctccccacaaaccaacccataaagttattatggctacctctccccctgaggcagcccagtgaa

SEQ ID NO: 107755 - DNA, 2184 bp, Homo sapiens
  Payload ID: 1155
  Gene Symbol: ANKRD54
  Gene Name: ankyrin repeat domain 54
  Uniprot ID: Q6NXT1
  ENST ID: ENST00000215941
  CDS Start-End: 194-1096
ggtttaagctggaagggtagtcattggttcgccgctctgtctcggcctgagcccgcccccgctcggttgccgtggttgcgggccctgcccgcccgccagctcgctgacagcacgactcagggcggagggaagtaggtccgttggtcggtcgggaacgaggctcaggcggccaggcccgcgcggagccgttgccatggcagccgccgccggggacgcggacgacgagccgcgctcaggccactcgagctcggagggcgagtgcgcggtggcgccggagccgctgactgacgctgagggcctcttctccttcgctgacttcgggtctgcgctgggcggcggcggcgcgggcctctcgggccgggcgtccggcggggcccagtcgccgctgcgctacttgcacgtcctgtggcagcaggatgcggagccgcgcgacgagctgcgctgcaagatacccgctggccggctgaggcgcgctgccaggccccaccggcggctcgggcccacgggcaaggaggtgcacgctctgaagagactgagggactcggccaatgccaatgatgtggaaacagtgcagcagctgctggaagatggcgcggatccctgtgcagctgatgacaagggccgcacagctctacactttgcctcatgcaatggcaatgaccagattgtgcagctgctcctggaccatggtgctgatcctaaccagcgagatgggctggggaacacgccactgcacctggcggcctgcaccaaccacgttcctgtcatcaccacactgctacgaggaggggcccgtgtagatgccctggaccgagctggtcgcacacccctgcacctggccaagtcaaagctgaatatcctgcaggagggccatgcccagtgcctagaggctgtgcgtctggaggtgaagcagatcatccatatgctgagggagtatctggagcgcctagggcaacatgagcagcgagaacgcctggatgacctctgcacccgcctgcagatgaccagtaccaaagagcaggtggatgaagtgactgacctcctggccagcttcacctccctcagtctgcagatgcagagcatggagaagaggtagcaagagaggctccctgccttcctgccactgccccaccctgccccactgctgtctcagtaccaagaaaaagcccaacatctgggacttggagctgcacttgtctggtgaggaccttgccctcacccgcagatgccgtggggcagagatgctctctctccacggcctcagagccactcccagccacagtttccagcatctctgtggacagggaccacagctcccagcttcttccagttctcgcagcaccagaccagcctctgcagctgcacttcagctccgcagacctgcgctatctcagcagacctcacttgccccatggccttcatggcgcgctccaggcctcagacccttctctgtgttccgtcctggccatgggcttgttgcagtcagcaggtgtgggcttaggcgggcaccctgtggccaggggtactgcgtgaggccctcagttggtcctgtgcctctcaccagcacttagacagacacgtcaccagactttcaaggagatactgcagtgagtttctctggttggaaggggagggttggtgagtcccagaccttaaaaatacaaggttaagagggaccccaaagcaaaaaattccaacccttttcctcccagtcattgaaacaccaaaactattataccggagggtgtaatagttttgctgcccagttgtggtaggccagtagtggcctcccaagatgcccatgtcctaatcccaggaacctgtcaaaattaccttgtatggccaaaggggctttgcagatgtaatgaagttaaggatctttcgccaggaagattatcccagcttgttcaggagggcttgatgtcctcacccgggtctgtataacagaagagcaggtgacgggagaggaggttggaggtgtagcgatggagcaggaaactggagttgaggagggcagctcaagccacagagtccaggccacctcagagccaggaaatgcatcctcccacagagccctggaaggccccagccctgctcccacctggactggctcagtgaggctaattttataattctggctgattttagaactctaagggaataaatttgtgttgttttaagtca

SEQ ID NO: 107756 - DNA, 954 bp, Homo sapiens
  Payload ID: 1155
  Gene Symbol: ANKRD54
  Gene Name: ankyrin repeat domain 54
  ENST ID: ENST00000406423
  CDS Start-End: 294-836
ggggcggggcagcccgggcgaggggcggggcctcagaggaccagtggccgcgctttggtcgcccccgaccctcagccggggtcccccgacgtctgcgctgagggccacactgacccttgagtctcctttcagtaacgatggtgatgatggtttttttagaaagtcttcctgctctgagccagtcaccccagtcttctctcactgggtaatttctgaatggaaacttcccatgactcggaacgcttattggtgaataataaaatgagctctgaagagactgagggactcggccaatgccaatgatgtggaaacagcagctgctggaagatggcgcggatccctgtgcagctgatgacaagggccgcacagctctacactttgcctcatgcaatggcaatgaccagattgtgcagctgctcctggaccatggtgctgatcctaaccagcgagatgggctggggaacacgccactgcacctggcggcctgcaccaaccacgttcctgtcatcaccacactgctacgaggaggggcccgtgtagatgccctggaccgagctggtcgcacacccctgcacctggccaagtcaaagctgaatatcctgcaggagggccatgcccagtgcctagaggctgtgcgtctggaggtgaagcagatcatccatatgctgagggagtatctggagcgcctagggcaacatgagcagcgagaacgcctggatgacctctgcacccgcctgcagatgaccagtaccaaagagcaggtggatgaagtgactgacctcctggccagcttcacctccctcagtctgcagatgcagagcatggagaagaggtagcaagagaggctccctgccttcctgccactgccccaccctgccccactgctgtctcagtaccaagaaaaagcccaacatctgggacttggagctgcacttgtctggtgaggaccttgcc

SEQ ID NO: 107757 - DNA, 789 bp, Homo sapiens
  Payload ID: 1155
  Gene Symbol: ANKRD54
  Gene Name: ankyrin repeat domain 54
  ENST ID: ENST00000407117
  CDS Start-End: 322-789
cgcggtggcgccggagccgctgactgacgctgagggcctcttctccttcgctgacttcgggtctgcgctgggcggcggcggcgcgggcctctcgggccgggcgtccggcggggcccagtcgccgctgcgctacttgcacgtcctgtggcagcaggatgcggagccgcgcgacgagctgcgctgcaagatacccgctggccggctgaggcgcgctgccaggccccaccggcggctcgggcccacgggcaaggaggtgcacgctctgaagagactgagggactcggccaatgccaatgatgtggaaacagcagctgctggaagatggcgcggatccctgtgcagctgatgacaagggccgcacagctctacactttgcctcatgcaatggcaatgaccagattgctgctcctggaccatggtgctgatcctaaccagcgagatgggctggggaacacgccactgcacctggcggcctgcaccaaccacgttcctgtcatcaccacactgctacgaggaggggcccgtgtagatgccctggaccgagctggtcgcacacccctgcacctggccaagtcaaagctgaatatcctgcaggagggccatgcccagtgcctagaggctgtgcgtctggaggtgaagcagatcatccatatgctgagggagtatctggagcgcctagggcaacatgagcagcgagaacgcctggatgacctctgcacccgcctgcagatgaccagtaccaaagagcaggtggatgaagtgactgacctcctggccagcttcacctcc

SEQ ID NO: 107758 - DNA, 735 bp, Homo sapiens
  Payload ID: 1155
  Gene Symbol: ANKRD54
  Gene Name: ankyrin repeat domain 54
  ENST ID: ENST00000434930
  CDS Start-End: 86-735
agcacgactcagggcggagggaagtaggtccgttggtcggtcgggaacgaggctcaggcggccaggcccgcgcggagccgttgccatggcagccgccgccggggacgcggacgacgagccgcgctcaggccactcgagctcggagggcgagtgcgcggtggcgccggagccgctgactgacgctgagggcctcttctccttcgctgacttcgggtctgcgctgggcggcggcggcgcgggcctctcgggccgggcgtccggcggggcccagtcgccgctgcgctacttgcacgtcctgtggcagcaggatgcggagccgcgcgacgagctgcgctgcaagatacccgctggccggctgaggcgcgctgccaggccccaccggcggctcgggcccacgggcaaggaggtgcacgctctgaagagactgagggactcggccaatgccaatgatgtggaaacagtgcagcagctgctggaagatggcgcggatccctgtgcagctgatgacaagggccgcacagctctacactttgcctcatgcaatggcaatgaccagattgtgcagctgctcctggaccatggtgctgatcctaaccagcgagatgggctggggaacacgccactgcacctggcggcctgcaccaaccacgttcctgtcatcaccacactgctacgaggagctggtacctgcaggggcccgtgtagatgccctggaccgagctggtcgcacacccc

SEQ ID NO: 107759 - DNA, 794 bp, Homo sapiens
  Payload ID: 1155
  Gene Symbol: ANKRD54
  Gene Name: ankyrin repeat domain 54
  ENST ID: ENST00000413497
  CDS Start-End: 1-536
cgaggctcaggcggccaggcccgcgcggagccgttgccatggcagccgccgccggggacgcggacgacgagccgcgctcaggccactcgagctcggagggcgagtgcgcggtggcgccggagccgctgactgacgctgagggcctcttctccttcgctgacttcgggtctgcgctgggcggcggcggcgcgggcctctcgggccgggcgtccggcggggcccagtcgccgctgcgctacttgcacgtcctgtggcagcaggatgcggagccgcgcgacgagctgcgctgcaagatacccgctggccggctgaggcgcgctgccaggccccaccggcggctcgggcccacgggcaaggaggtgcacgctctgaagagactgagggactcggccaatgccaatgatgtggaaacagtgcagcagctgctggaagatggcgcggatccctgtgcagctgatgacaagggccgcacagctctacactttgcctcatgcaatggcaatgaccagattgctgctcctggaccatggtgctgatcctaaccagcgagatgggctggggaacacgccactgcacctggcggcctgcaccaaccacgttcctgtcatcaccacactgctacgaggaggtatgtggtttcttcccctctctgtcctctttctccccctcacccccagaatgctcacctcagctggtacctgcaggggcccgtgtagatgccctggaccgagctggtcgcacacccctgcacctggccaagtcaaagctgaatatcctgcaggagggccatgccc

SEQ ID NO: 107760 - DNA, 597 bp, Homo sapiens
  Payload ID: 1155
  Gene Symbol: ANKRD54
  Gene Name: ankyrin repeat domain 54
  ENST ID: ENST00000424350
  CDS Start-End: 328-597
ggggcggggcagcccgggcgaggggcggggcctcagaggaccagtggccgcgctttggtcgcccccgaccctcagccggggtcccccgacgtctgcgctgagggccacactgacccttgagtctcctttcagtaacgatggtgatgatggtttttttagaaagtcttcctgctctgagccagtcaccccagtcttctctcactgggtaatttctgaatggaaacttcccatgactcggaacgcttattggtgaataataaaatgagctctgaagagactgagggactcggccaatgccaatgatgtggaaacagcagctgctggaagatggcgcggatccctgtgcagctgatgacaagggccgcacagctctacactttgcctcatgcaatggcaatgaccagattgctgctcctggaccatggtgctgatcctaaccagcgagatgggctggggaacacgccactgcacctggcggcctgcaccaaccacgttcctgtcatcaccacactgctacgaggaggggcccgtgtagatgccctggaccgagctggtcgcacacccctgcacctggccaagtcaaagctgaatatcctg

SEQ ID NO: 107761 - DNA, 946 bp, Homo sapiens
  Payload ID: 1155
  Gene Symbol: ANKRD54
  Gene Name: ankyrin repeat domain 54
  ENST ID: ENST00000411961
  CDS Start-End: 84-938
cacgactcagggcggagggaagtaggtccgttggtcggtcgggaacgaggctcaggcggccaggcccgcgcggagccgttgccatggcagccgccgccggggacgcggacgacgagccgcgctcaggccactcgagctcggagggcgagtgcgcggtggcgccggagccgctgactgacgctgagggcctcttctccttcgctgacttcgggtctgcgctgggcggcggcggcgcgggcctctcgggccgggcgtccggcggggcccagtcgccgctgcgctacttgcacgtcctgtggcagcaggatgcggagccgcgcgacgagctgcgctgcaagatacccgctggccggctgaggcgcgctgccaggccccaccggcggctcgggcccacgggcaaggaggtgcacgtgcagcagctgctggaagatggcgcggatccctgtgcagctgatgacaagggccgcacagctctacactttgcctcatgcaatggcaatgaccagattgtgcagctgctcctggaccatggtgctgatcctaaccagcgagatgggctggggaacacgccactgcacctggcggcctgcaccaaccacgttcctgtcatcaccacactgctacgaggaggggcccgtgtagatgccctggaccgagctggtcgcacacccctgcacctggccaagtcaaagctgaatatcctgcaggagggccatgcccagtgcctagaggctgtgcgtctggaggtgaagcagatcatccatatgctgagggagtatctggagcgcctagggcaacatgagcagcgagaacgcctggatgacctctgcacccgcctgcagatgaccagtaccaaagagcaggtggatgaagtgactgacctcctggccagcttcacctccctcagtctgcagatgcagagcatggagaagaggtagcaagagag

SEQ ID NO: 107762 - DNA, 623 bp, Homo sapiens
  Payload ID: 1155
  Gene Symbol: ANKRD54
  Gene Name: ankyrin repeat domain 54
  ENST ID: ENST00000458278
  CDS Start-End: 1-623
cgcgcgacgagctgcgctgcaagatacccgctggccggctgaggcgcgctgccaggccccaccggcggctcgggcccacgggcaaggaggtgcacgctctgaagagactgagggactcggccaatgccaatgatgtggaaacagtgcagcagctgctggaagatggcgcggatccctgtgcagctgatgacaagggccgcacagctctacactttgcctcatgcaatggcaatgaccagattgtgcagctgctcctggaccatggtgctgatcctaaccagcgagatgggctggggaacacgccactgcacctggaatgctcacctcagctggtacctgcaggggcccgtgtagatgccctggaccgagctggtcgcacacccctgcacctggccaagtcaaagctgaatatcctgcaggagggccatgcccagtgcctagaggctgtgcgtctggaggtgaagcagatcatccatatgctgagggagtatctggagcgcctagggcaacatgagcagcgagaacgcctggatgacctctgcacccgcctgcagatgaccagtaccaaagagcaggtggatgaagtgactgacctcctggccagcttcacctccctcagtctg

SEQ ID NO: 107763 - DNA, 825 bp, Homo sapiens
  Payload ID: 1155
  Gene Symbol: ANKRD54
  Gene Name: ankyrin repeat domain 54
  ENST ID: ENST00000609454
  CDS Start-End: 419-742
tggccatctgagacagccatatccagaaggaagaggagccgcgttccgtggctcacacctgtaaccccaccagtttgggaggccgaggcgggcggatcacctgaggctgaggccgggggtttgagaccagcctgaccaatatggagaaaccccgtctctactaaaaatacaaaattagccgggagtggtggcgcatgcctgtaattccagctactcgggaggctgaggcaggagagtcgcttgaacccgggaggcggaggttgcggtgagccgagatcgcgccattgcactctagcctgggcaacaagagggaaaactccgtctaaaaagaataagagggttacaagtagcctgaattttcctctcttcaaatagggacttctcaaagaagctctgaagagactgagggactcggccaatgccaatgatgtggaaacagtgcagctgctcctggaccatggtgctgatcctaaccagcgagatgggctggggaacacgccactgcacctggcggcctgcaccaaccacgttcctgtcatcaccacactgctacgaggagatcatccatatgctgagggagtatctggagcgcctagggcaacatgagcagcgagaacgcctggatgacctctgcacccgcctgcagatgaccagtaccaaagagcaggtggatgaagtgactgacctcctggccagcttcacctccctcagtctgcagatgcagagcatggagaagaggtagcaagagaggctccctgccttcctgccactgccccaccctgccccactgctgtctcagtaccaagaaaaagcccaacatctggg

SEQ ID NO: 107764 - DNA, 2502 bp, Homo sapiens
  Payload ID: 1156
  Gene Symbol: ANKRD55
  Gene Name: ankyrin repeat domain 55
  Uniprot ID: Q3KP44
  ENST ID: ENST00000341048
  CDS Start-End: 153-1997
acatgctctgtctggccctgtgaatcctcactcacccattcagatttctgttggtgtaaagcgacattccagctgctgaagctccgtgatctgctgtgtttttccagcccagatccaagagacctggatgctttttgccattctgatggtaaatgatgagacaggctaccatggatttcagcaccccttctgtgtttgatcagcaaagaggtgactcatctgaggaagttgacctgaccatggtttatcaagcagcctctaatggagatgtcaatgctctgactgcagtgattcgggaagacccttctatcctagaatgctgtgacagtgaaggatgcacgcccttgatgcatgcggtttctggacgtcaagcggacacagtgaagctgctgttgaagatgggagccaatattaacatgcaggatgcttatggccgcacaagtttatgcctggccacctacctgggctggcttgaaggctgtgtgagtctactcagaaacggtgccaagcacaatatcccagataaaaatggccgcctgccactgcatgctgccactgctgagcccgatatgaggctcctcacggtcctgttgcaacagtcgaacatcagcgagattaatcaccaggacaatgagggaatgacaccactccactgggcggctttccacaaccagcctcaacacacacaaatgctgctgaagaagggggcagaccccacccttgtggataaagactttaaaaccgctctccactgggcagtccagagtggaaataggattctgtgctccatcattctgagccatcaccaggggccgtccataatcaactatgatgatgagagtgggaagacatgtgtacatatcgcagcggcagcgggcttcagcgatattattcatgagctggcaagagtccctgagtgtaacctgcaggctctggatgtggatgacaggacacctctgcactgggctgcagctgcagggaaggccgaatgtgtccagtcactgctggagttgggaatggacagcaacctgcgggacatcaatgagagcacgcccttggcctatgccctgtactgcggtcacacggcgtgtgtcaaactcctctcccaagagagcagaacagagcctactcgaccccctccctcccagagcagtcggccccagaagaaggagagacggttcaacgtgctcaaccaaatattctgcaaaaacaagaaagaagagcagagagcccatcagaaggatcccagcagggaccgatacagagaggaggacacctcagaagtcaatgacatcatcaccacctttgatagcatcgtgggtaccaactgccaagaacagcctggtgatcaggtggctatggttgaatttaagaagaaaacctcagacaattcaaaatatctcttaccagaaaagaaaccgctggcccgtaaggggcttccaccaatcagaacgcagagtctcccacccatcaccctgggcaataacttcctaacagcctcccatagggccacttcccatgcaggcctgagctctgctcctcatcatatggcccagcgatctcagaaaagtcgaagtgagcaggatttattaaataacagaactggctgccagatgttactagataacccctggaagagtgattctaatcaggtattttcctacaaagtttggactgtgtcttcttctgataagctgctggacagattgctcagtgtccggcctggtcaccaagaggtctccgtgccaccacaccttcgccatctacataatccatcatcaggacaaaattttcagcatctttccccaaacagacacaaaatcagggatcttcctttcactcggaacaacctagctcccctaccagatcaaaaatttctatctggagaacctctgcggacaaaccgagtgcttcctgcaattccaagtcaacgaagacacagcacagcagcagaagagagtgaacattctgccaaccccaccagtgatgaaaattaactgtgggccactcgctgcagaaatgtagatgaatatgtattttcaactctcaaaggacaagattactccagtttgtaagaacgaagaccaatttagtaagctgcattctataagccatcagttttataactcgaaattctttattccaaataaagatactccctaaataagcacttagaatatttgggtgtgcatattaagtctgtgaatttctgtgacttccacatgccaaaattaaaagacaaaatatgttatcagtaggaaaactgagctatgtttggtttgctttgtggcatgtgcactgtttttttgttattgttctttggttgtttttttgctgaatgattttatgttttgggaaaaaaagtacgctttgctgaataaaagcaaaaaacaaaacaaaaaaaaaaccacatcccagacaaacatgtcttcacatttattgtcattctaacttgaactaatgaaacctatttaaaaataaattcctatgatcagtcacagt

SEQ ID NO: 107765 - DNA, 626 bp, Homo sapiens
  Payload ID: 1156
  Gene Symbol: ANKRD55
  Gene Name: ankyrin repeat domain 55
  ENST ID: ENST00000513241
  CDS Start-End: 84-620
attccagctgctgaagctccgtgatctgctgtgtttttccagcccagatccaaggtgactcatctgaggaagttgacctgaccatggtttatcaagcagcctctaatggagatgtcaatgctctgactgcagtgattcgggaagacccttctatcctagaatgctgtgacagtgaaggatgcacgcccttgatgcatgcggtttctggacgtcaagcggacacagtgaagctgctgttgaagatgggagccaatattaacatgcaggatgcttatggccgcacaagtttatgcctggccacctacctgggctggcttgaaggctgtgtgagtctactcagaaacggtgccaagcacaatatcccagataaaaatggccgcctgccactgcatgctgccactgctgagcccgatatgaggctcctcacggtcctgttgcaacagtcgaacatcagcgagattaatcaccaggacaatgagggaatgacaccactccactgggcggctttccacaaccagcctcaacacacacaaatgctgctgaagaagggggcagaccccacccttgtggataaagactttaaaaccgctctccactgggcagtccaggtgagaaattgacctgtg

SEQ ID NO: 107766 - DNA, 2139 bp, Homo sapiens
  Payload ID: 1156
  Gene Symbol: ANKRD55
  Gene Name: ankyrin repeat domain 55
  ENST ID: ENST00000504958
  CDS Start-End: 14-1729
attctgatggtaaatgatgagacaggctaccatggatttcagcaccccttctgtgtttgatcagcaaagaggtgactcatctgaggaagttgacctgaccatggtttatcaagcagcctctaatggagatgtcaatgctctgactgcagtgattcgggaagacccttctatcctagaatgctgtgacagtgaaggatgcacgcccttgatgcatgcggtttctggacgtcaagcggacacagtgaagctgctgttgaagatgggagccaatattaacatgcaggatgcttatggccgcacaagtttatgcctggccacctacctgggctggcttgaaggctgtgtgagtctactcagaaacggtgccaagcacaatatcccagataaaaatggccgcctgccactgcatgctgccactgctgagcccgatatgaggctcctcacggtcctgttgcaacagtcgaacatcagcgagattaatcaccaggacaatgagagtggaaataggattctgtgctccatcattctgagccatcaccaggggccgtccataatcaactatgatgatgagagtgggaagacatgtgtacatatcgcagcggcagcgggcttcagcgatattattcatgagctggcaagagtccctgagtgtaacctgcaggctctggatgtggatgacaggacacctctgcactgggctgcagctgcagggaaggccgaatgtgtccagtcactgctggagttgggaatggacagcaacctgcgggacatcaatgagagcacgcccttggcctatgccctgtactgcggtcacacggcgtgtgtcaaactcctctcccaagagagcagaacagagcctactcgaccccctccctcccagagcagtcggccccagaagaaggagagacggttcaacgtgctcaaccaaatattctgcaaaaacaagaaagaagagcagagagcccatcagaaggatcccagcagggaccgatacagagaggaggacacctcagaagtcaatgacatcatcaccacctttgatagcatcgtgggtaccaactgccaagaacagcctggtgatcaggtggctatggttgaatttaagaagaaaacctcagacaattcaaaatatctcttaccagaaaagaaaccgctggcccgtaaggggcttccaccaatcagaacgcagagtctcccacccatcaccctgggcaataacttcctaacagcctcccatagggccacttcccatgcaggcctgagctctgctcctcatcatatggcccagcgatctcagaaaagtcgaagtgagcaggatttattaaataacagaactggctgccagatgttactagataacccctggaagagtgattctaatcaggtattttcctacaaagtttggactgtgtcttcttctgataagctgctggacagattgctcagtgtccggcctggtcaccaagaggtctccgtgccaccacaccttcgccatctacataatccatcatcaggacaaaattttcagcatctttccccaaacagacacaaaatcagggatcttcctttcactcggaacaacctagctcccctaccagatcaaaaatttctatctggagaacctctgcggacaaaccgagtgcttcctgcaattccaagtcaacgaagacacagcacagcagcagaagagagtgaacattctgccaaccccaccagtgatgaaaattaactgtgggccactcgctgcagaaatgtagatgaatatgtattttcaactctcaaaggacaagattactccagtttgtaagaacgaagaccaatttagtaagctgcattctataagccatcagttttataactcgaaattctttattccaaataaagatactccctaaataagcacttagaatatttgggtgtgcatattaagtctgtgaatttctgtgacttccacatgccaaaattaaaagacaaaatatgttatcagtaggaaaactgagctatgtttggtttgctttgtggcatgtgcactgtttttttgttattgttctttggttgtttttttgctgaatgattttatgttttgggaaaaaaagtacgctttgctgaataaaagcaaaaaacaaaacaaaaaaaaaa

SEQ ID NO: 107767 - DNA, 1518 bp, Homo sapiens
  Payload ID: 1156
  Gene Symbol: ANKRD55
  Gene Name: ankyrin repeat domain 55
  Uniprot ID: Q3KP44
  ENST ID: ENST00000434982
  CDS Start-End: 237-1217
gtccaccatcatccttcgggctcatttaacacttactatttctatactgtaaatggcaacaagattttccctacctcaacctgactttgagcaggagctgttgctggctaagcagcctgaacaattcacatgctcagacgcttgtgcttttttcacatggcccctccaggacacctctgcactgggctgcagctgcagggaaggccgaatgtgtccagtcactgctggagttgggaatggacagcaacctgcgggacatcaatgagagcacgcccttggcctatgccctgtactgcggtcacacggcgtgtgtcaaactcctctcccaagagagcagaacagagcctactcgaccccctccctcccagagcagtcggccccagaagaaggagagacggttcaacgtgctcaaccaaatattctgcaaaaacaagaaagaagagcagagagcccatcagaaggatcccagcagggaccgatacagagaggaggacacctcagaagtcaatgacatcatcaccacctttgatagcatcgtgggtaccaactgccaagaacagcctggtgatcaggtggctatggttgaatttaagaagaaaacctcagacaattcaaaatatctcttaccagaaaagaaaccgctggcccgtaaggggcttccaccaatcagaacgcagagtctcccacccatcaccctgggcaataacttcctaacagcctcccatagggccacttcccatgcaggcctgagctctgctcctcatcatatggcccagcgatctcagaaaagtcgaagtgagcaggatttattaaataacagaactggctgccagatgttactagataacccctggaagagtgattctaatcaggtattttcctacaaagtttggactgtgtcttcttctgataagctgctggacagattgctcagtgtccggcctggtcaccaagaggtctccgtgccaccacaccttcgccatctacataatccatcatcaggacaaaattttcagcatctttccccaaacagacacaaaatcagggatcttcctttcactcggaacaacctagctcccctaccagatcaaaaatttctatctggagaacctctgcggacaaaccgagtgcttcctgcaattccaagtcaacgaagacacagcacagcagcagaagagagtgaacattctgccaaccccaccagtgatgaaaattaactgtgggccactcgctgcagaaatgtagatgaatatgtattttcaactctcaaaggacaagattactccagtttgtaagaacgaagaccaatttagtaagctgcattctataagccatcagttttataactcgaaattctttattccaaataaagatactccctaaataagcacttagaatatttgggtgtgcatattaagtctgtgaatttctgtgacttccacatgccaaaattaaaagacaaaatatgttatcagtaggaaaactgagctatgtttggtttgctttgtggcatgtgca

SEQ ID NO: 107768 - DNA, 3073 bp, Homo sapiens
  Payload ID: 1157
  Gene Symbol: ANKRD6
  Gene Name: ankyrin repeat domain 6
  Uniprot ID: Q9Y2G4
  ENST ID: ENST00000339746
  CDS Start-End: 311-2494
gagagcgctgcctggcgcgcgggcggctggaggcacggcgctgggcggcgccgaggccctggggccgccggagccagcgggagccagtccccgtcttcgcccctcgccccccaccgtgtcgccggccttggtccctgcggcgcggacgtccggcgcgggagagaaaggtcccgaagatggcatattcataaagacatcttctgatgattgtgaacatctttacctctgggtgccaggccgggccagtgacttcgtgttgagctgaaggaacttgtctaccgcttccctgaaaacctttctttcctaattcatgagccagcaagatgcggtcgctgcactttcagagcgccttctcgtagctgcgtacaaaggccaaacagagaatgtggttcagctcatcaacaagggcgccagggtagcggttaccaagcatggccggactcccctgcatcttgctgccaataagggccatcttcctgtggtccagatcttgctgaaggctggctgcgaccttgatgtccaggatgatggggaccagaccgccttgcaccgggccacagtggtggggaacacggagatcatcgcggcgctcatccacgaagggtgtgccctggacagacaagacaaggatgggaatacagccttgcatgaagcatcctggcatggtttcagccagtcagccaagctgctcattaaagcaggagccaacgtgcttgccaagaacaaggcggggaacacagctctgcacctggcctgccagaacagccactcccagagcacgcgcgtcctcctgctggccgggtcccgcgctgacctcaaaaataatgcaggagacacctgtttgcacgttgctgcgcgctataatcacttgtccatcattaggctcctcctcactgctttctgttctgtccatgaaaagaaccaggctggagacacagcacttcacgttgctgctgccctaaatcacaagaaggtggccaaaatcttactggaagccggagcagatacgaccattgttaacaatgcaggccagactccgctggagactgcccgctaccacaataacccggaagttgctcttctccttactaaagctccccaggtcttgcgcttcagtcgtgggcgaagcctgaggaaaaagagagagaggctcaaggaagagaggagagcccagtctgtgccaagagatgaggtggcccaaagcaagggcagtgtctcagcaggagacacccccagcagtgaacaggctgtggccagaaaagaagaagccagagaagagttcctgtcagcctccccagaacccagagcaaaggatgacaggaggagaaagtcaaggcccaaggtgtcagcattttctgaccccaccccaccagccgaccaacagcctggacaccagaagaacctgcatgctcataatcaccctaaaaagaggaacaggcatcggtgttcatccccacccccaccccatgagttcagggcgtatcagctctacacattgtaccggggcaaggatgggaaagtgatgcaggcaccaataaatggttgtcgatgtgaacctctaatcaacaagctggagaatcagttggaggctactgtggaggagataaaagcagagctgggatcggttcaggacaaaatgaatacaaagctggggcagatggagaataagacccagcaccaaatgcgtgttttggacaagctgatggttgagcgactttctgcagagaggacggagtgcctgaaccgcctgcaacagcactcagacacagagaagcatgagggggagaaacgacagatatccttggtggatgaattaaaaacctggtgcatgttaaagattcagaatctggagcagaagctttctggagattctagggcctgcagagctaaatccacaccatctacttgtgagtcctctacaggtgtggaccaattagtggtgactgcaggtccagcagcagcttccgacagctcccctccagtggttaggcccaaagagaaggccctcaactccactgctacccagagactccagcaggagctgtcgtcttctgactgtacaggctcccgactgagaaacgtcaaggtccagacagccttgctacccatgaatgaggcagccagatctgatcagcaggctgggccctgcgtcaacagaggcactcaaactaagaagtctgggaagagtgggccaacaaggcatcgtgcccagcaacccgcagccagcagcacctgtgggcagccgccaccagccacaggcagcgagcagactggccctcacattcgggacacctcccaagctctggagcttacccagtatttttttgaggctgtttctacccagatggaaaagtggtatgaaaggaagattgaagaagcacgaagccaagccaatcagaaagcccagcaagataaggctacattgaaggaacacattaaaagtttagaagaggaacttgccaaactaaggactagggtgcagaaggaaaattagcaccaataaagaggaaatatgaaaggattcttgaagatttccagttttgcaactgcataatagctatgcccaaggagtcaactattgtatatattgcagatttgcctttttaaaaaaatcactaattctacaatgtgccagatacatgtttcctatgcccaggaagttatgaagacttcaacaattaaactgaaaccaggggaagcttgcttagttttgggtttcattataaactcttagcctcagtccaggttaatctgaagtttgaaagctcagattaagcaagccatgccaagaaactggacgatgtgtaagcctagactctaaaattcaagatgtgtgaaataatataagtcaaaagcaagaaaaacgtaatcccgtctgaactcaagtagtcattcatataaatttgaacacacctgctgtgcctagacaagtgtctttctgtaagagctgtaactctgagatgtgctaaataaaccctctttctcaaattcgtaattctccaactgttgacattttaatcacatgaaaagttatcagatttttgaggagaaatattttcatgatgtcacaaga

SEQ ID NO: 107769 - DNA, 5258 bp, Homo sapiens
  Payload ID: 1157
  Gene Symbol: ANKRD6
  Gene Name: ankyrin repeat domain 6
  Uniprot ID: Q9Y2G4
  ENST ID: ENST00000369408
  CDS Start-End: 350-2428
ggacgcggcgggctcggccacaggtaacccgcaggagccgagagcgctgcctggcgcgcgggcggctggaggcacggcgctgggcggcgccgaggccctggggccgccggagccagcgggagccagtccccgtcttcgcccctcgccccccaccgtgtcgccggccttggtccctgcggcgcggacgtccggcgcgggagagaaaggtcccgaagatggcatattcataaagacatcttctgatgattgtgaacatctttacctctgggtgccaggccgggccagtgacttcgtgttgagctgaaggaacttgtctaccgcttccctgaaaacctttctttcctaattcatgagccagcaagatgcggtcgctgcactttcagagcgccttctcgtagctgcgtacaaaggccaaacagagaatgtggttcagctcatcaacaagggcgccagggtagcggttaccaagcatggccggactcccctgcatcttgctgccaataagggccatcttcctgtggtccagatcttgctgaaggctggctgcgaccttgatgtccaggatgatggggaccagaccgccttgcaccgggccacagtggtggggaacacggagatcatcgcggcgctcatccacgaagggtgtgccctggacagacaagacaaggatgggaatacagccttgcatgaagcatcctggcatggtttcagccagtcagccaagctgctcattaaagcaggagccaacgtgcttgccaagaacaaggcggggaacacagctctgcacctggcctgccagaacagccactcccagagcacgcgcgtcctcctgctggccgggtcccgcgctgacctcaaaaataatgcaggagacacctgtttgcacgttgctgcgcgctataatcacttgtccatcattaggctcctcctcactgctttctgttctgtccatgaaaagaaccaggctggagacacagcacttcacgttgctgctgccctaaatcacaagaaggtggccaaaatcttactggaagccggagcagatacgaccattgttaacaatgcaggccagactccgctggagactgcccgctaccacaataacccggaagttgctcttctccttactaaagctccccagggcagtgtctcagcaggagacacccccagcagtgaacaggctgtggccagaaaagaagaagccagagaagagttcctgtcagcctccccagaacccagagcaaaggatgacaggaggagaaagtcaaggcccaaggtgtcagcattttctgaccccaccccaccagccgaccaacagcctggacaccagaagaacctgcatgctcataatcaccctaaaaagaggaacaggcatcggtgttcatccccacccccaccccatgagttcagggcgtatcagctctacacattgtaccggggcaaggatgggaaagtgatgcaggcaccaataaatggttgtcgatgtgaacctctaatcaacaagctggagaatcagttggaggctactgtggaggagataaaagcagagctgggatcggttcaggacaaaatgaatacaaagctggggcagatggagaataagacccagcaccaaatgcgtgttttggacaagctgatggttgagcgactttctgcagagaggacggagtgcctgaaccgcctgcaacagcactcagacacagagaagcatgagggggagaaacgacagatatccttggtggatgaattaaaaacctggtgcatgttaaagattcagaatctggagcagaagctttctggagattctagggcctgcagagctaaatccacaccatctacttgtgagtcctctacaggtgtggaccaattagtggtgactgcaggtccagcagcagcttccgacagctcccctccagtggttaggcccaaagagaaggccctcaactccactgctacccagagactccagcaggagctgtcgtcttctgactgtacaggctcccgactgagaaacgtcaaggtccagacagccttgctacccatgaatgaggcagccagatctgatcagcaggctgggccctgcgtcaacagaggcactcaaactaagaagtctgggaagagtgggccaacaaggcatcgtgcccagcaacccgcagccagcagcacctgtgggcagccgccaccagccacaggcagcgagcagactggccctcacattcgggacacctcccaagctctggagcttacccagtatttttttgaggctgtttctacccagatggaaaagtggtatgaaaggaagattgaagaagcacgaagccaagccaatcagaaagcccagcaagataaggctacattgaaggaacacattaaaagtttagaagaggaacttgccaaactaaggactagggtgcagaaggaaaattagcaccaataaagaggaaatatgaaaggattcttgaagatttccagttttgcaactgcataatagctatgcccaaggagtcaactattgtatatattgcagatttgcctttttaaaaaaatcactaattctacaatgtgccagatacatgtttcctatgcccaggaagttatgaagacttcaacaattaaactgaaaccaggggaagcttgcttagttttgggtttcattataaactcttagcctcagtccaggttaatctgaagtttgaaagctcagattaagcaagccatgccaagaaactggacgatgtgtaagcctagactctaaaattcaagatgtgtgaaataatataagtcaaaagcaagaaaaacgtaatcccgtctgaactcaagtagtcattcatataaatttgaacacacctgctgtgcctagacaagtgtctttctgtaagagctgtaactctgagatgtgctaaataaaccctctttctcaaattcgtaattctccaactgttgacattttaatcacatgaaaagttatcagatttttgaggagaaatattttcatgatgtcacaagatccaatatatcttatgataaaatttattgaaaagtcagtttatttaaataatgaataattggctaacagctctggaaacaatgagatcaaatgagaaagattcaaattgtttgttattttctgtattttcagtcaaaaaatcagttatatagtgattttaaagcagattaatggaaaaaaattcatgtaacaattacctgaaaatttataacctattcctaatcaaacccaattatatcagaatacctttctgaatttgagatttttgctctacattttataatgaataaggctattttttgaaagtatttcattttgaattctgtcattaacctcaaaagctttctactgctttgcggtgaaggcaaaatattcgataactcaacttaggccccactgttccccaacttcatggaggccagaagactttactttgttccataatgaaatataaacacagaacaaagttgtaaaagtagcatggatatgttgaaactttggacaagcttcttgtcctttggaatatgggatttatattcatctcctcaatatcccatgtatgcacagaaacttcagttctatttctatagacacaggaacctagtgactattgaacgtaattgtaataaaatgctgctcattgagccaaagagaagaaatgatttattaacatggggacaccaagaaaaacaaagtatgcttttattccctttgtcaagctcagttttagggttttttcttttttttatagtgacaatccatagatatagacattcctaaaagaaaaataattcagtagatatatgtcactgttacctgaatatggaatgaatttgatgttttttattttgttgagacagggtcttgctctgtcacccagactggagtgcagtggcatgatcacacctcactgcagccttggcctctcaggctcgtgatcctcctgcctcaacctcgcaagtagcttgggactacaggcgtgtgccaccagtcctggctaattttttgtagatataaggtctcatgatattgcccaggctgaatttgatgttatttcaagttgattttcatgtgtttgggagcttgtcttgttctcaactactacgcaggtagacagtcttcccccagagactcattagattgcaatatagaggcactttctcatttccctattgttcctaatacagaattgtagagctggagagtaccttcagttttctaaatctattctcaaacaggatatcactaacctctttagaatcattcctcagtatacatcaatttattgagaactgcctaatactcaagaaattaaatcctgagttcagtaggctgtgttccaagcaggaattattttcacttaccaaaatatctcctattacctcaaggtatccttgttgaggaatgctgaaaactaaattttaagtatcaagtctagaccatagagtgctttggtgggagtattttgattacctcctacccatcagaagcaggcagctaatattgtgaactgagtatttttgtcaaaagtcacagggaagagactacagaagaatgagaagggtcaaaaggacctagtgtggcttactacatggatcttgtctcttggaggtctgtcgtagaagaagaaacaaatagaggtgatgaagacacagaacaggctcagtcagcatcctcacccagagatggcaacatctattaagaccaatgcaataccttttcatcttcagcaaatgttgtttcatctgtttttgatccttggcattgtcaaaaacttaactgcaggtccagtgtatatttttccttatttttcccttttagctatctgctaaagtgagtaaatgccacaactgtacttttccaaagaaaaagaactattgacaacttatagcctgtcatgcaggtcatgtttcaaatcaaggctgaaattttcaacagctgtgggaaaaactaaaacacagaaatactgtacagtattagtgtttttttaaagaaattgttagtgcattattgagtatactaaatatctgtgattaaataaattagttctaacttttgattttgggagcccaaaataaagggagtgttgttttcatggttatgccttgtttgtggagtcaagtgttgatatacttgaggcatgttatgtgtcttctaattaatatttttatcaccttgaatttgtgtctcttccaagcattaaagatactatggatcttaaattccttattaaaaaaatgcaagtgtgaat

SEQ ID NO: 107770 - DNA, 2968 bp, Homo sapiens
  Payload ID: 1157
  Gene Symbol: ANKRD6
  Gene Name: ankyrin repeat domain 6
  Uniprot ID: Q9Y2G4
  ENST ID: ENST00000447838
  CDS Start-End: 307-2475
gcgctgcctggcgcgcgggcggctggaggcacggcgctgggcggcgccgaggccctggggccgccggagccagcgggagccagtccccgtcttcgcccctcgccccccaccgtgtcgccggccttggtccctgcggcgcggacgtccggcgcgggagagaaaggtcccgaagatggcatattcataaagacatcttctgatgattgtgaacatctttacctctgggtgccaggccgggccagtgacttcgtgttgagctgaaggaacttgtctaccgcttccctgaaaacctttctttcctaattcatgagccagcaagatgcggtcgctgcactttcagagcgccttctcgtagctgcgtacaaaggccaaacagagaatgtggttcagctcatcaacaagggcgccagggtagcggttaccaagcatggccggactcccctgcatcttgctgccaataagggccatcttcctgtggtccagatcttgctgaaggctggctgcgaccttgatgtccaggatgatggggaccagaccgccttgcaccgggccacagtggtggggaacacggagatcatcgcggcgctcatccacgaagggtgtgccctggacagacaagacaaggatgggaatacagccttgcatgaagcatcctggcatggtttcagccagtcagccaagctgctcattaaagcaggagccaacgtgcttgccaagaacaaggcggggaacacagctctgcacctggcctgccagaacagccactcccagagcacgcgcgtcctcctgctggccgggtcccgcgctgacctcaaaaataatgcaggagacacctgtttgcacgttgctgcgcgctataatcacttgtccatcattaggctcctcctcactgctttctgttctgtccatgaaaagaaccaggctggagacacagcacttcacgttgctgctgccctaaatcacaagaaggtggccaaaatcttactggaagccggagcagatacgaccattgttaacaatgcaggccagactccgctggagactgcccgctaccacaataacccggaagttgctcttctccttactaaagctccccaggtcttgcgcttcagtcgtgggcgaagcctgaggaaaaagagagagaggctcaaggaagagaggagagcccagtctgtgccaagagatgaggtggcccaaagcaagggcagtgtctcagcaggagacacccccagcagtgaacaggctgtggccagaaaagaagaagccagagaagagttcctgtcagcctccccagaacccagagcaaaggatgacaggaggagaaagtcaaggcccaaggtgtcagcattttctgaccccaccccaccagccgaccaacagcctggacaccagaagaacctgcatgctcataatcaccctaaaaagaggaacaggcatcggtgttcatccccacccccaccccatgagttcagggcgtatcagctctacacattgtaccggggcaaggatgggaaagtgatgcaggcaccaataaatggttgtcgatgtgaacctctaatcaacaagctggagaatcagttggaggctactgtggaggagataaaagcagagctgggatcggttcaggacaaaatgaatacaaagctggggcagatggagaataagacccagcaccaaatgcgtgttttggacaagctgatggttgagcgactttctgcagagaggacggagtgcctgaaccgcctgcaacagcactcagacacagagaagcatgagggggagaaacgacagatatccttggtggatgaattaaaaacctggtgcatgttaaagattcagaatctggagcagaagctttctggagattctagggcctgcagagctaaatccacaccatctacttgtgtggaccaattagtggtgactgcaggtccagcagcagcttccgacagctcccctccagtggttaggcccaaagagaaggccctcaactccactgctacccagagactccagcaggagctgtcgtcttctgactgtacaggctcccgactgagaaacgtcaaggtccagacagccttgctacccatgaatgaggcagccagatctgatcagcaggctgggccctgcgtcaacagaggcactcaaactaagaagtctgggaagagtgggccaacaaggcatcgtgcccagcaacccgcagccagcagcacctgtgggcagccgccaccagccacaggcagcgagcagactggccctcacattcgggacacctcccaagctctggagcttacccagtatttttttgaggctgtttctacccagatggaaaagtggtatgaaaggaagattgaagaagcacgaagccaagccaatcagaaagcccagcaagataaggctacattgaaggaacacattaaaagtttagaagaggaacttgccaaactaaggactagggtgcagaaggaaaattagcaccaataaagaggaaatatgaaaggattcttgaagatttccagttttgcaactgcataatagctatgcccaaggagtcaactattgtatatattgcagatttgcctttttaaaaaaatcactaattctacaatgtgccagatacatgtttcctatgcccaggaagttatgaagacttcaacaattaaactgaaaccaggggaagcttgcttagttttgggtttcattataaactcttagcctcagtccaggttaatctgaagtttgaaagctcagattaagcaagccatgccaagaaactggacgatgtgtaagcctagactctaaaattcaagatgtgtgaaataatataagtcaaaagcaagaaaaacgtaatcccgtctgaactcaagtagtcattcatataaatttgaacacacctgctgtgcctagacaagtgtctttctgtaagagctgtaactctgagatgtgctaaataaaccctctttctcaa

SEQ ID NO: 107771 - DNA, 576 bp, Homo sapiens
  Payload ID: 1157
  Gene Symbol: ANKRD6
  Gene Name: ankyrin repeat domain 6
  ENST ID: ENST00000522705
  CDS Start-End: 223-576
acagttatccagaaactgaacacgatgtagaacagagaggacagcccctcggatgtgagtaccatctcttcaacacaaggtcccgaagatggcatattcataaagacatcttctgatgattgtgaacatctttacctctgggtgccaggccgggccagtgacttcgtgttgagctgaaggaacttgtctaccgcttccctgaaaacctttctttcctaattcatgagccagcaagatgcggtcgctgcactttcagagcgccttctcgtagctgcgtacaaaggccaaacagagaatgtggttcagctcatcaacaagggcgccagggtagcggttaccaagcatggccggactcccctgcatcttgctgccaataagggccatcttcctgtggtccagatcttgctgaaggctggctgcgaccttgatgtccaggatgatggggaccagaccgccttgcaccgggccacagtggtggggaacacggagatcatcgcggcgctcatccacgaagggtgtgccctggacagacaagacaaggatgggaatacagccttgcatgaagcatcctggcat

SEQ ID NO: 107772 - DNA, 546 bp, Homo sapiens
  Payload ID: 1157
  Gene Symbol: ANKRD6
  Gene Name: ankyrin repeat domain 6
  ENST ID: ENST00000523798
  CDS Start-End: 241-546
ctcctggctgcttcctgatgtcttgctggcagcaagtgggctagggtcggcttgcccagaggggcgcatccaggtggggttcacctttctgaaccaggtcccgaagatggcatattcataaagacatcttctgatgattgtgaacatctttacctctgggtgccaggccgggccagtgacttcgtgttgagctgaaggaacttgtctaccgcttccctgaaaacctttctttcctaattcatgagccagcaagatgcggtcgctgcactttcagagcgccttctcgtagctgcgtacaaaggccaaacagagaatgtggttcagctcatcaacaagggcgccagggtagcggttaccaagcatggccggactcccctgcatcttgctgccaataagggccatcttcctgtggtccagatcttgctgaaggctggctgcgaccttgatgtccaggatgatggggaccagaccgccttgcaccgggccacagtggtggggaacacggagatcatcgcggcgctcatccacgaagggtgtgccctggac

SEQ ID NO: 107773 - DNA, 737 bp, Homo sapiens
  Payload ID: 1157
  Gene Symbol: ANKRD6
  Gene Name: ankyrin repeat domain 6
  ENST ID: ENST00000518150
  CDS Start-End: 48-737
gaaggaacttgtctaccgcttccctgaaaacctttctttcctaattcatgagccagcaagatgcggtcgctgcactttcagagcgccttctcgtagctgcgtacaaaggccaaacagagaatgtggttcagctcatcaacaagggcgccagggtagcggttaccaagggcagtgtctcagcaggagacacccccagcagtgaacaggctgtggccagaaaagaagaagccagagaagagttcctgtcagcctccccagaacccagagcaaaggatgacaggaggagaaagtcaaggcccaaggtgtcagcattttctgaccccaccccaccagccgaccaacagcctggacaccagaagaacctgcatgctcataatcaccctaaaaagaggaacaggcatcggtgttcatccccacccccaccccatgagttcagggcgtatcagctctacacattgtaccggggcaaggatgggaaagtgatgcaggcaccaataaatggttgtcgatgtgaacctctaatcaacaagctggagaatcagttggaggctactgtggaggagataaaagcagagctgggatcggttcaggacaaaatgaatacaaagctggggcagatggagaataagacccagcaccaaatgcgtgttttggacaagctgatggttgagcgactttctgcagagaggacggagtgcctgaaccgcctgcaacagcactcagacacagagaagcat

SEQ ID NO: 107774 - DNA, 574 bp, Homo sapiens
  Payload ID: 1157
  Gene Symbol: ANKRD6
  Gene Name: ankyrin repeat domain 6
  ENST ID: ENST00000522779
  CDS Start-End: 412-574
acaagactttcagaagctgtgacgagcagactagcaagccacaaaacattgcaagctgaatggatgtcttaataagcttttagatgtgatttggccagcatcagcagaggaggctaacgggaaaaggcagcgaacattgtaacgtaaatcactgcagatttgctgggagtgacagccctaggaagctaatgatctctccaggaaagaattgaccacagttatccagaaactgaacacgatgtagaacagagaggacagcccctcggatgtcccgaagatggcatattcataaagacatcttctgatgattgtgaacatctttacctctgggtgccaggccgggccagtgacttcgtgttgagctgaaggaacttgtctaccgcttccctgaaaacctttctttcctaattcatgagccagcaagatgcggtcgctgcactttcagagcgccttctcgtagctgcgtacaaaggccaaacagagaatgtggttcagctcatcaacaagggcgccagggtagcggttaccaagggggaccagaccgccttgcaccgggccacagtggtggggaaca

SEQ ID NO: 107775 - DNA, 829 bp, Homo sapiens
  Payload ID: 1157
  Gene Symbol: ANKRD6
  Gene Name: ankyrin repeat domain 6
  ENST ID: ENST00000465722
  CDS Start-End: 304-829
aactgtaagtagcgagcttggtttccatgagtcacatgtgtccacagaataggcccaactagacaacagatctgtgggaatgtttggctctccatgaaccacaaagactcctccaacacagaggtgcagtacccacctgggccaaggagggaagatgcaggtcccgaagatggcatattcataaagacatcttctgatgattgtgaacatctttacctctgggtgccaggccgggccagtgacttcgtgttgagctgaaggaacttgtctaccgcttccctgaaaacctttctttcctaattcatgagccagcaagatgcggtcgctgcactttcagagcgccttctcgtagctgcgtacaaaggccaaacagagaatgtggttcagctcatcaacaagggcgccagggtagcggttaccaagcatggccggactcccctgcatcttgctgccaataagggccatcttcctgtggtccagatcttgctgaaggctggctgcgaccttgatgtccaggatgatggggaccagaccgccttgcaccgggccacagtggtggggaacacggagatcatcgcggcgctcatccacgaagggtgtgccctggacagacaagacaaggatgggaatacagccttgcatgaagcatcctggcatggtttcagccagtcagccaagctgctcattaaagcaggagccaacgtgcttgccaagaacaaggcggggaacacagctctgcacctggcctgccagaacagccactcccagagcacgcgcgtcctcctgctggccgggtcccgcgctgacctcaaaaataatgcaggagaca

SEQ ID NO: 107776 - DNA, 514 bp, Homo sapiens
  Payload ID: 1157
  Gene Symbol: ANKRD6
  Gene Name: ankyrin repeat domain 6
  ENST ID: ENST00000524056
  CDS Start-End: 1-230
caggagacacctgtttgcacgttgctgcgcgctataatcacttgtccatcattaggctcctcctcactgctttctgttctgtccatgaaaagaaccaggctggagacacagcacttcacgttgctgctgccctaaatcacaagaaggtggccaaaatcttactggaagccggagcagatacgaccattgttaacaatctgcctgactgcagtgaacacaacctggcatgaaaaagaactcagggatgtccagttaaactgacgagtggatgttacccaaagcaggccagactccgctggagactgcccgctaccacaataacccggaagttgctcttctccttactaaagctccccaggtcttgcgcttcagtcgtgggcgaagcctgaggaaaaagagagagaggctcaaggaagagaggagagcccagtctgtgccaagagatgaggtggcccaaagcaagggcagtgtctcagcaggagacacccccagcagtgaacaggctgtggccaga

SEQ ID NO: 107777 - DNA, 455 bp, Homo sapiens
  Payload ID: 1157
  Gene Symbol: ANKRD6
  Gene Name: ankyrin repeat domain 6
  ENST ID: ENST00000492158
  CDS Start-End: 1-455
gcatcggtgttcatccccacccccaccccatgagttcagggcgtatcagctctacacattgtaccggggcaaggatgggaaagtgatgcagatgcgtgttttggacaagctgatggttgagcgactttctgcagagaggacggagtgcctgaaccgcctgcaacagcactcagacacagagaagcatgagggggagaaacgacagatatccttggtggatgaattaaaaacctggtgcatgttaaagattcagaatctggagcagaagctttctggagattctagggcctgcagagctaaatccacaccatctacttgtgagtcctctacaggtgtggaccaattagtggtgactgcaggtccagcagcagcttccgacagctcccctccagtggttaggcccaaagagaaggccctcaactccactgctacccagagactccagcaggagctgt

SEQ ID NO: 107778 - DNA, 2489 bp, Homo sapiens
  Payload ID: 1157
  Gene Symbol: ANKRD6
  Gene Name: ankyrin repeat domain 6
  Uniprot ID: Q9Y2G4
  ENST ID: ENST00000520793
  CDS Start-End: 2-1993
catgagccagcaagatgcggtcgctgcactttcagagcgccttctcgtagctgcgtacaaaggccaaacagagaatgtggttcagctcatcaacaagggcgccagggtagcggttaccaagcatggccggactcccctgcatcttgctgccaataagggccatcttcctgtggtccagatcttgctgaaggctggctgcgaccttgatgtccaggatgatggggaccagaccgccttgcaccgggccacagtggtggggaacacggagatcatcgcggcgctcatccacgaagggtgtgccctggacagacaagacaaggcggggaacacagctctgcacctggcctgccagaacagccactcccagagcacgcgcgtcctcctgctggccgggtcccgcgctgacctcaaaaataatgcaggagacacctgtttgcacgttgctgcgcgctataatcacttgtccatcattaggctcctcctcactgctttctgttctgtccatgaaaagaaccaggctggagacacagcacttcacgttgctgctgccctaaatcacaagaaggtggccaaaatcttactggaagccggagcagatacgaccattgttaacaatgtcttgcgcttcagtcgtgggcgaagcctgaggaaaaagagagagaggctcaaggaagagaggagagcccagtctgtgccaagagatgaggtggcccaaagcaagggcagtgtctcagcaggagacacccccagcagtgaacaggctgtggccagaaaagaagaagccagagaagagttcctgtcagcctccccagaacccagagcaaaggatgacaggaggagaaagtcaaggcccaaggtgtcagcattttctgaccccaccccaccagccgaccaacagcctggacaccagaagaacctgcatgctcataatcaccctaaaaagaggaacaggcatcggtgttcatccccacccccaccccatgagttcagggcgtatcagctctacacattgtaccggggcaaggatgggaaagtgatgcaggcaccaataaatggttgtcgatgtgaacctctaatcaacaagctggagaatcagttggaggctactgtggaggagataaaagcagagctgggatcggttcaggacaaaatgaatacaaagctggggcagatggagaataagacccagcaccaaatgcgtgttttggacaagctgatggttgagcgactttctgcagagaggacggagtgcctgaaccgcctgcaacagcactcagacacagagaagcatgagggggagaaacgacagatatccttggtggatgaattaaaaacctggtgcatgttaaagattcagaatctggagcagaagctttctggagattctagggcctgcagagctaaatccacaccatctacttgtgtggaccaattagtggtgactgcaggtccagcagcagcttccgacagctcccctccagtggttaggcccaaagagaaggccctcaactccactgctacccagagactccagcaggagctgtcgtcttctgactgtacaggctcccgactgagaaacgtcaaggtccagacagccttgctacccatgaatgaggcagccagatctgatcagcaggctgggccctgcgtcaacagaggcactcaaactaagaagtctgggaagagtgggccaacaaggcatcgtgcccagcaacccgcagccagcagcacctgtgggcagccgccaccagccacaggcagcgagcagactggccctcacattcgggacacctcccaagctctggagcttacccagtatttttttgaggctgtttctacccagatggaaaagtggtatgaaaggaagattgaagaagcacgaagccaagccaatcagaaagcccagcaagataaggctacattgaaggaacacattaaaagtttagaagaggaacttgccaaactaaggactagggtgcagaaggaaaattagcaccaataaagaggaaatatgaaaggattcttgaagatttccagttttgcaactgcataatagctatgcccaaggagtcaactattgtatatattgcagatttgcctttttaaaaaaatcactaattctacaatgtgccagatacatgtttcctatgcccaggaagttatgaagacttcaacaattaaactgaaaccaggggaagcttgcttagttttgggtttcattataaactcttagcctcagtccaggttaatctgaagtttgaaagctcagattaagcaagccatgccaagaaactggacgatgtgtaagcctagactctaaaattcaagatgtgtgaaataatataagtcaaaagcaagaaaaacgtaatcccgtctgaactcaagtagtcattcatataaatttgaacacacctgctgtgcctagacaagtgtctttctgtaagagctgtaactctgagatgtgctaaataaaccctctttctcaaatt

SEQ ID NO: 107779 - DNA, 514 bp, Homo sapiens
  Payload ID: 1157
  Gene Symbol: ANKRD6
  Gene Name: ankyrin repeat domain 6
  ENST ID: ENST00000521004
  CDS Start-End: 1-393
aagctggggcagatggagaataagacccagcaccaaatgcgtgttttggacaagctgatggttgagcgactttctgcagagaggacggagtgcctgaaccgcctgcaacagcactcagacacagagaagcatgagggggagaaacgacagatatccttggtggatgaattaaaaacctggtgcatgttaaagattcagaatctggagcagaagctttctggagattctagggcctgcagagctaaatccacaccatctacttgtgagtcctctacaggtaacccacacacagagagcccttttgtccaaaaggaacacgaccagcagctcttgtactctcctgcactgaaaggcagtacgtatgctagggctgtgggaaacactggatggtaaagtgcactctgtaggggcaaggactgtattttgctcgtaaccatatactcagttgctatgtaataataaagcactcatttatgtgctcaaacttatttgaataaaggaattaaagaattgt

SEQ ID NO: 107780 - DNA, 1427 bp, Homo sapiens
  Payload ID: 1157
  Gene Symbol: ANKRD6
  Gene Name: ankyrin repeat domain 6
  ENST ID: ENST00000485637
  CDS Start-End: 257-1180
agatttgctgggagtgacagccctaggaagctaatgatctctccaggaaagaattgaccacagttatccagaaactgaacacgatgtagaacagagaggacagcccctcggatgtcccgaagatggcatattcataaagacatcttctgatgattgtgaacatctttacctctgggtgccaggccgggccagtgacttcgtgttgagctgaaggaacttgtctaccgcttccctgaaaacctttctttcctaattcatgagccagcaagatgcggtcgctgcactttcagagcgccttctcgtagctgcgtacaaaggccaaacagagaatgtggttcagctcatcaacaagggcgccagggtagcggttaccaagcatggccggactcccctgcatcttgctgccaataagggccatcttcctgtggtccagatcttgctgaaggctggctgcgaccttgatgtccaggatgatggggaccagaccgccttgcaccgggccacagtggtggggaacacggagatcatcgcggcgctcatccacgaagggtgtgccctggacagacaagacaaggatgggaatacagccttgcatgaagcatcctggcatggtttcagccagtcagccaagctgctcattaaagcaggagccaacgtgcttgccaagaacaaggcggggaacacagctctgcacctggcctgccagaacagccactcccagagcacgcgcgtcctcctgctggccgggtcccgcgctgacctcaaaaataatgcaggagacacctgtttgcacgttgctgcgcgctataatcacttgtccatcattaggctcctcctcactgctttctgttctgtccatgaaaagaaccaggctggagacacagcacttcacgttgctgctgccctaaatcacaagaaggtggccaaaatcttactggaagccggagcagatacgaccattgttaacaatgcaggccagactccgctggagactgcccgctaccacaataacccggaagttgctcttctccttactaaagctccccaggtaggatttactgccctttccatggtactgattatgcgggactacaaagttgttgggactcctggttgcaatctactgaagcctcttcaaactaacttaaatatggaatgtaaccaggcagtggaggtataggcatgcatgggggcccaggatgacgggagtcaaaggcatcaagtccagctcttcgtgttcatgcctgggccgcctcatcttctccctgtggctggatctttgtcacggccagctgcctaggtcatagtttcccagctactcagccaaggaagaagttccagtttaagacatcgcaggacagggccatgattgcagagtttaggccaaatgcccatccctgaagaagtgggacagggactttaagaag

SEQ ID NO: 107781 - DNA, 3157 bp, Homo sapiens
  Payload ID: 1157
  Gene Symbol: ANKRD6
  Gene Name: ankyrin repeat domain 6
  Uniprot ID: Q9Y2G4
  ENST ID: ENST00000522441
  CDS Start-End: 642-2825
gaggcagtttattacagatttcaaccctttctgcatccctccctcccttacaacacgcacactcatcttttcttgcattactgctgaaattatgcaaacttcgtttctctgtcatctgagcgtcattcagaaatgttcctccgatctgtgaattgttccctgacttcaatcggggcagtgttacaggtcctctgctggcaggagggagcagtccgtgaaaatctgcagacacaagactttcagaagctgtgacgagcagactagcaagccacaaaacattgcaagctgaatggatgtcttaataagcttttagatgtgatttggccagcatcagcagaggaggctaacgggaaaaggcagcgaacattgtaacgtaaatcactgcagatttgctgggagtgacagccctaggaagctaatgatctctccaggaaagaattgaccacagttatccagaaactgaacacgatgtagaacagagaggacagcccctcggatgtcccgaagatggcatattcataaagacatcttctgatgattgtgaacatctttacctctgggtgccaggccgggccagtgacttcgtgttgagctgaaggaacttgtctaccgcttccctgaaaacctttctttcctaattcatgagccagcaagatgcggtcgctgcactttcagagcgccttctcgtagctgcgtacaaaggccaaacagagaatgtggttcagctcatcaacaagggcgccagggtagcggttaccaagcatggccggactcccctgcatcttgctgccaataagggccatcttcctgtggtccagatcttgctgaaggctggctgcgaccttgatgtccaggatgatggggaccagaccgccttgcaccgggccacagtggtggggaacacggagatcatcgcggcgctcatccacgaagggtgtgccctggacagacaagacaaggatgggaatacagccttgcatgaagcatcctggcatggtttcagccagtcagccaagctgctcattaaagcaggagccaacgtgcttgccaagaacaaggcggggaacacagctctgcacctggcctgccagaacagccactcccagagcacgcgcgtcctcctgctggccgggtcccgcgctgacctcaaaaataatgcaggagacacctgtttgcacgttgctgcgcgctataatcacttgtccatcattaggctcctcctcactgctttctgttctgtccatgaaaagaaccaggctggagacacagcacttcacgttgctgctgccctaaatcacaagaaggtggccaaaatcttactggaagccggagcagatacgaccattgttaacaatgcaggccagactccgctggagactgcccgctaccacaataacccggaagttgctcttctccttactaaagctccccaggtcttgcgcttcagtcgtgggcgaagcctgaggaaaaagagagagaggctcaaggaagagaggagagcccagtctgtgccaagagatgaggtggcccaaagcaagggcagtgtctcagcaggagacacccccagcagtgaacaggctgtggccagaaaagaagaagccagagaagagttcctgtcagcctccccagaacccagagcaaaggatgacaggaggagaaagtcaaggcccaaggtgtcagcattttctgaccccaccccaccagccgaccaacagcctggacaccagaagaacctgcatgctcataatcaccctaaaaagaggaacaggcatcggtgttcatccccacccccaccccatgagttcagggcgtatcagctctacacattgtaccggggcaaggatgggaaagtgatgcaggcaccaataaatggttgtcgatgtgaacctctaatcaacaagctggagaatcagttggaggctactgtggaggagataaaagcagagctgggatcggttcaggacaaaatgaatacaaagctggggcagatggagaataagacccagcaccaaatgcgtgttttggacaagctgatggttgagcgactttctgcagagaggacggagtgcctgaaccgcctgcaacagcactcagacacagagaagcatgagggggagaaacgacagatatccttggtggatgaattaaaaacctggtgcatgttaaagattcagaatctggagcagaagctttctggagattctagggcctgcagagctaaatccacaccatctacttgtgagtcctctacaggtgtggaccaattagtggtgactgcaggtccagcagcagcttccgacagctcccctccagtggttaggcccaaagagaaggccctcaactccactgctacccagagactccagcaggagctgtcgtcttctgactgtacaggctcccgactgagaaacgtcaaggtccagacagccttgctacccatgaatgaggcagccagatctgatcagcaggctgggccctgcgtcaacagaggcactcaaactaagaagtctgggaagagtgggccaacaaggcatcgtgcccagcaacccgcagccagcagcacctgtgggcagccgccaccagccacaggcagcgagcagactggccctcacattcgggacacctcccaagctctggagcttacccagtatttttttgaggctgtttctacccagatggaaaagtggtatgaaaggaagattgaagaagcacgaagccaagccaatcagaaagcccagcaagataaggctacattgaaggaacacattaaaagtttagaagaggaacttgccaaactaaggactagggtgcagaaggaaaattagcaccaataaagaggaaatatgaaaggattcttgaagatttccagttttgcaactgcataatagctatgcccaaggagtcaactattgtatatattgcagatttgcctttttaaaaaaatcactaattctacaatgtgccagatacatgtttcctatgcccaggaagttatgaagacttcaacaattaaactgaaaccaggggaagcttgcttagttttgggtttcattataaactcttagcctcagtccaggttaatctgaagtttgaaagctcagattaagcaagccatgccaagaaactggacgatgtgtaagcctagactctaaaattc

SEQ ID NO: 107782 - DNA, 539 bp, Homo sapiens
  Payload ID: 1157
  Gene Symbol: ANKRD6
  Gene Name: ankyrin repeat domain 6
  ENST ID: ENST00000520458
  CDS Start-End: 300-539
agttttggtttggccattgacatgtaaatgtcagagaggcctgaggctgttccccagtggaccctcccgccttcccacacaaagccctggctctgtgagggccatggctttgcctttgtgaggcctgggccatcccagctgcagagggaagtccccgtcccgaagatggcatattcataaagacatcttctgatgattgtgaacatctttacctctgggtgccaggccgggccagtgacttcgtgttgagctgaaggaacttgtctaccgcttccctgaaaacctttctttcctaattcatgagccagcaagatgcggtcgctgcactttcagagcgccttctcgtagctgcgtacaaaggccaaacagagaatgtggttcagctcatcaacaagggcgccagggtagcggttaccaagcatggccggactcccctgcatcttgctgccaataagggccatcttcctgtggtccagatcttgctgaaggctggctgcgaccttgatgtccaggatgatggggaccagaccgccttgcac

SEQ ID NO: 107783 - DNA, 1038 bp, Homo sapiens
  Payload ID: 1158
  Gene Symbol: ANKRD60
  Gene Name: ankyrin repeat domain 60
  Uniprot ID: Q9BZ19
  ENST ID: ENST00000457363
  CDS Start-End: 1-1038
atgacgcgcggccgcgcctgggggatgcggcgggcggcggcgggggcgggcggagcgcgggcggcggggccaactgggggcgcctctcgcctgcaccccaatgcgggacgcaggagcggtgcgcgggccggggctcaggggtgcggcgggcccagggtgggctcggcggactcgcgggccctccccgcgcagcccctggcctgtgcccgcggccggagccagcggctcgtctgtgacccgaaggccgcgagtgccttgcccgacttggcccctgacgtcttcgtcctgcgggtgcggctggaggagacgggggagatgttccgagtggcaaactgccgcggcgacatgaccgtgcgggagctcaaagaggagctggacctgatggtcggcatccccttcaacctccagcggctccagtacctcgacgaaggagttttgatggatgacactaccctgaagttccatgatgttgttcctggagggattatttcattatgtatctggcatcatgacggatggacagaacttgttttggcggctgtggaaggggatcccagcaagctatcttgtctcgggcttactgaagattccttctaccgaaccgcaaattcagaacattttgagggtgagaagtggaagcactggacgtctcagagggcgtttgtggcgttgtatgtggcctcacacagaggccactttgatgctgtgcagtaccttctagaacacggagccagctgcctcagcagatcccccctgggcaggacacccctgcatgtggctgcagctatgggccggtcagactgtataatcctcctgctccagcacggggcctccatccacgacagagatgccaagggggagacccccatctccattgcacaccgcctgaaccacacactgagcgagaggcagatggtcctcctccaccggatagcaaagtcggggataagggatctgaatgacttggtcatgaagaatgctttgcagagggtcaagtctgggtttaggtctgagaagatgacgatgacccctcattag

SEQ ID NO: 107784 - DNA, 1257 bp, Homo sapiens
  Payload ID: 1159
  Gene Symbol: ANKRD61
  Gene Name: ankyrin repeat domain 61
  Uniprot ID: A6NGH8
  ENST ID: ENST00000409061
  CDS Start-End: 1-1257
atggggaatataaccaggaaaggaagcagagacctggtggttgacagtgccaagtccctggaagatggcccatctgcagcacttcactcgaaactctatgaagccatcatgagagaagactgcactacgatcgaggtactcctgagaaatcaccctgtcaaccagcccatcaccattctgcccaactccgccagcaacagattacttctgacccagccgacagagtctatcatccccatccatctggctgccaagtaccacaaggcccagagtctgctctgcctgttacggcacggtgctgacccagaagtcagggacacgacaggcctcaccacactcaacttaatgctactgcactggccagtcacttccaccacgtgggcaaaaccaggcaacagaacgcacaggatcctgacagacattcagaatagcagcatcacatgtctccgcatcttgtgtgcgcacggagctcaagtgaacactcaaggggaaatcagcaacaaacgttcaccactccacctggccatagcatatggttgctatccagttctctccattttgacccaaaatggtgccgatgtcaatgctattaatgaagccagcatgacaccccttcacatggccgcaaacatgctgaataaggagatgatggaaacgctcattgcctatggagcaaacgtcaactgtgctgtctcttccacggggaacacgcccctgaagcttgcagtgtgcactgcatcaagcaaagcaggccgactcctcggggcgggggtcagctgcatccgtctgctactcactcacggagccaaagtcaacgcccaggactacaagggccaaacagccatccatgaggcatgctttggaggcagagaggcaatcatcaatctcctgcttgaatttgaagcaaatgttaacattttaacaagaaacggggaatctccaatttatatgtaccttcagcgcagttgcaatgtaagagatacggcacttctggccaggctactttatcacacttatcctctgagaatgaccaataaccaaggaattctacctgcaggaatcatgctaccagaattccgcctcttaagggacaccctaataaagcaatcgcaaaaacctttatccctacagggtatctgcaaaagaaacatcaggaatatttatggtgagaaatacaaacagcacttgaagcaattcctcccagtgacaatatggaattctgtctactgctgttatgacttggcatatacctcttga

SEQ ID NO: 107785 - DNA, 2919 bp, Homo sapiens
  Payload ID: 1160
  Gene Symbol: ANKRD62
  Gene Name: ankyrin repeat domain 62
  Uniprot ID: A6NC57
  ENST ID: ENST00000587848
  CDS Start-End: 166-2919
ggctaggtgctcctccgagcagctggagactggagtgtccctgacggaggttgcggctggacctggttacgtgctggtgctgcgctccagagaggcagaaaacgagtgggagctgaggtgtcttaaagccgttcctcagcctgggagaagatctctggcttcaggatggaggtcagggggtcgttcctggcggcctgcaggagacgcatggctacctggaggaagaatcgtgacaaggatggcttctcaaatcccgggtaccgagtccggcagaaggatctgggcatgatccacaaagctgccatcgcaggtgatgtgaacaaggtgatggagagcatcttgctcaggctgaatgacttgaacgacagggacaagaagaacaggactgctctacttttggcgtgtgcccatggccgtccaggagtggtagctgacctggtggccagaaaatgccagcttaacctcactgacagtgaaaacaggacagctctgatcaaggctgtacaatgtcaagaagaagtttgtgcatccatcctgctggaacatggcgccaacccaaatgttagagatatgtatggcaacactgctctgcactatgccattgataatgagaatatatcaatggcaagaaaactgcttgcatatggtgcagatattgaagcaagaagccaggatggacatacatcacttttactcgctgtaaataggaaaaaagagcaaatggtggcatttttgttgaagaaaaaaccagatttaactgcaatagataattttggaagaacagccctgatacttgctgctcgtaatggatcaacaagtgtagtctaccagcttcttcagcacaatattgatgtcttttgccaagatatatctggatggactgcagaagactacgctgttgcttctaagtttcaagccattcgtggaatgatttctgaatataaagcaaacaagagatgtaaaagtcttcaaaatagcaattcagaacaagacttagaaatgacatcagagggagagcaagaaaggcttgaaggatgtgaaagtagccagccacaggttgaagaaaaaatgaagaaatgcagaaataagaaaatggaagtgtcaagaaacgtacatgctgatgacagtgacaattataatgatgatgttgatgaattaattcacaaaataaagaacagaaaacctgataatcatcaatctcctgggaaggagaatggcgagtttgataggcttgcaaggaaaacctctaatgaaaagagcaaggttaaaagccaaatatatttcacggatgaccttaatgacataagtgggtcatctgaaaaaacctcagaggatgatgagttgccttactctgatgatgagaattttatgttactcattgaacaaagtggaatggagtgtaaagattttgttagcctatcgaaaagcaagaatgcaacagctgcatgtggaagatcaatagaggatcaaaaatgttactgtgaacgacttaaagtaaaatttcaaaaaatgaaaaataatattagcgtactacaaaaggtactatctgaaacagacaaaaccaaatcacagtcagagcatcagaatcttcaagggaaaaaaaagctctgtaatttgagatttatcttacaacaacaagaagaagaaagaataaaggctgaagagttgtatgaaaaagatatagaagagttaaaaataatggaagagcaatataggacacaaactgaagtgaaaaaacaatctaaactgactctcaaatcattggaagtggaattgaagactgtaagaagtaactcaaatcagaattttcatactcatgaaagagaaagagacctgtggcaggaaaatcacttgatgcgggatgaaattgccagactcaggctggaaatagacacaataaaacatcagaaccaggaaactgaaaataaatatttcaaagatattgaaattataaaggaaaacaatgaagaccttgaaaagactctcaagcggaatgaggaagcattaacaaaaacaataacccggtatagtaaagagcttaatgttctgatggatgagaatacaatgctcaattctgagctacagaaggaaaaacaaagcatgtcaagactggaaacagaaatggaatcataccgttgtagactggctgctgccctatgtgatcatgatcaacgtcagtcatcaaaaagagacctacagcttgctttccagagcacagtgaatgaatggtgtcatttacaagaagacactaattctcacattcagattctttctcagcaactttctaaagctgagagtacatccagtggcctggaaactgagctccattatgaaagagaggctctcaaagaaaagacgttgcatatagaacacatgcaaggagtcctaagccgaacacagcgtcgattggaggacattgaacacatgtaccaaaatgaccaacctattttggaaaaatacgtgagaaagcagcaatctgtagaggatggactatttcaactacaaagccaaaatctgttgtatcaacagcagtgtaatgatgctcgcaagaaagctgacaatcaggagaaaacaataattaatatccaagtcaaatgtgaagatactgtagaaaaacttcaagctgagtgtagaaagctagaagagaacaataaggggttgatgaaggaatgcactcttttaaaagaaagacaatgccaatatgaaaaagagaaagaagaaagagaagtagtcaggagacagcttcaacgagaagtggatgatgccctgaacaaacaattgctgttagaagctatgctagagatttcatcagaacgtcgtattaatttagaagatgaggcacaaagtttaaaaaagaaattaggccagatgagaagtcaagtatgtatgaaacttagcatgtcaacagttactctgtag

SEQ ID NO: 107786 - DNA, 1143 bp, Homo sapiens
  Payload ID: 1161
  Gene Symbol: ANKRD63
  Gene Name: ankyrin repeat domain 63
  Uniprot ID: C9JTQ0
  ENST ID: ENST00000434396
  CDS Start-End: 1-1143
atgctcaaacccaaggacctgtgcccccgagcggggacgcgcaccttcctggaggccatgcaggcgggcaaagtgcacttggcccgcttcgtgttggatgcgctggaccgcagcatcatcgactgccgcgcggagcagggccgtacgccgctcatggtggccgtggggctgccggaccccgcgctgcgcgcgcgcttcgtgcggctgctgctcgagcagggtgctgcagtgaacctgcgagacgagcgcggccgcaccgcactcagcctggcgtgcgagcgaggccacctggacgccgtgcagctgctggtgcagttcagcggtgaccccgaggcggccgactctgcgggcaacagcccggtgatgtgggcggcggcctgcggccacggggcggtgctcgagttcctggtgcggtccttccgccgcctaggcctgcgcctcgaccgcaccaaccgtgcggggctcaccgcgctgcaactggccgccgcccgcggccacgggacctgtgtgcaggccctcaccgggccctggggccgcgccgccgccgccgctgcggcccggggctccaactccgatagtccccctggccgcccggcccccgcggccagccccgagcatcgacgacccagcccccgccgcctcccgcggcctctcctggcgcgctttgcgcgagcggcgggcggccacggcggcgaggctggctcagcgggcaagaattcgggccggcaccgggcgcagggcagcgaacggcccgagctgggtcggagcatgagcctggctctaggtgcggtaaccgaggaggaggctgcccgcctgcgggctggggccctgatggccctaccaaactcgccccagtcttcggggactgggcggtggcgctcacaggaggtgctggagggagcgcccccaaccttagcgcaagcccccattggcctcagtccccacccggagggcggccccggctctggccgcctgggtttgcgccgacgctccacagccccagatatccccagcctggtcggggaggcgccagggcccgagagtggcccggagttagaggccaacgctctgtctgtctcggtgcctgggccgaacccttggcaggcgggcaccgaggctgtggtgctgcgtgctcagcggtaa

SEQ ID NO: 107787 - DNA, 876 bp, Homo sapiens
  Payload ID: 1162
  Gene Symbol: ANKRD65
  Gene Name: ankyrin repeat domain 65
  Uniprot ID: E5RJM6
  ENST ID: ENST00000442470
  CDS Start-End: 256-780
gcagacactccaccccaaagcctgcagaagggattttgtgaagagggtcaccaggctgagcctcggccagaacccgtctacagaggaccctcagccagagcagaaagctcctgagccagctcccttgggtaacagagccaagcccctctgaaggctaagtggtaactggaatggggggctccagttggcctgggacacggctgggggcaggccagaggcctccacagtggatgtaggatccctgctcccccccagatggactcccagaggcctgagcccagagaggaggaggaggaggaacaggaactgcggtggatggagctggactccgaagaggccctgggaaccaggacagaggggcctagtgttgtccagggctgggggcacctgctccaggccgtgtggaggggccctgcaggcctggtgacgcagctgctgcggcaaggtgccagcgtggaggagaggacattgaggtgctgctgggccacggggcagacccaggcatcagggacaggcatggccgctctgcgctgcacagggctgccgcccgaggacacctgcttgccgtccagttgctggtcacccagggggccgaggtggatgcgcgggacaccctgggcctcacacccctgcatcacgcctctcgggaaggccacgtggaggttgccggctgcctgctggacaggggtgcccaggtggatgctaccggctggctccgaaagacccccctacacctggctgcagagcgagggcatgggcctaccgtggggcttctgctgagccgaggggccagccccactctgcggacgcagtgggccgaggtggcccagatgcctgagggggacctgccccaggcgctgcctgaacttggagggg

SEQ ID NO: 107788 - DNA, 1976 bp, Homo sapiens
  Payload ID: 1162
  Gene Symbol: ANKRD65
  Gene Name: ankyrin repeat domain 65
  Uniprot ID: E5RJM6
  ENST ID: ENST00000427211
  CDS Start-End: 638-1162
tggagtccttggtgaatcttttgtcctgtccagcatttacagaaaggaaggccagaacctcaccctgccctcctccccagcctggaatcgggaggaggggccggcacccacccctgggtgggcttagccagctgggacaggagtgggtgagggggctgcccgagggtgggccccatggagagccctgtgaggccttccaggggcacatcggggtacatccaaggctgcgcttcctgggggaggtggcgtctgagcaactttcgtccacaagcatgttcctgcttgtcctccccaaccgcctggcctttgttccccaggagggcagccgaactggggccctggcagccagcaggggagggagtatgttggacagggggctgtgcccgaaggcagggccttcctaagtggctgagtaaacagcgtcaggtggcctcagcctggcccaggggaccagctgtgttctcccaccccctgcaaggctgaagctgccaccattcagcttttcagcagcagacactccaccccaaagcctgcagaagggattttgtgaagagggtcaccaggctgagcctcggccagaacccgtctacagaggaccctcagccagagcagaaagctcctgagccagctcccttggatggactcccagaggcctgagcccagagaggaggaggaggaggaacaggaactgcggtggatggagctggactccgaagaggccctgggaaccaggacagaggggcctagtgttgtccagggctgggggcacctgctccaggccgtgtggaggggccctgcaggcctggtgacgcagctgctgcggcaaggtgccagcgtggaggagaggacattgaggtgctgctgggccacggggcagacccaggcatcagggacaggcatggccgctctgcgctgcacagggctgccgcccgaggacacctgcttgccgtccagttgctggtcacccagggggccgaggtggatgcgcgggacaccctgggcctcacacccctgcatcacgcctctcgggaaggccacgtggaggttgccggctgcctgctggacaggggtgcccaggtggatgctaccggctggctccgaaagacccccctacacctggctgcagagcgagggcatgggcctaccgtggggcttctgctgagccgaggggccagccccactctgcggacgcagtgggccgaggtggcccagatgcctgagggggacctgccccaggcgctgcctgaacttggagggggggagaaggagtgtgagggcatagagtccacgggctgagccagacagcaggctccaggctccaccgccccagtgatttccaggctctctggctgaggctgcctgcctggaggggacatcagggaagaggcttccggaggaggggatgggagaaagtaggggatgtggcttgagctgcagtcacaggccttggctggaccagggatggcccccagctcccaggagggcccactgaccctgcagctccagccttctccatacttcaacaaagaatgagttgtggcaatgagggaagagagaccctctcatagtgttttatactcagtacctgttttaagaaaaaacaacaaggaagtaaaaccaaagacaggcaggcagcctggcgctaggcccgaaaccaggcctgcgcctgcctggcctaaacccagtagttgaaaatcaattcataacttagaaaccgatgttattcatagattccagacattgtatagaagaacatttgtgaaactccctgccgtgttctgtttctctctgaccgccggtgcatgcagcccctgtcacgtaccgcctgcttgctcaaatcaatgacgaccctttcatgtgaaatcttcggtgttgtgagcccttaaaagggacagaaattgtgcacttggggagctcggattttaaggcagtagcttgccgatgctcccagctgaataaagcccttccttctacaa

SEQ ID NO: 107789 - DNA, 1632 bp, Homo sapiens
  Payload ID: 1162
  Gene Symbol: ANKRD65
  Gene Name: ankyrin repeat domain 65
  Uniprot ID: E5RJM6
  ENST ID: ENST00000520296
  CDS Start-End: 313-510
ccgaactggggccctggcagccagcaggggagggagtatgttggacagggggctgtgcccgaaggcagggccttcctaagtggctgagtaaacagcgtcaggtggcctcagcctggcccaggggaccagctgtgttctcccaccccctgcaaggctgaagctgccaccattcagcttttcagcagcagacactccaccccaaagcctgcagaagggattttgtgaagagggtcaccaggctgagcctcggccagaacccgtctacagaggaccctcagccagagcagaaagctcctgagccagctcccttggatggactcccagaggcctgagcccagagaggaggaggaggaggaacaggaactgcggtggatggagctggactccgaagaggccctgggaaccaggacagaggggcctagtgttgtccagggctgggggcacctgctccaggccgtgtggaggggccctgcaggcctggtgacgcagctgctgcggcaaggacattgaggtgctgctgggccacggggcagacccaggcatcagggacaggcatggccgctctgcgctgcacagggctgccgcccgaggacacctgcttgccgtccagttgctggtcacccagggggccgaggtggatgcgcgggacaccctgggcctcacacccctgcatcacgcctctcgggaaggccacgtggaggttgccggctgcctgctggacaggggtgcccaggtggatgctaccggctggctccgaaagacccccctacacctggctgcagagcgagggcatgggcctaccgtggggcttctgctgagccgaggggccagccccactctgcggacgcagtgggccgaggtggcccagatgcctgagggggacctgccccaggcgctgcctgaacttggagggggggagaaggagtgtgagggcatagagtccacgggctgagccagacagcaggctccaggctccaccgccccagtgatttccaggctctctggctgaggctgcctgcctggaggggacatcagggaagaggcttccggaggaggggatgggagaaagtaggggatgtggcttgagctgcagtcacaggccttggctggaccagggatggcccccagctcccaggagggcccactgaccctgcagctccagccttctccatacttcaacaaagaatgagttgtggcaatgagggaagagagaccctctcatagtgttttatactcagtacctgttttaagaaaaaacaacaaggaagtaaaaccaaagacaggcaggcagcctggcgctaggcccgaaaccaggcctgcgcctgcctggcctaaacccagtagttgaaaatcaattcataacttagaaaccgatgttattcatagattccagacattgtatagaagaacatttgtgaaactccctgccgtgttctgtttctctctgaccgccggtgcatgcagcccctgtcacgtaccgcctgcttgctcaaatcaatgacgaccctttcatgtgaaatcttcggtgttgtgagcccttaaaagggacagaaattgtgcacttggggagctcggattttaaggcagtagcttgccgatgctcccagctgaataaagcccttccttctacaa

SEQ ID NO: 107790 - DNA, 2190 bp, Homo sapiens
  Payload ID: 1162
  Gene Symbol: ANKRD65
  Gene Name: ankyrin repeat domain 65
  Uniprot ID: E5RJM6
  ENST ID: ENST00000537107
  CDS Start-End: 313-1512
ccgaactggggccctggcagccagcaggggagggagtatgttggacagggggctgtgcccgaaggcagggccttcctaagtggctgagtaaacagcgtcaggtggcctcagcctggcccaggggaccagctgtgttctcccaccccctgcaaggctgaagctgccaccattcagcttttcagcagcagacactccaccccaaagcctgcagaagggattttgtgaagagggtcaccaggctgagcctcggccagaacccgtctacagaggaccctcagccagagcagaaagctcctgagccagctcccttggatggactcccagaggcctgagcccagagaggaggaggaggaggaacaggaactgcggtggatggagctggactccgaagaggccctgggaaccaggacagaggggcctagtgttgtccagggctgggggcacctgctccaggccgtgtggaggggccctgcaggcctggtgacgcagctgctgcggcaaggtgccagcgtggaggagagggaccacgcaggccggaccccgctccacctggccgtgctgcggggccacgcgcccctggtgcgtctcctgctgcagcgaggggccccggtgggcgcggtggaccgggcggggcgcaccgcgctgcacgaggccgcctggcacggacactcgcgggtggccgagctgctgctgcagcgcggggcctcggcggcggctcgctccgggacgggcctcacgccgctgcactgggccgctgccctgggccacacgctgctggccgcgcgcctgctggaggctccgggcccgggacccgcggcagcggaggcggaggacgcgcgcggctggacggcggcgcactgggcggccgcgggcgggcggctggcggtgctggagctgctggcggccggcggcgcgggcctggacggcgccctgctcgtggctgccgctgcggggcgcggggcggcgctgcgcttcctcctggcgcgcggggcgcgggtggacgcccgggatggcgcgggggccacagcgctgggtctggcggccgccctaggccgctcccaggacattgaggtgctgctgggccacggggcagacccaggcatcagggacaggcatggccgctctgcgctgcacagggctgccgcccgaggacacctgcttgccgtccagttgctggtcacccagggggccgaggtggatgcgcgggacaccctgggcctcacacccctgcatcacgcctctcgggaaggccacgtggaggttgccggctgcctgctggacaggggtgcccaggtggatgctaccggctggctccgaaagacccccctacacctggctgcagagcgagggcatgggcctaccgtggggcttctgctgagccgaggggccagccccactctgcggacgcagtgggccgaggtggcccagatgcctgagggggacctgccccaggcgctgcctgaacttggagggggggagaaggagtgtgagggcatagagtccacgggctgagccagacagcaggctccaggctccaccgccccagtgatttccaggctctctggctgaggctgcctgcctggaggggacatcagggaagaggcttccggaggaggggatgggagaaagtaggggatgtggcttgagctgcagtcacaggccttggctggaccagggatggcccccagctcccaggagggcccactgaccctgcagctccagccttctccatacttcaacaaagaatgagttgtggcaatgagggaagagagaccctctcatagtgttttatactcagtacctgttttaagaaaaaacaacaaggaagtaaaaccaaagacaggcaggcagcctggcgctaggcccgaaaccaggcctgcgcctgcctggcctaaacccagtagttgaaaatcaattcataacttagaaaccgatgttattcatagattccagacattgtatagaagaacatttgtgaaactccctgccgtgttctgtttctctctgaccgccggtgcatgcagcccctgtcacgtaccgcctgcttgctcaaatcaatgacgaccctttcatgtgaaatcttcggtgttgtgagcccttaaaagggacagaaattgtgcacttggggagctcggattttaaggcagtagcttgccgatgctcccagctgaataaagcccttccttctac

SEQ ID NO: 107791 - DNA, 1506 bp, Homo sapiens
  Payload ID: 1162
  Gene Symbol: ANKRD65
  Gene Name: ankyrin repeat domain 65
  Uniprot ID: E5RJM6
  ENST ID: ENST00000454272
  CDS Start-End: 87-1286
aatggggggctccagttggcctgggacacggctgggggcaggccagaggcctccacagtggatgtaggatccctgctcccccccagatggactcccagaggcctgagcccagagaggaggaggaggaggaacaggaactgcggtggatggagctggactccgaagaggccctgggaaccaggacagaggggcctagtgttgtccagggctgggggcacctgctccaggccgtgtggaggggccctgcaggcctggtgacgcagctgctgcggcaaggtgccagcgtggaggagagggaccacgcaggccggaccccgctccacctggccgtgctgcggggccacgcgcccctggtgcgtctcctgctgcagcgaggggccccggtgggcgcggtggaccgggcggggcgcaccgcgctgcacgaggccgcctggcacggacactcgcgggtggccgagctgctgctgcagcgcggggcctcggcggcggctcgctccgggacgggcctcacgccgctgcactgggccgctgccctgggccacacgctgctggccgcgcgcctgctggaggctccgggcccgggacccgcggcagcggaggcggaggacgcgcgcggctggacggcggcgcactgggcggccgcgggcgggcggctggcggtgctggagctgctggcggccggcggcgcgggcctggacggcgccctgctcgtggctgccgctgcggggcgcggggcggcgctgcgcttcctcctggcgcgcggggcgcgggtggacgcccgggatggcgcgggggccacagcgctgggtctggcggccgccctaggccgctcccaggacattgaggtgctgctgggccacggggcagacccaggcatcagggacaggcatggccgctctgcgctgcacagggctgccgcccgaggacacctgcttgccgtccagttgctggtcacccagggggccgaggtggatgcgcgggacaccctgggcctcacacccctgcatcacgcctctcgggaaggccacgtggaggttgccggctgcctgctggacaggggtgcccaggtggatgctaccggctggctccgaaagacccccctacacctggctgcagagcgagggcatgggcctaccgtggggcttctgctgagccgaggggccagccccactctgcggacgcagtgggccgaggtggcccagatgcctgagggggacctgccccaggcgctgcctgaacttggagggggggagaaggagtgtgagggcatagagtccacgggctgagccagacagcaggctccaggctccaccgccccagtgatttccaggctctctggctgaggctgcctgcctggaggggacatcagggaagaggcttccggaggaggggatgggagaaagtaggggatgtggcttgagctgcagtcacaggccttggctggaccagggatggcccccagctcccaggagggcccactgaccctgcagctccagccttctccat

SEQ ID NO: 107792 - DNA, 1346 bp, Homo sapiens
  Payload ID: 1163
  Gene Symbol: ANKRD66
  Gene Name: ankyrin repeat domain 66
  Uniprot ID: B4E2M5
  ENST ID: ENST00000565422
  CDS Start-End: 6-761
atggcatggacacaacactccggatggttaggactgcctgtcagcacagagctcctcaaatttcacacaagacaggctgttctcacatttcaatgcactcacctggagggcttaccacaacaaagatggccggacccctgcccagagtttcagattctttgttttctgccatggaattggccaaaatgtcagacatgacaaagcttcaccaagctgtggctgcaggagactacagcttagtgaagaagattttgaagaaaggtctctgtgacccaaactacaaagatgtagactggaatgaccggaccccacttcactgggctgcaatcaaagggcaaatggaggtgatacggctcctgatagaatatggagccaggccctgcctggttactagtgtgggctggaccccagctcattttgcagcagaagcaggccatctgaatatactcaaaactctccatgcattgcacgctgccatcgacgcccctgacttctttggagacacaccgaagaggattgcacagatctatggacagaaagcctgtgtggcatttctggaaaaggcagagcccgagtgccaggaccaccgttgcgctgcccagcagaaggggctgcctctggatgagcgtgatgaagactgggatgccaagaaaagggagctggagctgtctcttccttccctaaatcaaaacatgaataaaaagaataagaaaagtcgaggccccaccaggcccagcaataccaaggggaggagagtatgagaactcaaccttatgttttctggcaaggaactttccctggtgccagaaatgaggctgttaggcatggtggcctttccatgactttactcatagacccttacccacctggcttctgcccatggacctgtcattaggtgctgtccacatgggctgttgtttcctggctagcacctactgtgtacaataattaccgggaaaggacaaaacctgcttgcattttgtcatcagtggtttgcacagtcagcatcttttgacccctgccccccaacaataatagaatttcaggagacaaggaaactctggcatgaattaacttcatccctgataacgatcgagagataatgtaaaataatgaacatgtgattataggtctactttttcaactgtaaatttgggaaaattaaattcagatcagataattccaataaaaaattgcatccaaattgagatgcaaaatacacattagatttcaaacacttagtacaaaaatataaaatgtctccttaataatacttaatattgattccacattgaaatgataatattttggatattgcgttgaataagatatattaccaaaatgaa

SEQ ID NO: 107793 - DNA, 2551 bp, Homo sapiens
  Payload ID: 1163
  Gene Symbol: ANKRD66
  Gene Name: ankyrin repeat domain 66
  ENST ID: ENST00000445060
  CDS Start-End: 1-221
tgatagaatatggagccaggccctgcctggttactagtgtgggctggaccccagctcattttgcagcagaagcaggccatctgaatatactcaaaactctccatgcattgcacgctgccatcgacgcccctgacttctttggagacacaccgaagaggattgcacagatctatggacagaaagcctgtgtggcatttctggaaaagggaatagaattttgactctatataaatcaagaaacgcctgacttctttagtagtttgtatttgcaagatctaagatcatggtaaacattaggtcctaaaatcttggggaaggacaacatgtccttcctctgacttgttagcaatcaaattgagtaggttttaaatgtctgttaattggaagggtttgttatttcattttcagccaaaggagagaggtgcattttaagtatcagaattagatcagctttgagtttgtactaaatttggaatgtaatagattttcataaattacgtgtgcctttttggaaatgtcaactgtctttatgtctgcttgtaaaagtttcaaaatatgtttttctctcaaaaaggcaacgttatttcatttgcttgaatattatgataggaacgcttactgatattacttgatagttttatatagccttggaactttaacatataatatagcagtattaatcatgatagttgtacttctttgaaacattaaatttgaggaaactaatctatgtaattgtctccacttcttcacctctcacccacgcttcagacttcttccctgatccccatactgaatcagctgtcactcaagtcattagggagctcctcacgctaaatcaattgcctcttctcaattcacatcttacctccacttaattcggtatttaatattcctgaaactcttctcccttgttttatctgatgctattctcttttagtttttcttctacttctctgataattccttatgacttttaaaatgtgctttttctaagaataaatcttatgatatgttcttgcgtgccttttaaatgctgacattccttagggtcctgcccttggctgtcctctactgactctctctaagtaatcccagcccctccctagtgaccagggatcaacatgaaatatgatcccagcataactgaaatgcaggaggggtgcttgcctccaaatagtggggagtgctattaccaagaaaagtaggcagacagtgttgagccagcaaaaacaataaaggtcagtcacatcacgtgtgagtcatttctacttattatcagctcccactaagaacttccctgacagagcgtttagggagaagaatcctgaattaaggggggattaacctggatcttgaaagctagctggctaatgaaggagggagaaaaactgttgatttagagtgaaggcaccaacttggaaatgtgcataggttgtgtgtatatgtgagaaggtgagggatagtggagtgcagggatgagtggcctggctaggcagagcattcacactagagaggaatggagcataaggtcaggtgacggggtgggtgaccacagtgaactaggcaagcagaagagtgtgagctcatcaggggagtcacaagctgaaacagatgcattagcaatttatttgtgtagtagaggagttggcagtggtactgcgtgggattgaagactgctagactttaggcaaggggatcacttaaggaatttcttattgattcacattttgagtaagttggctcctgggctaggtgatgaagataaaggatataagagaacttcaaaagaagcctagaccatatgtgatcattttctgaatatcctagggaatgttgtgaaacaattcagcttttgattcagccccccaagtgataaacctctcatttagcaaatatttttgagttctactatgtgtatgtcattgagttagacactaaaaacaacctaaaataaaccagatacagtgctggacatcaagaaggttaactgtgtgggagacgaaataacttgtttacataaataacactaatacaagacagagagtgactaggcagaggaaagacatggtgtggtctgaagattgaaaggtcacttccagcttagggtgagggactagtgagtttgctgtcctttgaatgaactgtgcttttaataatggtttgcacttaaaatgctatttgccttccctataccattatctatcctcttaaattccatttgtcctcatattggttcaaaagtgacttttccaagtacctttaagcaagtcacatactcaccattggcctcatacaaaactgtatatgtgtgtatttcccattgtctatgtgtgtataatgctctatttatttatccatccatgtatccatttacaattatatgtatttttacagaatccatacatacgtataatacatatgtgattgtgagtgattctcattttgttccttatatgtttctgtacttttaaattttatacaaggaacacacatcacttttatgattatgaaaaataaaactaaaaataaacgaaaacagtctcgcaat

SEQ ID NO: 107794 - DNA, 1298 bp, Homo sapiens
  Payload ID: 1164
  Gene Symbol: ANKRD7
  Gene Name: ankyrin repeat domain 7
  Uniprot ID: Q92527
  ENST ID: ENST00000265224
  CDS Start-End: 156-920
ataacggccggctgcgcgaggcccttccagcatttccactttcgtcaggtactggagagggctgccggccggatgccagggcagaggggcagggcggacggctaggagttcaagaaacatcctggtctgagggaaaggctgcagcctgcaccgccatgaataagcttttcagcttctggaagaggaagaatgagacccgcagccagggctacaaccttcgagaaaaggatttaaagaaacttcacagagctgcttcagtcggggatttgaagaagctgaaggaataccttcagatcaagaaatatgatgtaaatatgcaggacaaaaaatacagaacacctttgcacctagcctgtgctaatggacatacagatgttgtacttttcctaattgagcaacaatgcaaaataaatgtccgggatagtgaaaacaaatccccattgattaaggcagtacagtgtcaaaatgaggattgtgctactattcttctaaactttggtgcagacccagatctgagggatattcgttataatactgttcttcactatgctgtttgtggtcaaagtttgtcattagttgaaaaactgcttgaatacgaagctgatcttgaagcgaaaaataaggatgggtatactccactattagttgccgttattaacaataatccaaaaatggtaaaatttcttctggagaaaggggctgatgtgaatgcttcagataattatcaaagaacagcccttattcttgctgtcagtggtgaaccaccatgtttagtaaagcttcttcttcagcaaggtgtggaattatgttacgaaggtattgtggattcacagctgaggaatatgtttatttccatggttttactgcatagatacccacaattcactgcgagccatggaaagaagaaacatgctaaatagacaccttattcttggcactacatgtgactaaaggaagatatggaacccatttctacaatttctttgccgcttccttgaattggaaaaatgtactttgaaagaaccgttaagtgaactattataatatttttgctgactacccagttgaagaaaagtttgttaattggatgggattttttttttttcacgttagaagacatgaagaaattttaaaagataaacatctatattgtgaaccatcagctgaaaagataaatttgtgttcaatatataggcagaaaaaaatttgtgtcaaaatgttgaatggaataataatgaggaaactgtgttaggcatgtattaaaacatttaaataaaataaaaatacatttcagctac

SEQ ID NO: 107795 - DNA, 1242 bp, Homo sapiens
  Payload ID: 1164
  Gene Symbol: ANKRD7
  Gene Name: ankyrin repeat domain 7
  ENST ID: ENST00000417525
  CDS Start-End: 101-892
agagggctgccggccggatgccagggcagaggggcagggcggacggctaggagttcaagaaacatcctggtctgagggaaaggctgcagcctgcaccgccatgaataagcttttcagcttctggaagaggaagaatgagacccgcagccagggctacaaccttcgagaaaaggatttaaagaaacttcacagagctgcttcagtcggggatttgaagaagctgaaggaataccttcagatcaagaaatatgatgtaaatatgcaggacaaaaaatacagaacacctttgcacctagcctgtgctaatggacatacagatgttgtacttttcctaattgagcaacaatgcaaaataaatgtccgggatagtgaaaacaaatccccattgattaaggcagtacagtgtcaaaatgaggattgtgctactattcttctaaactttggtgcagacccagatctgagggatattcgttataatactgttcttcactatgctgtttgtggtcaaagtttgtcattagttgaaaaactgcttgaatacgaagctgatcttgaagcgaaaaataaggatgggtatactccactattagttgccgttattaacaataatccaaaaatggtaaaatttcttctggagaaaggggctgatgtgaatgcttcagataattatcaaagaacagcccttattcttgctgtcagtggtgaaccaccatgtttagtaaagcttcttcttcagcaaggtgtggaattatgttacgaaggtattgtggattcacagctgaggaatatgtttatttccatggttttactgcatacccacaattcactgcgagccatggaaagaagaaacatgctaaatagacaccttattcttggcactacatgtgactaaaggaagatatggaacccatttctacaatttctttgccgcttccttgaattggaaaaatgtactttgaaagaaccgttaagtgaactattataatatttttgctgactacccagttgaagaaaagtttgttaattggatgggattttttttttttcacgttagaagacatgaagaaattttaaaagataaacatctatattgtgaaccatcagctgaaaagataaatttgtgttcaatatataggcagaaaaaaatttgtgtcaaaatgttgaatggaataataatgaggaaactgtgttaggcatgtattaaaacatttaaataaaataaaaatacatttcagctacaaa

SEQ ID NO: 107796 - DNA, 436 bp, Homo sapiens
  Payload ID: 1164
  Gene Symbol: ANKRD7
  Gene Name: ankyrin repeat domain 7
  ENST ID: ENST00000486422
  CDS Start-End: 125-436
atttccactttcgtcaggtactggagagggctgccggccggatgccagggcagaggggcagggcggacggctaggagttcaagaaacatcctggtctgagggaaaggctgcagcctgcaccgccatgaataagcttttcagcttctggaagaggaagaatgagacccgcagccagggctacaaccttcgagaaaaggatttaaagaaacttcacagagctgcttcagtcggggatttgaagaagctgaaggaataccttcagatcaagaaatatgatgtaaatatgcaggacaaaaaatacagtgttgtccaatcttctagatggcttttatcctacaccactccgctgaatgactttataagaacacctttgcacctagcctgtgctaatggacatacagatgttgtacttttcctaattgagcaacaatgcaaa

SEQ ID NO: 107797 - DNA, 1061 bp, Homo sapiens
  Payload ID: 1164
  Gene Symbol: ANKRD7
  Gene Name: ankyrin repeat domain 7
  ENST ID: ENST00000622000
  CDS Start-End: 237-689
tttaaagaaacttcacagagctgcttcagtcggggatttgaagaagctgaaggaataccttcagatcaagaaatatgatgtaaatatgcaggacaaaaaatacagaacacctttgcacctagcctgtgctaatggacatacagatgttgtacttttcctaattgagcaacaatgcaaaataaatgtccgggatagtgaaaacaaatccccattgattaaggcagtacagtgtcaaaatgaggattgtgactattcttctaaactttggtgcagacccagatctgagggatattcgttataatactgttcttcactatgctgtttgtggtcaaagtttgtcattagttgaaaaactgcttgaatacgaagctgatcttgaagcgaaaaataaggatgggtatactccactattagttgccgttattaacaataatccaaaaatggtaaaatttcttctggagaaaggggctgatgtgaatgcttcagataattatcaaagaacagcccttattcttgctgtcagtggtgaaccaccatgtttagtaaagcttcttcttcagcaaggtgtggaattatgttacgaaggtattgtggattcacagctgaggaatatgtttatttccatggttttactgcatagatacccacaattcactgcgagccatggaaagaagaaacatgctaaatagacaccttattcttggcactacatgtgactaaaggaagatatggaacccatttctacaatttctttgccgcttccttgaattggaaaaatgtactttgaaagaaccgttaagtgaactattataatatttttgctgactacccagttgaagaaaagtttgttaattggatgggattttttttttttcacgttagaagacatgaagaaattttaaaagataaacatctatattgtgaaccatcagctgaaaagataaatttgtgttcaatatataggcagaaaaaaatttgtgtcaaaatgttgaatggaataataatgaggaaactgtgttaggcatgtattaaaacatttaaataaaataaaaatacatttc

SEQ ID NO: 107798 - DNA, 744 bp, Homo sapiens
  Payload ID: 1164
  Gene Symbol: ANKRD7
  Gene Name: ankyrin repeat domain 7
  ENST ID: ENST00000477532
  CDS Start-End: 470-718
ggtctttgctaggtctggaggtagagcagatgctgaggcgttcaaaggaaggcggtgcctgtggacaagcaggcttgcacaggatctggcccgtgccgaccagggcgccaggaccctgaaagtctcgtcccaaacacctttgcacctagcctgtgctaatggacatacagatgttgtacttttcctaattgagcaacaatgcaaaataaatgtccgggatagtgaaaacaaatccccattgattaaggcagtacagtgtcaaaatgaggattgtgctactattcttctaaactttggtgcagacccagatctgagggatattcgttataatactgttcttcactatgctgtttgtggtcaaagtttgtcattagttgaaaaactgcttgaatacgaagctgatcttgaagcgaaaaataaggatgggtatactccactattagttgccgttattaacaataatccaaaaatggtaaaatttcttctggagaaaggggctgatgtgaatgcttcagataattatcaaagaacagcccttattcttgctgtcagtggtgaaccaccatgtttagtaaagcttcttcttcagcaaggtgtggaattatgttacgaaggtattgtggattcacagctgaggaatatgtttatttccatggttttactgcatagatacccacaattcactgcgagccatggaaagaagaaacatgctaaatagacaccttattcttggcactacatgtg

SEQ ID NO: 107799 - DNA, 6727 bp, Homo sapiens
  Payload ID: 1165
  Gene Symbol: ANKRD9
  Gene Name: ankyrin repeat domain 9
  Uniprot ID: Q96BM1
  ENST ID: ENST00000286918
  CDS Start-End: 598-1551
gacggtcccgctgtcctgcctggccggggccgcactgcgccgcccgccgcccgccgcccgccgcccgccgccggcgacggcaccgccgccctgcgatccggccgcggcggctcagagcgcggctgcggcgggcgcgggcggcggtggctccctcccgtgcgtccgtcgtgggacctttgcccgctcgcccgcgggggacagcgcgcgctccggtccgcggcaggggcggggacgcccggcctgtggcccccgcgccccccatggcctggctctgccgtggcttgctgaccttggagaattggagaagcttgtgccctgctggaaagtgggatggcagtacccgcttcatctagtagtcggggagatcaagagaggtatgggacctgaagaggatggcagactgtgcagtgcggtgcacaccggtctccaggttgttttcaccctcctatctcctcccaggagctaacgtataaagctgaggctcggccagggactgtgatatacccacatccccggaactaggtgatcgcggtgcaggaaccaggtgtgccttcgcgggatccatgccttgaggcccaggaacgccccgccgccagcatgccgtgggacgcgcggcggcctgggggtggcgcggacggcgggcccgaggcctcgggcgcggcgcgctcgcgagcgcagaagcagtgccgcaagtcgtcgttcgccttctaccaggcggtgcgcgacctgctacccgtgtggctgctggaggatatgcgcgccagcgaggccttccactgggacgagcgcgggcgcgccgccgcctactcgccctctgaggcgctgctctacgcgctcgtgcacgaccaccaagcgtacgcgcattacctgctggccacgttcccgcggcgcgcgctcgcaccgcccagtgccggcttccgctgctgcgcggctcccgggccgcacgtggcgctggcagtgcgctacaaccgcgtgggcattctgcgccgcatcctgcgcaccttgcgcgacttcccggccgaggagcgggcgcgcgtgctggaccggcgtggctgcagccgcgtggagggcggtggcacgtcgctgcacgtggcctgtgagctggcgcgccccgagtgcctcttcctgctgctgggccacggcgcctcgcccggtctgcgggacggcggcggcctcacgcctctcgagctgctgctgcgccagctgggccgcgacgccggggccactccctccgccgccggagcccccgcctcagctcccggggagccgcgccagcgccgcctgctgctgctggacctcctggcgctgtacacccccgtgggtgccgccggctcggcccgccaggagctgctgggcgaccggccgcgctggcagcggctgctgggtgaggacaagttccagtggctggcgggcctggcgccgccctcgctcttcgcgcgcgccatgcaggtgctggtcaccgccatctctccaggccgcttccccgaggccctggacgagctgccgctgcccccattcctgcagccgttggacctcactggcaaaggctaggcccggagcaccctaggcgctggattttgggacaaaactatttttcagagcgttgtaccggcactttatatatattgatctctgtacggcacaatctctgcctcatctgtcgcatgcactgggggctgggcttggatggtcaggtgagttccaagtggcaggttttctgggtgcagctgggctcgggccttcagctcgctgtccagcccctgaagggagtgaggactaacctcccaccttgatctagagcctcggacaggtgtgcgtcccagatgggtgacagctgagtgccgcaggagctcggtaggtgcaggggtggggactggcatgtccaagcagcaggacagcgtataaaaaggcctggaagccaagagaacgagctctgcagcgtagggttctcacgggaggtcctgtgcggtcagccttttgcaccctgtggactccgggccagggagggcacacagggctggcaggcccgcggtggctggtgttgaggcatgaacaaattgtaccgggtatcccccaccccactctgaccaccagttcctccttggatatcactccccctgacaggcagcccacccaggcctggatttgtccctgtctcccccttttgcttttcccccatgactaatgggcaccaggtcttgctgctcctgcttctcacctctgcagtggcagcaggcccctggccccaggtgcatgccggtcagtggggttggatgtgccttcctccaggcctgccctctgtccaagcccggagtgggcttggtgggctccctggtggcccccagtgggtgccaggtggtgcccggggttattgaggggtggttgtatcactgtagggacaggcttcttgccccagcctggagagctgttttcttcaggaaggttctggagatggagacttgtttgcgaattcaccacaactccaggctgggaggctgggtctccgctctcagagccgagacaccagggaggatagccaggctgccctgcctgggaattctgctgggccgtcaaattcaacccgcaccaacgtgggcaggagggccacagtgtcctgccaggagcagagggctgaaggtctgcaggaggaagaaccactatcctggtggggggcacctgctgcccaccctgcccccagcgtgcctggggggagcacacctgggcatggaggagtccagggtgctgggccacacaagagaggtgggggagaggcctggacagtaggaagatcttgcccagggtcctggatccgccactctgggggtgaccttggacaaacctctgccttggccctcagtctccccatcaaggtttttccattcaggaggttttgggccatcttcagccaccctaccagccctgaaaaggatgtgactcctgtttctgggaagtgtgtggtgtgttaggtgggcctacagccctggttgtggggagggaaggatggagagacagcacagtgacagagcccagactgcaggctggagtgagggttccacttccccgctgctgtgtgtcctggaccagtgcctctgaaccttggcacttggggcagtggatattaacatctttccaagcccaattcttggggcatcagggcctccggtcctctgggaggtggcaggtcctcagattggagatgccatgggggggggaggtgcctctcctttggagggtatggaagtggagacaggagtggcctggcgcagctgccgtggttcttaggggctgggcccggggagcccatggggcttgtgcctagaaagcctgggctcctcactggggtctagatgtgcagacttcatgtctccccagctccagctctgttctctataggtcagcctccacaatgccagaggcccagggctagccccctccacgtccctcctagatctacagctgcccctttgatgacagcgccattgagtcccctgggctgggggggtcatgcaggggtgaggcagctgcctgccgccggtactcattgcctggccaggcaggacacaggctggcgggcactgagagtgggccccacgaaatccattgtcaggttaccaggatgaagaacccaggctggtcgtggagtgcagggcggggcctgccggaagaattatgggcactgcagcaggagggcagcctgggccattagctcctgatgtcatcgatttgggtgaggggacagggaagtcagaggaagctggccagtggctctcacgaagacttacagcagcggagtggtgcctgattcctagtacagctgctcccactgagtctccagggatctgtggttcaggaccccctgcaaccccctcccagacccctgtactggtgggaggagaggacctagaggaaaggtgctgggcagataagcagccgagggaggccctgggtttagcttatcagtcttctgggccctcctgccccaggaagggcagcgaggaccatggtgttgcccctgtcatcgttatcgtcctggccatgagcttgcaggactgggagggccggagtcagccaggcagacggcagcacagcatttgcctgttggcaggtggccttggtggcttcccaaaggcaatcgctccacgcagaacaaaactcacttttttggggggtgaagcaccttggttcatttgtttagttcgttaattccagcagtctgtttctaagggaaacatggctgcagccggtcctgcccctccacccacccaccaggtgcccagtgttcccaagggccccgaatcccaaccttattcaggcgtcagcatctctgcaccccaaatgcctgttagggaggatagtgaaggctgagccctcctgggctcatcaaaagccagcagtgagagaacacccccatctctctgaggtgaccttgtagggcagtccgtgctgtctggctggcctgggtgaggtgggcagggaccaaggcctggcgcctgggcctcgctggccttgctctgcgtgctgacttcatcctgatagtaccttgattttcctactgtgacttccccttctgtcgacttcctcaccaactttaaaattccgtattgagagcagtttcctaagttacctcaaatcctattcagaagaaggttcttcctggaagttgggagggcggaaaacaagtttagtcacagaagactactccatgtttgagcttctgtttcaagggaagtgagtaactgccggaggagccctgcccctctgcagtgtgtggtgttgccctgatacttttcagattgaggtgttacttacatgtaataaaatgcacagacttaagtgtatactttgatgagttctgatgaatgtctacatgtgtgtaatcaccactgcaatcaagatggaaggaaaggctgggcgcggtggctcacacctgtaatcccagcactttgggaggccaaggtgggtggatcatgaggtcaggagttcgagaccagcctgaccaacatgatgaaaccccgtctctactaaaaataaaaaaattagccaggcgtggtggcaggcacctgtactcccagctactcaggaggctgaggcaggagaattgcttgaacccaggaggcggaggttgcagtgagccaagattgcgccattgcactccagcctgggcgacagagcaagactccatctcaaaaaaaaaaaaaaaaaagatggaaagacagatttctattggtgattcttaaaagtaatttatttatttatgtatttatttatttatttgagatgtagtcttgctctgtcatccagactggagtgcaatggtgtggtctcagctcactgtaacttccgcctcctgggttcaagcgattctcctgcctcagcctctggagtagctgggattacaggcgctggccaccacgcccggctaatttttgtatttgtagtagagactgggtttcagcatgttggccaggcaggtctcgaactcctgaccttgtgatccgcccgcctcagcctcccaaagtgctggggttacaagtgtgagccactgcgcctggctcttaaaagtaatttctttctgcttataaaattcatgttcactgtagaacactggggattgagtagagaggtccggccacgatgcagggaaacactgtctcaagcgccccaccgccccacatggtccccagagacagggcccctaagcgctcacgtacaagtaaaggcgctgactgagtgcgtcatctgcacgcatacaagcactgctagcattctggcatatgtttctttcagcttttttctgtgcagatatatattacatttttttctgtgtatatttatatatatatgaaaccagatcagttacacaatttagtatttttttaaccttaatgtagtataagcatttcccccattgtactttgtaaatatgatttttaagaagtcattggtgtctactttgtgatatttgactcaaccagccttgataacaaagagtagttagagacaactgaatttttaaaatgtaaatctgctttatttttggaataaataatacatttacatggctggaaattcaaaggatacaaaaaggcatatactccaggcaaccactatgaccagctgctgatcacaagtagagaacttgtttcttttcacccctcttgctcctccccggagttatgaaaaatttcaaacctgccaaaagtttgaagtttacaacaaataccctccaacgtttgggttgtctccctcccccttctctccctttctccctctgatttcttacagaaccacgctttcatgaccatgcccgggaacttcacgctggcgcggtgaggtcctgcgcctccgcttcctgcacacacgtgcttcttaatagctgcaggctatttcatgagaggaatttgctcacgttaacatggctgttcccaaatgccaggctgttttaagtgtttcctaattataaacaggctgtgctgtttcccttgacctaggacttgttcttgaggacagaagtggaggtggcgagatgcaaggcctacgtacggaccggcttccccagtagggcggcgccaatggggggctcccaagctgctcccatctcacctctgcttccggggtgctgggggtttgggccagtgttccttctgcttttgtgaagggcccttacactcgactcgaagtgctcctcctattggtttttaataaatatatttatggaaagctttat

SEQ ID NO: 107800 - DNA, 1502 bp, Homo sapiens
  Payload ID: 1165
  Gene Symbol: ANKRD9
  Gene Name: ankyrin repeat domain 9
  ENST ID: ENST00000559404
  CDS Start-End: 724-1502
ggcgccccacgcgtgccggcacagggcatatctggggcccggaggcccaggcttggggaaggggctccagtcacggtgttgcccacgggccacagcctacccgcaccgcgccgctctctttaactcagttactgccagtgatagtgacccagtcagtgtgtgtggacgcggcctgccttctgtcccaggccccttgtgaccaagggcttacccttgaaagaaggcagtagggaggttgggacggagccagaggtcagacgcctaggctcaggtcggggctggggactcagagggcagggtcagggcctaagctcgattgcctgtgggttgggggtccccaccaattctggaatgagcccaaactgagacgcaggggacctgagttctaggcctggctctgccgtggcttgctgaccttggagaattggagaagcttgtgccctgctggaaagtgggatggcagtacccgcttcatctagtagtcggggagatcaagagaggtatgggacctgaagaggatggcagactgtgcagtgcggtgcacaccggtctccaggttgttttcaccctcctatctcctcccaggagctaacgtataaagctgaggctcggccagggactgtgatatacccacatccccggaactaggtgatcgcggtgcaggaaccaggtgtgccttcgcgggatccatgccttgaggcccaggaacgccccgccgccagcatgccgtgggacgcgcggcggcctgggggtggcgcggacggcgggcccgaggcctcgggcgcggcgcgctcgcgagcgcagaagcagtgccgcaagtcgtcgttcgccttctaccaggcggtgcgcgacctgctacccgtgtggctgctggaggatatgcgcgccagcgaggccttccactgggacgagcgcgggcgcgccgccgcctactcgccctctgaggcgctgctctacgcgctcgtgcacgaccaccaagcgtacgcgcattacctgctggccacgttcccgcggcgcgcgctcgcaccgcccagtgccggcttccgctgctgcgcggctcccgggccgcacgtggcgctggcagtgcgctacaaccgcgtgggcattctgcgccgcatcctgcgcaccttgcgcgacttcccggccgaggagcgggcgcgcgtgctggaccggcgtggctgcagccgcgtggagggcggtggcacgtcgctgcacgtggcctgtgagctggcgcgccccgagtgcctcttcctgctgctgggccacggcgcctcgcccggtctgcgggacggcggcggcctcacgcctctcgagctgctgctgcgccagctgggccgcgacgccggggccactccctccgccgccggagcccccgcctcagctcccggggagccgcgccagcgccgcctgctgctgctggacctcctggcgctgtacacccccgtgggtgccgccggctcggcccgccaggagctgctgggcgaccggccgcgctggcagcg

SEQ ID NO: 107801 - DNA, 1413 bp, Homo sapiens
  Payload ID: 1165
  Gene Symbol: ANKRD9
  Gene Name: ankyrin repeat domain 9
  Uniprot ID: Q96BM1
  ENST ID: ENST00000560748
  CDS Start-End: 400-1353
cggcggcggacggtcccgctgtcctgcctggccggggccgcactgcgccgcccgccgcccgccgcccgccgcccgccgccggcgacggcaccgccgccctgcgatccggccgcggcggctcagagcgcggctgcggcgggcgcgggcggcggtggctccctcccgtgcgtccgtcgtgggacctttgcccgctcgcccgcgggggacagcgcgcgctccggtccgcggcaggggcggggacgcccggcctgtggcccccgcgccccccatgataaagctgaggctcggccagggactgtgatatacccacatccccggaactaggtgatcgcggtgcaggaaccaggtgtgccttcgcgggatccatgccttgaggcccaggaacgccccgccgccagcatgccgtgggacgcgcggcggcctgggggtggcgcggacggcgggcccgaggcctcgggcgcggcgcgctcgcgagcgcagaagcagtgccgcaagtcgtcgttcgccttctaccaggcggtgcgcgacctgctacccgtgtggctgctggaggatatgcgcgccagcgaggccttccactgggacgagcgcgggcgcgccgccgcctactcgccctctgaggcgctgctctacgcgctcgtgcacgaccaccaagcgtacgcgcattacctgctggccacgttcccgcggcgcgcgctcgcaccgcccagtgccggcttccgctgctgcgcggctcccgggccgcacgtggcgctggcagtgcgctacaaccgcgtgggcattctgcgccgcatcctgcgcaccttgcgcgacttcccggccgaggagcgggcgcgcgtgctggaccggcgtggctgcagccgcgtggagggcggtggcacgtcgctgcacgtggcctgtgagctggcgcgccccgagtgcctcttcctgctgctgggccacggcgcctcgcccggtctgcgggacggcggcggcctcacgcctctcgagctgctgctgcgccagctgggccgcgacgccggggccactccctccgccgccggagcccccgcctcagctcccggggagccgcgccagcgccgcctgctgctgctggacctcctggcgctgtacacccccgtgggtgccgccggctcggcccgccaggagctgctgggcgaccggccgcgctggcagcggctgctgggtgaggacaagttccagtggctggcgggcctggcgccgccctcgctcttcgcgcgcgccatgcaggtgctggtcaccgccatctctccaggccgcttccccgaggccctggacgagctgccgctgcccccattcctgcagccgttggacctcactggcaaaggctaggcccggagcaccctaggcgctggattttgggacaaaactatttttcagagcgttgtaccg

SEQ ID NO: 107802 - DNA, 620 bp, Homo sapiens
  Payload ID: 1165
  Gene Symbol: ANKRD9
  Gene Name: ankyrin repeat domain 9
  ENST ID: ENST00000557902
  CDS Start-End: 305-620
gggttgggggtccccaccaattctggaatgagcccaaactgagacgcaggggacctgagttctaggcctggctctgccgtggcttgctgaccttggagaattggagaagcttgtgccctgctggaaagtgggatggcagtacccgcttcatctagtagtcggggagatcaagagagataaagctgaggctcggccagggactgtgatatacccacatccccggaactaggtgatcgcggtgcaggaaccaggtgtgccttcgcgggatccatgccttgaggcccaggaacgccccgccgccagcatgccgtgggacgcgcggcggcctgggggtggcgcggacggcgggcccgaggcctcgggcgcggcgcgctcgcgagcgcagaagcagtgccgcaagtcgtcgttcgccttctaccaggcggtgcgcgacctgctacccgtgtggctgctggaggatatgcgcgccagcgaggccttccactgggacgagcgcgggcgcgccgccgcctactcgccctctgaggcgctgctctacgcgctcgtgcacgaccaccaagcgtacgcgcattacctgctggccacgttcccgcggcgcgcgctcgcaccgcccagtgccg

SEQ ID NO: 107803 - DNA, 1444 bp, Homo sapiens
  Payload ID: 1165
  Gene Symbol: ANKRD9
  Gene Name: ankyrin repeat domain 9
  Uniprot ID: Q96BM1
  ENST ID: ENST00000559651
  CDS Start-End: 397-1350
ggagaattggagaagcttgtgccctgctggaaagtgggatggcagtacccgcttcatctagtagtcggggagatcaagagaggtatgggacctgaagaggatggcagactgtgcagtgcggtgcacaccggtctccaggttgttttcaccctcctatctcctcccaggagctaacgtgtaagcaaacatgtttggatagagggctggtgccacgccccaggctcaccccgcccgcacagccgtcgtccacccctcccctttcttacagataaagctgaggctcggccagggactgtgatatacccacatccccggaactaggtgatcgcggtgcaggaaccaggtgtgccttcgcgggatccatgccttgaggcccaggaacgccccgccgccagcatgccgtgggacgcgcggcggcctgggggtggcgcggacggcgggcccgaggcctcgggcgcggcgcgctcgcgagcgcagaagcagtgccgcaagtcgtcgttcgccttctaccaggcggtgcgcgacctgctacccgtgtggctgctggaggatatgcgcgccagcgaggccttccactgggacgagcgcgggcgcgccgccgcctactcgccctctgaggcgctgctctacgcgctcgtgcacgaccaccaagcgtacgcgcattacctgctggccacgttcccgcggcgcgcgctcgcaccgcccagtgccggcttccgctgctgcgcggctcccgggccgcacgtggcgctggcagtgcgctacaaccgcgtgggcattctgcgccgcatcctgcgcaccttgcgcgacttcccggccgaggagcgggcgcgcgtgctggaccggcgtggctgcagccgcgtggagggcggtggcacgtcgctgcacgtggcctgtgagctggcgcgccccgagtgcctcttcctgctgctgggccacggcgcctcgcccggtctgcgggacggcggcggcctcacgcctctcgagctgctgctgcgccagctgggccgcgacgccggggccactccctccgccgccggagcccccgcctcagctcccggggagccgcgccagcgccgcctgctgctgctggacctcctggcgctgtacacccccgtgggtgccgccggctcggcccgccaggagctgctgggcgaccggccgcgctggcagcggctgctgggtgaggacaagttccagtggctggcgggcctggcgccgccctcgctcttcgcgcgcgccatgcaggtgctggtcaccgccatctctccaggccgcttccccgaggccctggacgagctgccgctgcccccattcctgcagccgttggacctcactggcaaaggctaggcccggagcaccctaggcgctggattttgggacaaaactatttttcagagcgttgtaccggcactttatatatattgatctctgtacggcacaa

SEQ ID NO: 107804 - DNA, 2063 bp, Homo sapiens
  Payload ID: 1166
  Gene Symbol: ANKRA2
  Gene Name: ankyrin repeat, family A (RFXANK-like), 2
  Uniprot ID: Q9H9E1
  ENST ID: ENST00000296785
  CDS Start-End: 660-1601
ggcggggcgatctggagtaggaggtgtgaccggagggcgaaattggggcttcctctgctctggtgacccagaaccgtcaactgaaatgaccctgtctgtgtagtactccggcaggatgggcctcggagcgtaaaggcggcaaaaacaaaaatattaaaaaaaaggagagagggacaaaaaaaagaaaacccgaaagtttcagctgcattgctgcggaacgttttttagccagaaggcgaaagaagaaatcggaagtgacgtcgcggccaaaacaagcccgggcttggaggcctgtactgaagctggcctcagatgggaaggcccgactcgctgtctgctgtcgtcggtggtcgcgagaccttgcactctcaccgggtcggcctccagcccctgtgcccgggatccgctcgccgcggatgagcgagagtttcttcctgggacttttcgggcacagctggccggtggcgacagaacggactttctttcctgcaagagtctcccctccagcgggagacagcgggctcctgtctcgggacgctgggacacctgtcgcctatttttaaatatccagattccaagaacacactggatactgctcttacaaaaccaagaggaaatcatgaagaaatgttttagttattgaaactacagttgaaatcatggatacatcaacaaatctggatattggagcccagcttatcgtggaagagtgtcccagcacttatagcctaactggcatgccagacattaaaatagaacatccactggacccaaattcagaagaagggtcagctcagggtgttgccatgggaatgaaattcatattgcctaaccgatttgatatgaatgtgtgttctcgatttgtgaagtccttaaatgaagaagatagtaaaaatattcaagatcaggttaactctgacctggaggtggcatctgtcctatttaaagctgaatgcaatatccatacatctccttctccgggaattcaagtaaggcatgtctacaccccctctacaacaaagcatttctcacccataaaacagtcaaccactttaaccaacaaacacagaggaaatgaggtctctaccacacctctgttagcaaattctttgtctgttcaccagttggctgctcagggagagatgctctatctggctactcgtatcgaacaagaaaatgttatcaatcacacggatgaagaaggatttactcctctgatgtgggctgcagcacacgggcaaatagctgtggtagagttcctacttcagaatggtgctgatccccaacttttaggaaaaggtcgagaaagtgcactgtcgttggcctgtagtaaaggctacacagatattgtcaaaatgctgcttgattgtggagttgatgtaaatgaatatgattggaatggaggaacacctctgctttatgctgtacatggaaatcatgtgaaatgtgtaaagatgctcttagaaagtggggctgatccaacaattgaaactgactctggatataattctatggatctagctgtagccctaggctatagaagtgttcaacaggttattgagtcacatttgttgaagctgcttcaaaatatcaaggagtagacacagtcatcagaaaatgtctgcccttttgtttacttcttggtccttataaatgatagttttgtttacttataaatttttacctcagttgcaatatttactggtttttagtaggttttaataaatatttctctgagtaattcactggtttataataaatgtaatactctttttataactatgttttactgtatatttaaaattataaattaatgttttcgtggcatgtaaatttttatggtacagatagttatcatcagtctttgtatcaagtgctgtaatttgacattttcagaaattattctaccctagtcatcttcactcgtgtattaagtcattcactttatatagggtttgctataaatccctagaaaaaaattgttcttattgttgaataaaaaagtgcacagtgtgattgtttacaaaatgatattataaataaataaaatacttcttctgtca

SEQ ID NO: 107805 - DNA, 902 bp, Homo sapiens
  Payload ID: 1166
  Gene Symbol: ANKRA2
  Gene Name: ankyrin repeat, family A (RFXANK-like), 2
  ENST ID: ENST00000504641
  CDS Start-End: 370-902
cctgtactgaagctggcctcagatgggaaggcccgactcgctgtctgctgtcgtcggtggtcgcgagaccttgcactctcaccgggtcggcctccagcccctgtgcccgggatccgctcgccgcggatgagcgagagtttcttcctgggacttttcgggcacagctggccggtggcgacagaacggactttctttcctgcaagagtctcccctccagcgggagacagcgggctcctgtctcgggacgctgggacacctgtcgcctatttttaaatatccagattccaagaacacactggatactgctcttacaaaaccaagaggaaatcatgaagaaatgttttagttattgaaactacagttgaaatcatggatacatcaacaaatctggatattggagcccagcttatcgtggaagagtgtcccagcacttatagcctaactggcatgccagacattaaaatagaacatccactggacccaaattcagaagaagggtcagctcagggtgttgccatgggaatgaaattcatattgcctaaccgatttgatatgaatgtgtgttctcgatttgtgaagtccttaaatgaagaagatagtaaaaatattcaagatcaggttaactctgacctggaggtggcatctgtcctatttaaagctttgtctgttcaccagttggctgctcagggagagatgctctatctggctactcgtatcgaacaagaaaatgttatcaatcacacggatgaagaaggatttactcctctgatgtgggctgcagcacacgggcaaatagctgtggtagagttcctacttcagaatggtgctgatccccaacttttaggaaaaggtcgagaaagtgcactgtcgttggcctgtagtaaaggctacacagatattgt

SEQ ID NO: 107806 - DNA, 1865 bp, Homo sapiens
  Payload ID: 1167
  Gene Symbol: ASZ1
  Gene Name: ankyrin repeat, SAM and basic leucine zipper domain containing 1
  Uniprot ID: Q8WWH4
  ENST ID: ENST00000284629
  CDS Start-End: 64-1491
ggtgcgcatgcgcccggagagctgaagggcgcgcggtgccgacagggagcttccttggctggcatggcggcgagcgcgctgcgaggcctgccagtggctggcggaggcgagagtagcgagagcgaggatgatggctgggagattgggtatctcgaccggacgtctcagaaattgaaaaggctattacccattgaagaaaagaaagaaaaatttaagaaagcaatgaccatcggagatgtttcattggtccaggagctcctagattctggcattagtgtagattccaactttcagtatggatggactccccttatgtatgctgctagtgttgccaatgcagagctggttcgggtccttttggacagaggtgctaatgcaagctttgagaaggataagcaaagtattttgataactgcatgttctgctcatggctcagaggaacagatcttgaagtgtgtagaactactactttcaagaaatgctgatccaaatgttgcttgtaggagacttatgaccccaatcatgtatgctgctcgagatggtcacacccaggttgttgctctccttgttgctcatggagcagaagttaatacccaggatgagaatggttacactgctttaacgtgggcagcacgtcagggtcataaaaatatagttttgaagttgcttgaacttggagctaataaaatgctacaaaccaaagatggaaagatgccaagtgagattgcaaaaagaaacaaacatcatgagatcttcaacttactttcttttactttaaatccattggaaggaaaacttcaacagctaactaaagaagacactatttgtaaaatattgacaacagattctgatagagaaaaagatcacatttttagttcatatacagcatttggagatctggaagtatttttacatggtcttggacttgaacatatgacagatttactaaaggaaagggatataacgttaagacatcttttgaccatgagggaagatgaatttacaaagaatggaattaccagtaaagaccagcagaaaattctggctgctcttaaagaactacaggtagaagagatacaatttggagagctatctgaagagacaaagttggaaatcagtggtgatgagttcctcaactttcttctcaaattaaataaacagtgtggccatttaataacagctgtacagaatgttattactgagttacctgtaaattctcaaaagataacactggaatgggcttctccccagaattttacttcagtttgtgaagaattggttaataatgttgaagatttgagtgaaaaggtctgcaaactaaaagacctaattcaaaagttgcaaaatgaacgggaaaatgatccaactcatatacaattaagggaagaagtatctacatggaatagtagaattttgaagaggacagctattaccatatgcggattcggttttcttcttttcatttgcaagctaactttccagaggaaataatccaaatatttgttttaagttatatatacacatcttattgaaccatccaaaaatcattgcttttaactgtttgcagcacaatataactttacattctttgccaatattccataggaaaaattttgacaatgtggagtttttttttaaaaagtggtttgttactttgacttataaatacaatttgttatgtttatgttaattgtgattaggtagtaaagtataagtaattttttggtttgatcgtatctaaatcacattcaaaattaaagttatatctaatatctttgacattttttaaagtgtgttcatttgtcagtgaatcgtacaggatttgtaaagtgttcataaattgagctttcttttgtttctttttt

SEQ ID NO: 107807 - DNA, 1423 bp, Homo sapiens
  Payload ID: 1167
  Gene Symbol: ASZ1
  Gene Name: ankyrin repeat, SAM and basic leucine zipper domain containing 1
  ENST ID: ENST00000450714
  CDS Start-End: 48-494
gagagctgaagggcgcgcggtgccgacagggagcttccttggctggcatggcggcgagcgcgctgcgaggcctgccagtggctggcggaggcgagagtagcgagagcgaggatgatggctgggagattgggtatctcgaccggacgtctcagaaattgaaaaggctattacccattgaagaaaagaaagaaaaatttaagaaagcaatgaccatcggagatgtttcattggtccaggagctcctagattctggcattagtgtagattccaactttcagtatggatggactccccttatgtatgctgctagtgttgccaatgcagagctggttcgggtccttttggacagaggtgctaatgcaagctttgagaaggataagcaaagtattttgataactgcatgttctgctcatggctcagaggaacagatcttgaagtgtgtagaactactactttcaagaaatgctgatccaaatgttgcttgtaggctttaacgtgggcagcacgtcagggtcataaaaatatagttttgaagttgcttgaacttggagctaataaaatgctacaaaccaaagatggaaagatgccaagtgagattgcaaaaagaaacaaacatcatgagatcttcaacttactttcttttactttaaatccattggaaggaaaacttcaacagctaactaaagaagacactatttgtaaaatattgacaacagattctgatagagaaaaagatcacatttttagttcatatacagcatttggagatctggaagtatttttacatggtcttggacttgaacatatgacagatttactaaaggaaagggatataacgttaagacatcttttgaccatgagggaagatgaatttacaaagaatggaattaccagtaaagaccagcagaaaattctggctgctcttaaagaactacaggtagaagagatacaatttggagagctatctgaagagacaaagttggaaatcagtggtgatgagttcctcaactttcttctcaaattaaataaacagtgtggccatttaataacagctgtacagaatgttattactgagttacctgtaaattctcaaaagataacactggaatgggcttctccccagaattttacttcagtttgtgaagaattggttaataatgttgaagatttgagtgaaaaggtctgcaaactaaaagacctaattcaaaagttgcaaaatgaacgggaaaatgatccaactcatatacaattaagggaagaagtatctacatggaatagtagaattttgaagaggacagctattaccatatgcggattcggttttcttcttttcatttgcaagctaactttccagaggaaataatccaaatatttgttttaagttatatatacacatcttattgaaccatccaaaaatcattgc

SEQ ID NO: 107808 - DNA, 242 bp, Homo sapiens
  Payload ID: 1167
  Gene Symbol: ASZ1
  Gene Name: ankyrin repeat, SAM and basic leucine zipper domain containing 1
  ENST ID: ENST00000428663
  CDS Start-End: 109-242
tctacacttcatagcggggaagtgttttgatggtctgaagcttctaaatctaagaaattgaaaaggctattacccattgaagaaaagaaagaaaaatttaagaaagcaatgaccatcggagatgtttcattggtccaggagctcctagattctggcattagtgtagattccaactttcagtatggatggactccccttatgtatgctgctagtgttgccaatgcagagctggttcgggtcct

SEQ ID NO: 107809 - DNA, 2426 bp, Homo sapiens
  Payload ID: 1168
  Gene Symbol: ANKFN1
  Gene Name: ankyrin-repeat and fibronectin type III domain containing 1
  Uniprot ID: Q8N957
  ENST ID: ENST00000318698
  CDS Start-End: 36-2327
ctctttcaactcaagagctcagtcctgtgtctctcatggaggcgtctctaaccaggaggctactctttaaagacaggcattttacttgcagcaaaataataggaaggagattcgcttgctttgcacagaggctgagccacaggagaaagcaaagccaatgtgatttattgaatgaaagcactggacaattaccaacaacttgttcctctgctgcctcgaacagcataaactggaattgtcgtgtgaaaatgacgcaacaaatgcaaaatttacatctctgtcagtcaaaaaaacatagtgctccctcatctcccaacgcagccaaacgcctgtacaggaacctctctgagaaactgaaagggagccactcttccttcgatgaggcctattttaggacaagaactgatcggctgagtctcaggaagacctcggtgaatttccagggcaatgaagccatgtttgaggcagtcgaacagcaggacatggatgctgtgcagatcctcctgtatcagtacacaccagaagaacttgacctcaacacacctaacagcgagggcttgacacccctggatattgccatcatgaccaacaatgtgcccattgcaaggattcttctgaggacaggggcccgagaaagtccacactttgtcagcctggaaagccgagcaatgcacctcaacacactggtccaggaagcccaggagagggtgagtgaactgtctgcccaggtggagaatgaaggattcactctggacaacacagagaaagagaagcagctgaaagcttgggagtggaggtatcggctctacagacgcatgaaaacaggctttgagcatgccagagcccctgagatgccaaccaatgtctgtctcatggtaaccagcagcacatcactcactgtcagcttccaagagcctcttagcgtcaatgcagctgtagtaaccaggtataaagtggaatggagtatgtccgaagacttttctcctttggctggagaaatcatcatggataatctgcagactctgagatgcacaatcacaggacttacaatgggccaacagtattttgttcaagtctcggcttacaatatgaaaggatggggacctgctcagaccacgacaccggcatgtgcctctccttctaactggaaagactatgacgacagagagcccagacacaagggacagagtgaagttttggaaggtctgctgcagcaggtccgagcccttcatcagcattacagttgccgggaaagcacaaaattacaaaccacaggccgcaagcagtcagtctcaagaagcctgaaacacctgttccattcctcgaacaagtttgtgaagaccttaaaacggggactctacatagccgttatattttattacaaagacaatatcttagtcaccaatgaagatcaagtaccaattgttgaaatagatgactctcacaccagttctattacacaagattttctgtggttcacgaagctgtcttgtatgtgggaagatataaggtggctgaggcaaagcataccaatatcctcatcctcatccacagtgctgcaaactcggcagaagatgctcgcagcaacagcacagctacagaatttacttgggacacacaacttgggaagagtttactatgagcccattaaagatcgacatggaaacatactcatagtcaccatcagggaggtggagatgctttattcattttttaatggcaaatggatgcagatctcaaagctgcaaagccagagaaagtctctatcaacacctgaggagccaacagctttagacattctactgataaccatccaggatattctatcctatcacaaaaggagtcatcagcgtctctttcctggattatatctgggttacctaaagctctgtagctctgtggatcaaatcaaagttcttgttacccaaaagttgcccaacattctctgccacgtgaagatccgtgaaaacaataatatttctagagaggaatgggaatggatccaaaagctttctggctctgaatctatggaaagtgtggatcatacttctgactgccccatgcaattgttcttctacgagctccagatggcagtgaaagctctccttcagcagatcaatatacctctacaccaggcaaggaacttccgcctctacacacaggaggtgttggaaatgggtcacaatgtgtcctttcttctcctgctccctgcctcagacgacgtctgtacagccccaggacagaataatccttacaccccacactcagggtttcttaacctccctcttcagatgtttgaacttggtatagtagcttgtttcacctagaaatattaacccagcctccttataataaaatcacaaagttatatctgttcccccttgtcccagtggagggtcaataaatcacatgatggctttggcaac

SEQ ID NO: 107810 - DNA, 3840 bp, Homo sapiens
  Payload ID: 1168
  Gene Symbol: ANKFN1
  Gene Name: ankyrin-repeat and fibronectin type III domain containing 1
  ENST ID: ENST00000566473
  CDS Start-End: 1-3450
atggaggcgtctctaaccaggaggctactctttaaagacaggcattttacttgcagcaaaataataggaaggagattcgcttgctttgcacagaggctgagccacaggagaaagcaaagccaatgtgatttattgaatgaaagcactggacaattaccaacaacttgttcctctgctgcctcgaacagcataaactggaattgtcgtgtgaaaatgacgcaacaaatgcaaaatttacatctctgtcagtcaaaaaaacatagtgctccctcatctcccaacgcagccaaacgcctgtacaggaacctctctgagaaactgaaagggagccactcttccttcgatgaggcctattttaggacaagaactgatcggctgagtctcaggaagacctcggtgaatttccagggcaatgaagccatgtttgaggcagtcgaacagcaggacatggatgctgtgcagatcctcctgtatcagtacacaccagaagaacttgacctcaacacacctaacagcgagggcttgacacccctggatattgccatcatgaccaacaatgtgcccattgcaaggattcttctgaggacaggggcccgagaaagtccacactttgtcagcctggaaagccgagcaatgcacctcaacacactggtccaggaagcccaggagagggtgagtgaactgtctgcccaggtggagaatgaaggattcactctggacaacacagagaaagagaagcagctgaaagcttgggagtggaggtatcggctctacagacgcatgaaaacaggctttgagcatgccagagcccctgagatgccaaccaatgtctgtctcatggtaaccagcagcacatcactcactgtcagcttccaagagcctcttagcgtcaatgcagctgtagtaaccaggtataaagtggaatggagtatgtccgaagacttttctcctttggctggagaaatcatcatggataatctgcagactctgagatgcacaatcacaggacttacaatgggccaacagtattttgttcaagtctcggcttacaatatgaaaggatggggacctgctcagaccacgacaccggcatgtgcctctccttctaactggaaagactatgacgacagagagcccagacacaagggacagagtgaagttttggaaggtctgctgcagcaggtccgagcccttcatcagcattacagttgccgggaaagcacaaaattacaaaccacaggccgcaagcagtcagtctcaagaagcctgaaacacctgttccattcctcgaacaagtttgtgaagaccttaaaacggggactctacatagccgttatattttattacaaagacaatatcttagtcaccaatgaagatcaagtaccaattgttgaaatagatgactctcacaccagttctattacacaagattttctgtggttcacgaagctgtcttgtatgtgggaagatataaggtggctgaggcaaagcataccaatatcctcatcctcatccacagtgctgcaaactcggcagaagatgctcgcagcaacagcacagctacagaatttacttgggacacacaacttgggaagagtttactatgagcccattaaagatcgacatggaaacatactcatagtcaccatcagggaggtggagatgctttattcattttttaatggcaaatggatgcagatctcaaagctgcaaagccagagaaagtctctatcaacacctgaggagccaacagctttagacattctactgataaccatccaggatattctatcctatcacaaaaggagtcatcagcgtctctttcctggattatatctgggttacctaaagctctgtagctctgtggatcaaatcaaagttcttgttacccaaaagttgcccaacattctctgccacgtgaagatccgtgaaaacaataatatttctagagaggaatgggaatggatccaaaagctttctggctctgaatctatggaaagtgtggatcatacttctgactgccccatgcaattgttcttctacgagctccagatggcagtgaaagctctccttcagcagatcaatatacctctacaccaggcaaggaacttccgcctctacacacaggaggtgttggaaatgggtcacaatgtgtcctttcttctcctgctccctgcctcagacgacgtctgtacagccccaggacagaataatccttacaccccacactcagggtttcttaacctccctcttcagatgtttgaacttgttcatttttgcagctacagagagaaatttattagtctgtattgccgcctttctgctgttgtggagctggattctctgaacacccaacagtccctcagggaagcaatctcagacagcgaggttgcagctgccaaacaaagacaccagcaagttttagatttcattcagcaaatagatgaagtctggcgtgaaatgagatggatcatggatgctctacagtatgcaagatacaaacaaccagtttctggcttgcccatcactaagctgatagacccctcagatgagcagagcctaaagaagatcaattctacatcatcatcacatatagactgtcttccatccccacccccatccccagagatgcacagaagaaagacagtgagtgattcacagccctgctctgatgaagaagcctgctcagaagtcttcctccccaccaacagtgactacgactccagcgatgccctgagccccagagacctggacctggtctacctatcatctcacgacattgcgcagcagacccttagcggcctaagcggcagcgcccccgacgtcctgcaagtgcacgacgtgaaaacccctctggggccgggccaggatccccagggcgagggcccaaatcccgatcactcatgtgccgagtttctccatagcctgaccctcacggggttcacacccaagaaccacgccaagactgtgtccggtgggcggcccccgctaggcttcctgggaaagcggaagccaggcaagcacccccactatggcggcttcagccgccatcatcgctggttgcgcatccacagcgagacccagtcgctatcgctctctgagggcatttatacacagcacctgtcccaggcctgtggtctggcccaggagcccaaggaggccaagcgggccggccctgcccttgatgatcccaggggcctaactctggcccacgctgccagccttcctgaggagcggaacagcagtctccaggacgcgaggccttccgtccgccgcctctacgtggagccctacgcagcggccgtggtggcccaggacgaaaaaccatgggcaagcttgagcccgccctctggaggccgcatcaccctgcccagccccactggccccgatgtgagtcaggagggccccaccgcctctcccatgtcagaaatactcagcagcatgctttagggaggcccatcccggctgtccacccctccatggctgctacctgcgttttacatcacccttacccccatcctgccccactgtgtacccactcattttcaagcgttttgaatgttataaatacaaaggttacaagttcaaggtcctctttttttggaacagagtggtgggtggaggccagagttgccagtgccattcccacttcagcctagaaagggcatgggggagttgtgtcaacatggaatacgacatacagtgactcaaacatgccaccctgttggtggcacctatgactgaagctggccatcccaaagagagaccctctgttctgcagctggttctgtaatctgacccctagtttagggctctttcatgaatttgtgattgatgaag

SEQ ID NO: 107811 - DNA, 665 bp, Homo sapiens
  Payload ID: 1168
  Gene Symbol: ANKFN1
  Gene Name: ankyrin-repeat and fibronectin type III domain containing 1
  ENST ID: ENST00000572945
  CDS Start-End: 147-665
atttcctgggctggccacagagccagatgcctgcagggttctctctttgccagcagctcttcaaagacttgtgagcccactcagccctccagagacactcttcactgcaaagcctcaggcagcctagccaggggaccctggagctgatgccacctggaatccctaccaagtgtgcaaagcagccacattctgggacagctggattggaggagggagcagaggctgagaggctactctttaaagacaggcattttacttgcagcaaaataataggaaggagattcgcttgctttgcacagaggctgagccacaggagaaagcaaagccaatgtgatttattgaatgaaagcactggacaattaccaacaacttgttcctctgctgcctcgaacagcataaactggaattgtcgtgtgaaaatgacgcaacaaatgcaaaatttacatctctgtcagtcaaaaaaacatagtgctccctcatctcccaacgcagccaaacgcctgtacaggaacctctctgagaaactgaaagggagccactcttccttcgatgaggcctattttaggacaagaactgatcggctgagtctcaggaagacctcggtgaatttccagggcaatgaagccatgtttgaggcagtcgaacagcaggacatggatgctgtg

SEQ ID NO: 107812 - DNA, 1509 bp, Homo sapiens
  Payload ID: 1169
  Gene Symbol: ANXA1
  Gene Name: annexin A1
  Uniprot ID: P04083
  ENST ID: ENST00000257497
  CDS Start-End: 183-1223
agctgagccatgtacttcaaacagaaggcagccaattactaacttctggttgctaggtgtggcttcctttaaaatcctataaaatcagaagcccaagtctccactgccagtgtgaaatcttcagagaagaatttctctttagttctttgcaagaaggtagagataaagacactttttcaaaaatggcaatggtatcagaattcctcaagcaggcctggtttattgaaaatgaagagcaggaatatgttcaaactgtgaagtcatccaaaggtggtcccggatcagcggtgagcccctatcctaccttcaatccatcctcggatgtcgctgccttgcataaggccataatggttaaaggtgtggatgaagcaaccatcattgacattctaactaagcgaaacaatgcacagcgtcaacagatcaaagcagcatatctccaggaaacaggaaagcccctggatgaaacactgaagaaagcccttacaggtcaccttgaggaggttgttttagctctgctaaaaactccagcgcaatttgatgctgatgaacttcgtgctgccatgaagggccttggaactgatgaagatactctaattgagattttggcatcaagaactaacaaagaaatcagagacattaacagggtctacagagaggaactgaagagagatctggccaaagacataacctcagacacatctggagattttcggaacgctttgctttctcttgctaagggtgaccgatctgaggactttggtgtgaatgaagacttggctgattcagatgccagggccttgtatgaagcaggagaaaggagaaaggggacagacgtaaacgtgttcaataccatccttaccaccagaagctatccacaacttcgcagagtgtttcagaaatacaccaagtacagtaagcatgacatgaacaaagttctggacctggagttgaaaggtgacattgagaaatgcctcacagctatcgtgaagtgcgccacaagcaaaccagctttctttgcagagaagcttcatcaagccatgaaaggtgttggaactcgccataaggcattgatcaggattatggtttcccgttctgaaattgacatgaatgatatcaaagcattctatcagaagatgtatggtatctccctttgccaagccatcctggatgaaaccaaaggagattatgagaaaatcctggtggctctttgtggaggaaactaaacattcccttgatggtctcaagctatgatcagaagactttaattatatattttcatcctataagcttaaataggaaagtttcttcaacaggattacagtgtagctacctacatgctgaaaaatatagcctttaaatcatttttatattataactctgtataatagagataagtccattttttaaaaatgttttccccaaaccataaaaccctatacaagttgttctagtaacaatacatgagaaagatgtctatgtagctgaaaataaaatgacgtcacaagacaa

SEQ ID NO: 107813 - DNA, 2209 bp, Homo sapiens
  Payload ID: 1169
  Gene Symbol: ANXA1
  Gene Name: annexin A1
  Uniprot ID: P04083
  ENST ID: ENST00000376911
  CDS Start-End: 883-1923
aaaaaaaaaaaaaaaaaaaaaagcaatcattaagcttttcatctagccattacttttgtacaggctctcattaattccacatagatggtctaatggtctactaaatagtattctaatcctccatcttgtctatctcttagccattctccatgataaaggatgaatggtctttcggaaacataaatgaaaccatgctgctttaaaaaaacaaacaaacaaaaagaaacccattaatgttttcccaaagctttgtggacacattgaagcttcttgtttcagcttctgccaacatttctcgctccagcaaactttcttctgcttcccaaatatgacaagcttcttctttaacttttctgccaggttaatcttgactcatttcaagagaggcttgggtcagccagggcctactctaagaagtttctttagcccttatgttttcctatggagagcacacactagctttaagtcctgagggtacttaagatgatatttcaatgtttttgtactcttagtgcttggcatatggtgggtggtctacaaatttagaacaatgtagtgaaccacaaactcctctcttcagcctgtgtgcttacttgtagtagttgtctgatctctaaaatttagaactgaatatgccaagaaagagttcaatttcagagaggagggtatggtttcattttaagtataaaagcttcctttaaaaaaaattacgtcttacattttgttatgctcctaagtgtaattgatcctggaaagtaagcgcaaggctactctctaatgctaactcttatgtatgtaagaggtgaggaaggagaggttgtgtgtggtgcatttgttttgtaaaagcatctaactgttttctttccagacactttttcaaaaatggcaatggtatcagaattcctcaagcaggcctggtttattgaaaatgaagagcaggaatatgttcaaactgtgaagtcatccaaaggtggtcccggatcagcggtgagcccctatcctaccttcaatccatcctcggatgtcgctgccttgcataaggccataatggttaaaggtgtggatgaagcaaccatcattgacattctaactaagcgaaacaatgcacagcgtcaacagatcaaagcagcatatctccaggaaacaggaaagcccctggatgaaacactgaagaaagcccttacaggtcaccttgaggaggttgttttagctctgctaaaaactccagcgcaatttgatgctgatgaacttcgtgctgccatgaagggccttggaactgatgaagatactctaattgagattttggcatcaagaactaacaaagaaatcagagacattaacagggtctacagagaggaactgaagagagatctggccaaagacataacctcagacacatctggagattttcggaacgctttgctttctcttgctaagggtgaccgatctgaggactttggtgtgaatgaagacttggctgattcagatgccagggccttgtatgaagcaggagaaaggagaaaggggacagacgtaaacgtgttcaataccatccttaccaccagaagctatccacaacttcgcagagtgtttcagaaatacaccaagtacagtaagcatgacatgaacaaagttctggacctggagttgaaaggtgacattgagaaatgcctcacagctatcgtgaagtgcgccacaagcaaaccagctttctttgcagagaagcttcatcaagccatgaaaggtgttggaactcgccataaggcattgatcaggattatggtttcccgttctgaaattgacatgaatgatatcaaagcattctatcagaagatgtatggtatctccctttgccaagccatcctggatgaaaccaaaggagattatgagaaaatcctggtggctctttgtggaggaaactaaacattcccttgatggtctcaagctatgatcagaagactttaattatatattttcatcctataagcttaaataggaaagtttcttcaacaggattacagtgtagctacctacatgctgaaaaatatagcctttaaatcatttttatattataactctgtataatagagataagtccattttttaaaaatgttttccccaaaccataaaaccctatacaagttgttctagtaacaatacatgagaaagatgtctatgtagctgaaaataaaatgacgtcacaagacaa

SEQ ID NO: 107814 - DNA, 799 bp, Homo sapiens
  Payload ID: 1169
  Gene Symbol: ANXA1
  Gene Name: annexin A1
  ENST ID: ENST00000456643
  CDS Start-End: 187-799
agtgtgaaatcttcagagaagaatttctctttagttctttgcaagaaggtagagataaagggaaggtgtgggaaggacttgtgaaatacatattcgaggaaaaactatgcacaaggccgtgcatttaaaaataaactccctaaggctggggtgaaacctgctacggtctgcgcaagttgactgttaatgaatttgattctcaggtacactttttcaaaaatggcaatggtatcagaattcctcaagcaggcctggtttattgaaaatgaagagcaggaatatgttcaaactgtgaagtcatccaaaggtggtcccggatcagcggtgagcccctatcctaccttcaatccatcctcggatgtcgctgccttgcataaggccataatggttaaaggtgtggatgaagcaaccatcattgacattctaactaagcgaaacaatgcacagcgtcaacagatcaaagcagcatatctccaggaaacaggaaagcccctggatgaaacactgaagaaagcccttacaggtcaccttgaggaggttgttttagctctgctaaaaactccagcgcaatttgatgctgatgaacttcgtgctgccatgaagggccttggaactgatgaagatactctaattgagattttggcatcaagaactaacaaagaaatcagagacattaacagggtctacagagaggaactgaagagagatctggccaaagacataacctcagacacatctggagattttcggaacgctttgctttctcttgctaagggtgaccgatctgaggactttggtg

SEQ ID NO: 107815 - DNA, 526 bp, Homo sapiens
  Payload ID: 1169
  Gene Symbol: ANXA1
  Gene Name: annexin A1
  ENST ID: ENST00000415424
  CDS Start-End: 181-526
tttgcaagaaggtagagataaagggaaggtgtgggaaggacttgtgaaatacatattcgaggaaaaactatgcacaaggccgtgcatttaaaaataaactccctaaggctggggtgaaacctgctacggtctgcgcaagttgactgttaatgaatttgattctcagacactttttcaaaaatggcaatggtatcagaattcctcaagcaggcctggtttattgaaaatgaagagcaggaatatgttcaaactgtgaagtcatccaaaggtggtcccggatcagcggtgagcccctatcctaccttcaatccatcctcggatgtcgctgccttgcataaggccataatggttaaaggtgtggatgaagcaaccatcattgacattctaactaagcgaaacaatgcacagcgtcaacagatcaaagcagcatatctccaggaaacaggaaagcccctggatgaaacactgaagaaagcccttacaggtcaccttgaggaggttgttttagctctgctaaaaactccag

SEQ ID NO: 107816 - DNA, 1417 bp, Homo sapiens
  Payload ID: 1170
  Gene Symbol: ANXA10
  Gene Name: annexin A10
  Uniprot ID: Q9UJ72
  ENST ID: ENST00000359299
  CDS Start-End: 187-1161
acagtatctcaagtcatgctgtatccagatttgcttttacattttcttgcctgagtctgaggtgaacagtgaacatatttacatttgatttaacagtgaaccttaattctttctggcttcacagtgaaacaagtttatgcaatcgatcaaatattttcatccctgaggttaacaattaccatcaaaatgttttgtggagactatgtgcaaggaaccatcttcccagctcccaatttcaatcccataatggatgcccaaatgctaggaggagcactccaaggatttgactgtgacaaagacatgctgatcaacattctgactcagcgctgcaatgcacaaaggatgatgattgcagaggcataccagagcatgtatggccgggacctgattggggatatgagggagcagctttcggatcacttcaaagatgtgatggctggcctcatgtacccaccaccactgtatgatgctcatgagctctggcatgccatgaagggagtaggcactgatgagaattgcctcattgaaatactagcttcaagaacaaatggagaaattttccagatgcgagaagcctactgcttgcaatacagcaataacctccaagaggacatttattcagagacctcaggacacttcagagatactctcatgaacttggtccaggggaccagagaggaaggatatacagaccctgcgatggctgctcaggatgcaatggtcctatgggaagcctgtcagcagaagacgggggagcacaaaaccatgctgcaaatgatcctgtgcaacaagagctaccagcagctgcggctggttttccaggaatttcaaaatatttctgggcaagatatggtagatgccattaatgaatgttatgatggatactttcaggagctgctggttgcaattgttctctgtgttcgagacaaaccagcctattttgcttatagattatatagtgcaattcatgactttggtttccataataaaactgtaatcaggattctcattgccagaagtgaaatagacctgctgaccataaggaaacgatacaaagagcgatatggaaaatccctatttcatgatatcagaaattttgcttcagggcattataagaaagcactgcttgccatctgtgctggtgatgctgaggactactaaaatgaagaggacttggagtactgtgcactcctctttctagacacttccaaatagagattttctcacaaatttgtactgttcatggcactattaacaaaactatacaatcatattttctcttctatctttgaaattattctaagccaaagaaaactatgaatgaaagtatatgatactgaatttgcctactatcctgaatttgcctactatctaatcagcaattaaataaattgtgcatgatggaataatagaaaaa

SEQ ID NO: 107817 - DNA, 1341 bp, Homo sapiens
  Payload ID: 1170
  Gene Symbol: ANXA10
  Gene Name: annexin A10
  ENST ID: ENST00000617524
  CDS Start-End: 127-1098
ggtgaacagtgaacatatttacatttgatttaacagtgaaccttaattctttctggcttcacagtgaaacaagtttatgcaatcgatcaaatattttcatccctgaggttaacaattaccatcaaaatgttttgtggagactatgtgcaaggaaccatcttcccagctcccaatttcaatcccataatggatgcccaaatgctaggaggagcactccaaggatttgactgtgacaaagacatgctgatcaacattctgactcagcgctgcaatgcacaaaggatgatgattgcagaggcataccagagcatgtatggccgggacctgattggggatatgagggcagctttcggatcacttcaaagatgtgatggctggctcatgtacccaccaccactgtatgatgctcatgagctctggcatgccatgaagggagtaggcactgatgagaattgcctcattgaaatactagcttcaagaacaaatggagaaattttccagatgcgagaagcctactgcttgcaatacagcaataacctccaagaggacatttattcagagacctcaggacacttcagagatactctcatgaacttggtccaggggaccagagaggaaggatatacagaccctgcgatggctgctcaggatgcaatggtcctatgggaagcctgtcagcagaagacgggggagcacaaaaccatgctgcaaatgatcctgtgcaacaagagctaccagcagctgcggctggttttccaggaatttcaaaatatttctgggcaagatatggtagatgccattaatgaatgttatgatggatactttcaggagctgctggttgcaattgttctctgtgttcgagacaaaccagcctattttgcttatagattatatagtgcaattcatgactttggtttccataataaaactgtaatcaggattctcattgccagaagtgaaatagacctgctgaccataaggaaacgatacaaagagcgatatggaaaatccctatttcatgatatcagaaattttgcttcagggcattataagaaagcactgcttgccatctgtgctggtgatgctgaggactactaaaatgaagaggacttggagtactgtgcactcctctttctagacacttccaaatagagattttctcacaaatttgtactgttcatggcactattaacaaaactatacaatcatattttctcttctatctttgaaattattctaagccaaagaaaactatgaatgaaagtatatgatactgaatttgcctactatcctgaatttgcctactatctaatcagcaattaaataaattgtgcatgatgg

SEQ ID NO: 107818 - DNA, 2526 bp, Homo sapiens
  Payload ID: 1171
  Gene Symbol: ANXA11
  Gene Name: annexin A11
  Uniprot ID: P50995
  ENST ID: ENST00000265447
  CDS Start-End: 379-1797
agatctaaccatgagctaccctggctatcccccgcccccaggtggctacccaccagctgcaccaggttggctggcactggcctgggttctctctctatagtagaaatcctgccatccagatcctgccactgccacctttgctagcacagctgagcagcctctgagcagcaagagaggaggaggcaggaaatttagggaaggttcttcctggagggtctggagccctggagatgaagagccgatccgaagctgccatgtagaggaaagcatctaacaggccagaggccccatgatgatgtcgaatgcccatcgggcacccagctgagccctgcaggtggtggtccctggggaggtgctgcctaccctcctccgcccagcatgccccccatcgggctggataacgtggccacctatgcggggcagttcaaccaggactatctctcgggaatggcggccaacatgtctgggacatttggaggagccaacatgcccaacctgtaccctggggcccctggggctggctacccaccagtgccccctggcggctttgggcagcccccctctgcccagcagcctgttcctccctatgggatgtatccacccccaggaggaaacccaccctccaggatgccctcatatccgccatacccaggggcccctgtgccgggccagcccatgccaccccccggacagcagcccccaggggcctaccctgggcagccaccagtgacctaccctggtcagcctccagtgccactccctgggcagcagcagccagtgccgagctacccaggatacccggggtctgggactgtcacccccgctgtgcccccaacccagtttggaagccgaggcaccatcactgatgctcccggctttgaccccctgcgagatgccgaggtcctgcggaaggccatgaaaggcttcgggacggatgagcaggccatcattgactgcctggggagtcgctccaacaagcagcggcagcagatcctactttccttcaagacggcttacggcaaggatttgatcaaagatctgaaatctgaactgtcaggaaactttgagaagacaatcttggctctgatgaagaccccagtcctctttgacatttatgagataaaggaagccatcaagggggttggcactgatgaagcctgcctgattgagatcctcgcttcccgcagcaatgagcacatccgagaattaaacagagcctacaaagcagaattcaaaaagaccctggaagaggccattcgaagcgacacatcagggcacttccagcggctcctcatctctctctctcagggaaaccgtgatgaaagcacaaacgtggacatgtcactcgcccagagagatgcccaggagctgtatgcggccggggagaaccgcctgggaacagacgagtccaagttcaatgcggttctgtgctcccggagccgggcccacctggtagcagttttcaatgagtaccagagaatgacaggccgggacattgagaagagcatctgccgggagatgtccggggacctggaggagggcatgctggccgtggtgaaatgtctcaagaataccccagccttctttgcggagaggctcaacaaggccatgaggggggcaggaacaaaggaccggaccctgattcgcatcatggtgtctcgcagcgagaccgacctcctggacatcagatcagagtataagcggatgtacggcaagtcgctgtaccacgacatctcgggagatacttcaggggattaccggaagattctgctgaagatctgtggtggcaatgactgaacagtgactggtggctcacttctgcccacctgccggcaacaccagtgccaggaaaaggccaaaagaatgtctgtttctaacaaatccacaaatagccccgagattcaccgtcctagagcttaggcctgtcttccacccctcctgacccgtatagtgtgccacaggacctgggtcggtctagaactctctcaggatgccttttctaccccatccctcacagcctcttgctgctaaaatagatgtttcatttttctgactcatgcaatcattcccctttgcctgtggctaagacttggcttcatttcgtcatgtaattgtatatttttatttggaggcatattttcttttcttacagtcattgccagacagaggcatacaagtctgtttgctgcatacacatttctggtgagggcgactgggtgggtgaagcaccgtgtcctcgctgaggagagaaagggaggcgtgcctgagaaggtagcctgtgcatctggtgagtgtgtcacgagctttgttactgccaaactcactcctttttagaaaaaacaaaaaaaaagggccagaaagtcattccttccatcttccttgcagaaaccacgagaacaaagccagttccctgtcagtgacagggcttcttgtaatttgtggtatgtgccttaaacctgaatgtctgtagccaaaacttgtttccacattaagagtcagccagctctggaatggtctggaaatgtc

SEQ ID NO: 107819 - DNA, 6720 bp, Homo sapiens
  Payload ID: 1171
  Gene Symbol: ANXA11
  Gene Name: annexin A11
  Uniprot ID: P50995
  ENST ID: ENST00000372231
  CDS Start-End: 239-1756
gcactgcctctggcacctggggcagccgcgcccgcggagttttccgcccggcgctgacggctgctgcgcccgcggctccccagtgccccgagtgccccgcgggccccgcgagcgggagtgggacccagcccctaggcagaacccaggcgccgcgcccgggacgcccgcggagagagccactcccgcccacgtcccatttcgcccctcgcgtccggagtccccgtggccagatctaaccatgagctaccctggctatcccccgcccccaggtggctacccaccagctgcaccaggtggtggtccctggggaggtgctgcctaccctcctccgcccagcatgccccccatcgggctggataacgtggccacctatgcggggcagttcaaccaggactatctctcgggaatggcggccaacatgtctgggacatttggaggagccaacatgcccaacctgtaccctggggcccctggggctggctacccaccagtgccccctggcggctttgggcagcccccctctgcccagcagcctgttcctccctatgggatgtatccacccccaggaggaaacccaccctccaggatgccctcatatccgccatacccaggggcccctgtgccgggccagcccatgccaccccccggacagcagcccccaggggcctaccctgggcagccaccagtgacctaccctggtcagcctccagtgccactccctgggcagcagcagccagtgccgagctacccaggatacccggggtctgggactgtcacccccgctgtgcccccaacccagtttggaagccgaggcaccatcactgatgctcccggctttgaccccctgcgagatgccgaggtcctgcggaaggccatgaaaggcttcgggacggatgagcaggccatcattgactgcctggggagtcgctccaacaagcagcggcagcagatcctactttccttcaagacggcttacggcaaggatttgatcaaagatctgaaatctgaactgtcaggaaactttgagaagacaatcttggctctgatgaagaccccagtcctctttgacatttatgagataaaggaagccatcaagggggttggcactgatgaagcctgcctgattgagatcctcgcttcccgcagcaatgagcacatccgagaattaaacagagcctacaaagcagaattcaaaaagaccctggaagaggccattcgaagcgacacatcagggcacttccagcggctcctcatctctctctctcagggaaaccgtgatgaaagcacaaacgtggacatgtcactcgcccagagagatgcccaggagctgtatgcggccggggagaaccgcctgggaacagacgagtccaagttcaatgcggttctgtgctcccggagccgggcccacctggtagcagttttcaatgagtaccagagaatgacaggccgggacattgagaagagcatctgccgggagatgtccggggacctggaggagggcatgctggccgtggtgaaatgtctcaagaataccccagccttctttgcggagaggctcaacaaggccatgaggggggcaggaacaaaggaccggaccctgattcgcatcatggtgtctcgcagcgagaccgacctcctggacatcagatcagagtataagcggatgtacggcaagtcgctgtaccacgacatctcgggagatacttcaggggattaccggaagattctgctgaagatctgtggtggcaatgactgaacagtgactggtggctcacttctgcccacctgccggcaacaccagtgccaggaaaaggccaaaagaatgtctgtttctaacaaatccacaaatagccccgagattcaccgtcctagagcttaggcctgtcttccacccctcctgacccgtatagtgtgccacaggacctgggtcggtctagaactctctcaggatgccttttctaccccatccctcacagcctcttgctgctaaaatagatgtttcatttttctgactcatgcaatcattcccctttgcctgtggctaagacttggcttcatttcgtcatgtaattgtatatttttatttggaggcatattttcttttcttacagtcattgccagacagaggcatacaagtctgtttgctgcatacacatttctggtgagggcgactgggtgggtgaagcaccgtgtcctcgctgaggagagaaagggaggcgtgcctgagaaggtagcctgtgcatctggtgagtgtgtcacgagctttgttactgccaaactcactcctttttagaaaaaacaaaaaaaaagggccagaaagtcattccttccatcttccttgcagaaaccacgagaacaaagccagttccctgtcagtgacagggcttcttgtaatttgtggtatgtgccttaaacctgaatgtctgtagccaaaacttgtttccacattaagagtcagccagctctggaatggtctggaaatgtcttcctggtaccaacttgttttcttctgcttgattctgccctgtggctcagaggtctggccttatcagccagtgaaagttcatgtaaccttacgtagagatttgtgtgcaggaaaccctgagcatacactagtttgcagggactcgtaaggacatgggaagggaggttcccgaaatccaggcaggaggcccagacacctgaaaggcaaagggatcttggttggttgcaggtgcagtgaagtccactgaaggtgtggtgcgaagaatgcagtccttcacccaggtcccaggagggaagaagggtgtgtgctaattcctggtgcccctcggcgggggccagagagaaggatggggacaacccagagagtcacaagaccagtgcctcccctcagggtgcctccaggctgaaaggggctcctggctctggtctctggggaccctgtgcccgttggttggtggtgtgagggaagagaatccataagagagtttctgagaattatggtgtcatgtccagaagctagagcttaccttgcatcaggggtctccacccactccttttccaacctcctgcgttgaggtttagaaaagagagaatcgactaggcactatggctcacgcctgtaatccaaggactttgggaagctgaggtgagaggatcacttgagctcaggagttcaagactagcctagccaacagcgagacccctgtctctactaaaaaatttggccaggcgtggtggctcacggctgtaatcccagcactttgggaggtgaggcgggcagatcacctgaggtcaggagttcgagacccagcctggccaacatggtgaaaccccatctctactaaaaatacaaaaattagccaggcatggtggcacattcctgtaatcccagctacacaggatgctgaggcaggagaatcacttgaacccaggaggcagaggttgtagtgagctgagatcacaccattgcacttcaacctgggtggacagagtgagactctgtctcaaaaaaaaaaaaaaatttacctggcattgtagtgcattccctatagtcggctactctggaggctgaggcaggaagatccttagagcccaagaaattgaggccgtagtaagctgtgattacaccactgcactccagcctggacaacagagcgagaccttgtctcaaatgagaaaaaaacaaaaagaaatgggagaatccagagagactaggctagatcaagcctgctgggtcctggcaggagccccagggagtagctcatctgcagacatttgcttgaggactaccccctaaacataaaggaagaatgacatccgaagggtgtggagcagccatgagctgagaactagcctggtctacctgagattgatggcaggtcctggtcaacacgtcagctctgcgtcagagtccatgcctcaagcccaagctgaagccccatccctgctgctctcccaagaactcctctgctagggcaggccccttgcccttgggtgccaggtgggacctgcctgatgggatggggtgcttggcatatacaacttgccatgaactcaaggtgaccctgggggcctcctgaattgtgatggggcctagaaccaatgtgctctgatgtgaccatattctgtgacattaccttgccctgtttactccaaagttcccagcctggtgcccagcaggcaatattgcacctacagacacatttactttggtttccaaagtgtttttagacatttgaatttgttgccaacatttaaacattgagagatttcatatttttaaaaatctggaattctggcttctcttgaaaactcagaaattctggcactatggggcttgcattcctgcatggctggagctgagttgcagctgcccctttaggcctgtactccttatttgctataggctccgtcttgtattacactaagcccatgtcacccatttggctcctgcaggcctttgggtttgagaccctggtctacacacttggagaccacctgttgtaaagtacatggatgtgctttggtcaaggaatagaccaaggtggatatccaggccagagtgactcagcgagtttaggtcacaggcgtatactccacttgttatataacctgcttgtgtaagttcatacttggctcaaagccactattgtttggaaaaggtataactgccctgctgacgctgtacagatgttcttgggctcggatgggcatggctccacgtggtgtgcactagcacccagagagagtgaagctattgacccctgtaagggagagtgaccatctggcagatagatagaggggagccaggacatggctcagcttgtgcccagagggagagttaagccgctgaccctgtagccagggagtgcacctgcaagcatgggggtggcaggagccacagagctggctgctgagaggagctgcagatctggagaagacagcctaggtaaaggtggacagtgtgagagctgctgatgagatagctgctgaataaaactacattttacctgcctatggcccgccaggttttctttcagctatcgcccatccacccagtcccctcgaacctcagcatgggctggaacctgaccctgggcatgacatttggcatagttgtggacctgacacctgtgtttgtcctagtcctgtttctccctgccttcctgttcctctcgctgccctcatggtcactcccaagagatccaacccatgttaagtatgggctggaggactgcatgaatgcctcatgatcttcccagaggcaaaggcacctactgccttccaaggtcagtgggaggttgggatcaacactgtttattatgcttaggacaaaaaagatagggagaaagatgtgcaaccttacaggtcatctttctgggatagaacacaatgggtcttctcctgcctcctggatatgttagtcaaggccagtccatgctacacatctagtctgacttctaaaatagaagcaccagatgaattcagccctgagagaattttcagcagctgtgggggcgctggaggaaacactattaaatagttttgcacctgagacagatagcctcactcgcctcaccctagtcctggtggcatttgtctcaggtgcaaaatttaagaaagaaaccttggagtgctcaccctgtggctgggtagatggtcctaaagtggtggttttcaagcctgagtgtgtatcaggatcatcaggggagcttgctaaagagcagttcctgcggtcagaccctcatgcattttgagcaggtgtggggactgggaaactgcatctgtaacctgctgtaatctaacgcttatctaaatactactgtgctcacacagagaacaccgcaaaagtagaggtgttcctccagagggcaggtgagcagatggcacagtctgcttggaattcagtcaggtgatgagagatgagatgaggcactcctagctttgggaagagggagctgaaagatgaacctttgcaggtgcccacggtcaaagtggtggtttaatgccatgccatgcccattttctgttggccttggcagggagttacagccctaccttaggacctggctccttatttctgctgtaggctctttcctgccctggccgagatggagtggaatgagacctagaaacatcaagctaaatacatgtcctcagaaagataaaggtttacattttcacccccatcaaatctgaaagctctctgcctgtgtttttctaagggatagggacatcattactcagtccacaacctggactcatgtagggtcccctgtcagtaaaggagtcagtcaagcccaccaggtataccaaggactcttaccctcagcccctactccttggaaagctgccccttggcctaatattggtgtttagcttgagcctgactccttctcaacactaagagctgatgaagtcctgaagcagaaagagctctgacctgagagtcaaacatccttattctgatctcagctcagcccctgatttgttgtgtgaccctggatatgtcacttcctgtctttttgactttttaaaatgaagggtagactagaggagagcttctaaaactttaatgtggtcaacgaaatggaataggaaattccacaagtctgtccttccacaaaagcagcaaataaggtggcaaaaactcaaatttatgggaactctggaaacgaattgaaagtttacagcaatcaggtgaatacctaagaataaaagctggatttagtaaga

SEQ ID NO: 107820 - DNA, 6965 bp, Homo sapiens
  Payload ID: 1171
  Gene Symbol: ANXA11
  Gene Name: annexin A11
  Uniprot ID: P50995
  ENST ID: ENST00000438331
  CDS Start-End: 484-2001
gcactgcctctggcacctggggcagccgcgcccgcggagttttccgcccggcgctgacggctgctgcgcccgcggctccccagtgccccgagtgccccgcgggccccgcgagcgggagtgggacccagcccctaggcagaacccaggcgccgcgcccgggacgcccgcggagagagccactcccgcccacgtcccatttcgcccctcgcgtccggagtccccgtggccagggattattggacctgcctggtttaaactattgtcttagttaattttgtgctgctctaacaaaatatcacagactgagtaatttataagcaatagtagcttatttggctcacagttctggaggctgagaagatcgtgaggctgcatctggcaagggccttcttgctgcttcataacatggcagaagacatcatgcgggtgtgtgtctggggaagagacttacagaagtggagttgctgagtcaaagatctaaccatgagctaccctggctatcccccgcccccaggtggctacccaccagctgcaccaggtggtggtccctggggaggtgctgcctaccctcctccgcccagcatgccccccatcgggctggataacgtggccacctatgcggggcagttcaaccaggactatctctcgggaatggcggccaacatgtctgggacatttggaggagccaacatgcccaacctgtaccctggggcccctggggctggctacccaccagtgccccctggcggctttgggcagcccccctctgcccagcagcctgttcctccctatgggatgtatccacccccaggaggaaacccaccctccaggatgccctcatatccgccatacccaggggcccctgtgccgggccagcccatgccaccccccggacagcagcccccaggggcctaccctgggcagccaccagtgacctaccctggtcagcctccagtgccactccctgggcagcagcagccagtgccgagctacccaggatacccggggtctgggactgtcacccccgctgtgcccccaacccagtttggaagccgaggcaccatcactgatgctcccggctttgaccccctgcgagatgccgaggtcctgcggaaggccatgaaaggcttcgggacggatgagcaggccatcattgactgcctggggagtcgctccaacaagcagcggcagcagatcctactttccttcaagacggcttacggcaaggatttgatcaaagatctgaaatctgaactgtcaggaaactttgagaagacaatcttggctctgatgaagaccccagtcctctttgacatttatgagataaaggaagccatcaagggggttggcactgatgaagcctgcctgattgagatcctcgcttcccgcagcaatgagcacatccgagaattaaacagagcctacaaagcagaattcaaaaagaccctggaagaggccattcgaagcgacacatcagggcacttccagcggctcctcatctctctctctcagggaaaccgtgatgaaagcacaaacgtggacatgtcactcgcccagagagatgcccaggagctgtatgcggccggggagaaccgcctgggaacagacgagtccaagttcaatgcggttctgtgctcccggagccgggcccacctggtagcagttttcaatgagtaccagagaatgacaggccgggacattgagaagagcatctgccgggagatgtccggggacctggaggagggcatgctggccgtggtgaaatgtctcaagaataccccagccttctttgcggagaggctcaacaaggccatgaggggggcaggaacaaaggaccggaccctgattcgcatcatggtgtctcgcagcgagaccgacctcctggacatcagatcagagtataagcggatgtacggcaagtcgctgtaccacgacatctcgggagatacttcaggggattaccggaagattctgctgaagatctgtggtggcaatgactgaacagtgactggtggctcacttctgcccacctgccggcaacaccagtgccaggaaaaggccaaaagaatgtctgtttctaacaaatccacaaatagccccgagattcaccgtcctagagcttaggcctgtcttccacccctcctgacccgtatagtgtgccacaggacctgggtcggtctagaactctctcaggatgccttttctaccccatccctcacagcctcttgctgctaaaatagatgtttcatttttctgactcatgcaatcattcccctttgcctgtggctaagacttggcttcatttcgtcatgtaattgtatatttttatttggaggcatattttcttttcttacagtcattgccagacagaggcatacaagtctgtttgctgcatacacatttctggtgagggcgactgggtgggtgaagcaccgtgtcctcgctgaggagagaaagggaggcgtgcctgagaaggtagcctgtgcatctggtgagtgtgtcacgagctttgttactgccaaactcactcctttttagaaaaaacaaaaaaaaagggccagaaagtcattccttccatcttccttgcagaaaccacgagaacaaagccagttccctgtcagtgacagggcttcttgtaatttgtggtatgtgccttaaacctgaatgtctgtagccaaaacttgtttccacattaagagtcagccagctctggaatggtctggaaatgtcttcctggtaccaacttgttttcttctgcttgattctgccctgtggctcagaggtctggccttatcagccagtgaaagttcatgtaaccttacgtagagatttgtgtgcaggaaaccctgagcatacactagtttgcagggactcgtaaggacatgggaagggaggttcccgaaatccaggcaggaggcccagacacctgaaaggcaaagggatcttggttggttgcaggtgcagtgaagtccactgaaggtgtggtgcgaagaatgcagtccttcacccaggtcccaggagggaagaagggtgtgtgctaattcctggtgcccctcggcgggggccagagagaaggatggggacaacccagagagtcacaagaccagtgcctcccctcagggtgcctccaggctgaaaggggctcctggctctggtctctggggaccctgtgcccgttggttggtggtgtgagggaagagaatccataagagagtttctgagaattatggtgtcatgtccagaagctagagcttaccttgcatcaggggtctccacccactccttttccaacctcctgcgttgaggtttagaaaagagagaatcgactaggcactatggctcacgcctgtaatccaaggactttgggaagctgaggtgagaggatcacttgagctcaggagttcaagactagcctagccaacagcgagacccctgtctctactaaaaaatttggccaggcgtggtggctcacggctgtaatcccagcactttgggaggtgaggcgggcagatcacctgaggtcaggagttcgagacccagcctggccaacatggtgaaaccccatctctactaaaaatacaaaaattagccaggcatggtggcacattcctgtaatcccagctacacaggatgctgaggcaggagaatcacttgaacccaggaggcagaggttgtagtgagctgagatcacaccattgcacttcaacctgggtggacagagtgagactctgtctcaaaaaaaaaaaaaaatttacctggcattgtagtgcattccctatagtcggctactctggaggctgaggcaggaagatccttagagcccaagaaattgaggccgtagtaagctgtgattacaccactgcactccagcctggacaacagagcgagaccttgtctcaaatgagaaaaaaacaaaaagaaatgggagaatccagagagactaggctagatcaagcctgctgggtcctggcaggagccccagggagtagctcatctgcagacatttgcttgaggactaccccctaaacataaaggaagaatgacatccgaagggtgtggagcagccatgagctgagaactagcctggtctacctgagattgatggcaggtcctggtcaacacgtcagctctgcgtcagagtccatgcctcaagcccaagctgaagccccatccctgctgctctcccaagaactcctctgctagggcaggccccttgcccttgggtgccaggtgggacctgcctgatgggatggggtgcttggcatatacaacttgccatgaactcaaggtgaccctgggggcctcctgaattgtgatggggcctagaaccaatgtgctctgatgtgaccatattctgtgacattaccttgccctgtttactccaaagttcccagcctggtgcccagcaggcaatattgcacctacagacacatttactttggtttccaaagtgtttttagacatttgaatttgttgccaacatttaaacattgagagatttcatatttttaaaaatctggaattctggcttctcttgaaaactcagaaattctggcactatggggcttgcattcctgcatggctggagctgagttgcagctgcccctttaggcctgtactccttatttgctataggctccgtcttgtattacactaagcccatgtcacccatttggctcctgcaggcctttgggtttgagaccctggtctacacacttggagaccacctgttgtaaagtacatggatgtgctttggtcaaggaatagaccaaggtggatatccaggccagagtgactcagcgagtttaggtcacaggcgtatactccacttgttatataacctgcttgtgtaagttcatacttggctcaaagccactattgtttggaaaaggtataactgccctgctgacgctgtacagatgttcttgggctcggatgggcatggctccacgtggtgtgcactagcacccagagagagtgaagctattgacccctgtaagggagagtgaccatctggcagatagatagaggggagccaggacatggctcagcttgtgcccagagggagagttaagccgctgaccctgtagccagggagtgcacctgcaagcatgggggtggcaggagccacagagctggctgctgagaggagctgcagatctggagaagacagcctaggtaaaggtggacagtgtgagagctgctgatgagatagctgctgaataaaactacattttacctgcctatggcccgccaggttttctttcagctatcgcccatccacccagtcccctcgaacctcagcatgggctggaacctgaccctgggcatgacatttggcatagttgtggacctgacacctgtgtttgtcctagtcctgtttctccctgccttcctgttcctctcgctgccctcatggtcactcccaagagatccaacccatgttaagtatgggctggaggactgcatgaatgcctcatgatcttcccagaggcaaaggcacctactgccttccaaggtcagtgggaggttgggatcaacactgtttattatgcttaggacaaaaaagatagggagaaagatgtgcaaccttacaggtcatctttctgggatagaacacaatgggtcttctcctgcctcctggatatgttagtcaaggccagtccatgctacacatctagtctgacttctaaaatagaagcaccagatgaattcagccctgagagaattttcagcagctgtgggggcgctggaggaaacactattaaatagttttgcacctgagacagatagcctcactcgcctcaccctagtcctggtggcatttgtctcaggtgcaaaatttaagaaagaaaccttggagtgctcaccctgtggctgggtagatggtcctaaagtggtggttttcaagcctgagtgtgtatcaggatcatcaggggagcttgctaaagagcagttcctgcggtcagaccctcatgcattttgagcaggtgtggggactgggaaactgcatctgtaacctgctgtaatctaacgcttatctaaatactactgtgctcacacagagaacaccgcaaaagtagaggtgttcctccagagggcaggtgagcagatggcacagtctgcttggaattcagtcaggtgatgagagatgagatgaggcactcctagctttgggaagagggagctgaaagatgaacctttgcaggtgcccacggtcaaagtggtggtttaatgccatgccatgcccattttctgttggccttggcagggagttacagccctaccttaggacctggctccttatttctgctgtaggctctttcctgccctggccgagatggagtggaatgagacctagaaacatcaagctaaatacatgtcctcagaaagataaaggtttacattttcacccccatcaaatctgaaagctctctgcctgtgtttttctaagggatagggacatcattactcagtccacaacctggactcatgtagggtcccctgtcagtaaaggagtcagtcaagcccaccaggtataccaaggactcttaccctcagcccctactccttggaaagctgccccttggcctaatattggtgtttagcttgagcctgactccttctcaacactaagagctgatgaagtcctgaagcagaaagagctctgacctgagagtcaaacatccttattctgatctcagctcagcccctgatttgttgtgtgaccctggatatgtcacttcctgtctttttgactttttaaaatgaagggtagactagaggagagcttctaaaactttaatgtggtcaacgaaatggaataggaaattccacaagtctgtccttccacaaaagcagcaaataaggtggcaaaaactcaaatttatgggaactctggaaacgaattgaaagtttacagcaatcaggtgaatacctaagaataaaagctggatttagtaaga

SEQ ID NO: 107821 - DNA, 2534 bp, Homo sapiens
  Payload ID: 1171
  Gene Symbol: ANXA11
  Gene Name: annexin A11
  Uniprot ID: P50995
  ENST ID: ENST00000422982
  CDS Start-End: 288-1805
gcactgcctctggcacctggggcagccgcgcccgcggagttttccgcccggcgctgacggctgctgcgcccgcggctccccagtgccccgagtgccccgcgggccccgcgagcgggagtgggacccagcccctaggcagaacccaggcgccgcgcccgggacgcccgcggagagagccactcccgcccacgtcccatttcgcccctcgcgtccggagtccccgtggccaggtgtgtgtctggggaagagacttacagaagtggagttgctgagtcaaagatctaaccatgagctaccctggctatcccccgcccccaggtggctacccaccagctgcaccaggtggtggtccctggggaggtgctgcctaccctcctccgcccagcatgccccccatcgggctggataacgtggccacctatgcggggcagttcaaccaggactatctctcgggaatggcggccaacatgtctgggacatttggaggagccaacatgcccaacctgtaccctggggcccctggggctggctacccaccagtgccccctggcggctttgggcagcccccctctgcccagcagcctgttcctccctatgggatgtatccacccccaggaggaaacccaccctccaggatgccctcatatccgccatacccaggggcccctgtgccgggccagcccatgccaccccccggacagcagcccccaggggcctaccctgggcagccaccagtgacctaccctggtcagcctccagtgccactccctgggcagcagcagccagtgccgagctacccaggatacccggggtctgggactgtcacccccgctgtgcccccaacccagtttggaagccgaggcaccatcactgatgctcccggctttgaccccctgcgagatgccgaggtcctgcggaaggccatgaaaggcttcgggacggatgagcaggccatcattgactgcctggggagtcgctccaacaagcagcggcagcagatcctactttccttcaagacggcttacggcaaggatttgatcaaagatctgaaatctgaactgtcaggaaactttgagaagacaatcttggctctgatgaagaccccagtcctctttgacatttatgagataaaggaagccatcaagggggttggcactgatgaagcctgcctgattgagatcctcgcttcccgcagcaatgagcacatccgagaattaaacagagcctacaaagcagaattcaaaaagaccctggaagaggccattcgaagcgacacatcagggcacttccagcggctcctcatctctctctctcagggaaaccgtgatgaaagcacaaacgtggacatgtcactcgcccagagagatgcccaggagctgtatgcggccggggagaaccgcctgggaacagacgagtccaagttcaatgcggttctgtgctcccggagccgggcccacctggtagcagttttcaatgagtaccagagaatgacaggccgggacattgagaagagcatctgccgggagatgtccggggacctggaggagggcatgctggccgtggtgaaatgtctcaagaataccccagccttctttgcggagaggctcaacaaggccatgaggggggcaggaacaaaggaccggaccctgattcgcatcatggtgtctcgcagcgagaccgacctcctggacatcagatcagagtataagcggatgtacggcaagtcgctgtaccacgacatctcgggagatacttcaggggattaccggaagattctgctgaagatctgtggtggcaatgactgaacagtgactggtggctcacttctgcccacctgccggcaacaccagtgccaggaaaaggccaaaagaatgtctgtttctaacaaatccacaaatagccccgagattcaccgtcctagagcttaggcctgtcttccacccctcctgacccgtatagtgtgccacaggacctgggtcggtctagaactctctcaggatgccttttctaccccatccctcacagcctcttgctgctaaaatagatgtttcatttttctgactcatgcaatcattcccctttgcctgtggctaagacttggcttcatttcgtcatgtaattgtatatttttatttggaggcatattttcttttcttacagtcattgccagacagaggcatacaagtctgtttgctgcatacacatttctggtgagggcgactgggtgggtgaagcaccgtgtcctcgctgaggagagaaagggaggcgtgcctgagaaggtagcctgtgcatctggtgagtgtgtcacgagctttgttactgccaaactcactcctttttagaaaaaacaaaaaaaaagggccagaaagtcattccttccatcttccttgcagaaaccacgagaacaaagccagttccctgtcagtgacagggcttcttgtaatttgtggtatgtgccttaaacctgaatgtctgtagccaaaacttgtttccacattaagagtcagccagctctggaatggtctggaaatgtc

SEQ ID NO: 107822 - DNA, 750 bp, Homo sapiens
  Payload ID: 1171
  Gene Symbol: ANXA11
  Gene Name: annexin A11
  ENST ID: ENST00000447489
  CDS Start-End: 1-446
gggagaaccgcctgggaacagacgagtccaagttcaatgcggttctgtgctcccggagccgggcccacctggtagcagttttcaatgagtaccagagaatgacaggccgggacattgagaagagcatctgccgggagatgtccggggacctggaggagggcatgctggccgtggtgaaatgtctcaagaataccccagccttctttgcggagaggctcaacaaggccatgaggggggcaggaacaaaggaccggaccctgattcgcatcatggtgtctcgcagcgagaccgacctcctggacatcagatcagagtataagcggatgtacggcaagtcgctgtaccacgacatctcgagtatctcctgcatgccagcaagctatggacatctggaagaagccacatgccttgccctcaagttgcttagggtggaaggaaatgattagaaatgagccaagccgagcctgcactcttagaggagatacttcaggggattaccggaagattctgctgaagatctgtggtggcaatgactgaacagtgactggtggctcacttctgcccacctgccggcaacaccagtgccaggaaaaggccaaaagaatgtctgtttctaacaaatccacaaatagccccgagattcaccgtcctagagcttaggcctgtcttccacccctcctgacccgtatagtgtgccacaggacctgggtcggtctagaactctctcaggatgccttttctaccccatcc

SEQ ID NO: 107823 - DNA, 610 bp, Homo sapiens
  Payload ID: 1171
  Gene Symbol: ANXA11
  Gene Name: annexin A11
  ENST ID: ENST00000437799
  CDS Start-End: 161-610
agtgaactggtctgcgacaagcagggcagatgcagcagtttcttctgcagggtcccagttgtggtggtggctgccctttcaagaagctgggtcccacgggccagcaggggctctcaggcagagcctgaatgtgctttcgtcttctcttccagatctaaccatgagctaccctggctatcccccgcccccaggtggctacccaccagctgcaccaggtggtggtccctggggaggtgctgcctaccctcctccgcccagcatgccccccatcgggctggataacgtggccacctatgcggggcagttcaaccaggactatctctcgggaatggcggccaacatgtctgggacatttggaggagccaacatgcccaacctgtaccctggggcccctggggctggctacccaccagtgccccctggcggctttgggcagcccccctctgcccagcagcctgttcctccctatgggatgtatccacccccaggaggaaacccaccctccaggatgccctcatatccgccatacccaggggcccctgtgccgggccagcccatgccaccccccggacagcagcccccaggggcctaccctgggcagccaccagtg

SEQ ID NO: 107824 - DNA, 1588 bp, Homo sapiens
  Payload ID: 1172
  Gene Symbol: ANXA13
  Gene Name: annexin A13
  Uniprot ID: P27216
  ENST ID: ENST00000262219
  CDS Start-End: 69-1142
gtaaactttgcctgtaggaggactgatctcttgatgaaatacagaaaaaccatctcagaaaaaggaaaatgggcaatcgtcatagccagtcgtacaccctctcagaaggcagtcaacagttgcctaaaggggactcccaaccctcgacagtcgtgcagcctctcagccacccatcacggaatggagagccagaggccccacagcctgctaaagcgagcagtcctcagggttttgatgtggatcgagatgccaaaaagctgaacaaagcctgcaaaggaatggggaccaatgaagcagccatcattgaaatcttatcgggcaggacatcagatgagaggcaacaaatcaagcaaaagtacaaggcaacgtacggcaaggagctggaggaagtactcaagagtgagctgagtggaaacttcgagaagacagcgttggcccttctggaccgtcccagcgagtacgccgcccggcagctgcagaaggctatgaagggtctgggcacagatgagtccgtcctcattgaggtcctgtgcacgaggaccaataaggaaatcatcgccattaaagaggcctaccaaaggctatttgataggagcctcgaatcagatgtcaaaggtgatacaagtggaaacctaaaaaaaatcctggtgtctctgctgcaggctaatcgcaatgaaggagatgacgtggacaaagatctagctggtcaggatgccaaagatctgtatgatgcaggggaaggccgctggggcactgatgagcttgcgttcaatgaagtcctggccaagaggagctacaagcagttacgagccacctttcaagcctatcaaattctcattggcaaagacatagaagaagccattgaagaagaaacatcaggcgacttgcagaaggcctatttaactctcgtgagatgtgcccaggattgtgaggactattttgctgaacgtctgtacaagtcgatgaagggtgcggggaccgatgaggagacgttgattcgcatagtcgtgaccagggccgaggtggaccttcaggggatcaaagcaaagttccaagagaagtatcagaagtctctctctgacatggttcgctcagatacctccggggacttccggaaactgctagtagccctcttgcactgagccaagccagggcaataggaacacagggtggaaccgcctttgtcaagagcacattccaaatcaaacttgcaaatgagactcccgcacgaaaacccttaagagtcccggattactttcttggcagcttaagtggcgcagccaggccaagctgtgtaagttaagggcagtaacgttaagatgcgtgggcagggcaccttgaactctggcttagcaagcatctaggctgcctcttcactttcttttagcatggtaactggatgttttctaaacactaatgaaatcagcagttgatgaaaaaactatgcatttgtaatggcacatttagaaggatatgcatcacacaagtaaggtacaggaaagacaaaattaaacaatttattaattttccttctgtgtgttcaatttgaaagcctcattgttaattaaagttgtggattatgcctcta

SEQ ID NO: 107825 - DNA, 1469 bp, Homo sapiens
  Payload ID: 1172
  Gene Symbol: ANXA13
  Gene Name: annexin A13
  Uniprot ID: P27216
  ENST ID: ENST00000419625
  CDS Start-End: 74-1024
ctgttgtaaactttgcctgtaggaggactgatctcttgatgaaatacagaaaaaccatctcagaaaaaggaaaatgggcaatcgtcatgctaaagcgagcagtcctcagggttttgatgtggatcgagatgccaaaaagctgaacaaagcctgcaaaggaatggggaccaatgaagcagccatcattgaaatcttatcgggcaggacatcagatgagaggcaacaaatcaagcaaaagtacaaggcaacgtacggcaaggagctggaggaagtactcaagagtgagctgagtggaaacttcgagaagacagcgttggcccttctggaccgtcccagcgagtacgccgcccggcagctgcagaaggctatgaagggtctgggcacagatgagtccgtcctcattgaggtcctgtgcacgaggaccaataaggaaatcatcgccattaaagaggcctaccaaaggctatttgataggagcctcgaatcagatgtcaaaggtgatacaagtggaaacctaaaaaaaatcctggtgtctctgctgcaggctaatcgcaatgaaggagatgacgtggacaaagatctagctggtcaggatgccaaagatctgtatgatgcaggggaaggccgctggggcactgatgagcttgcgttcaatgaagtcctggccaagaggagctacaagcagttacgagccacctttcaagcctatcaaattctcattggcaaagacatagaagaagccattgaagaagaaacatcaggcgacttgcagaaggcctatttaactctcgtgagatgtgcccaggattgtgaggactattttgctgaacgtctgtacaagtcgatgaagggtgcggggaccgatgaggagacgttgattcgcatagtcgtgaccagggccgaggtggaccttcaggggatcaaagcaaagttccaagagaagtatcagaagtctctctctgacatggttcgctcagatacctccggggacttccggaaactgctagtagccctcttgcactgagccaagccagggcaataggaacacagggtggaaccgcctttgtcaagagcacattccaaatcaaacttgcaaatgagactcccgcacgaaaacccttaagagtcccggattactttcttggcagcttaagtggcgcagccaggccaagctgtgtaagttaagggcagtaacgttaagatgcgtgggcagggcaccttgaactctggcttagcaagcatctaggctgcctcttcactttcttttagcatggtaactggatgttttctaaacactaatgaaatcagcagttgatgaaaaaactatgcatttgtaatggcacatttagaaggatatgcatcacacaagtaaggtacaggaaagacaaaattaaacaatttattaattttccttctgtgtgttcaatttgaaagcctcattgttaattaaagttgtggattatgcctct

SEQ ID NO: 107826 - DNA, 563 bp, Homo sapiens
  Payload ID: 1172
  Gene Symbol: ANXA13
  Gene Name: annexin A13
  ENST ID: ENST00000520519
  CDS Start-End: 225-563
agatagttcaggcaccaagagaactccatggcctcacatagctccagattagcagcctcaaggaaaatctcttctttctctaagtatctgtaagatgtcagggaagaattccagttggcttgggtcatggacctaccctgtgaataatcatagctaaagcgagcagtcctcagggttttgatgtggatcgagatgccaaaaagctgaacaaagcctgcaaaggaatggggaccaatgaagcagccatcattgaaatcttatcgggcaggacatcagatgagaggcaacaaatcaagcaaaagtacaaggcaacgtacggcaaggagctggaggaagtactcaagagtgagctgagtggaaacttcgagaagacagcgttggcccttctggaccgtcccagcgagtacgccgcccggcagctgcagaaggctatgaagggtctgggcacagatgagtccgtcctcattgaggtcctgtgcacgaggaccaataaggaaatcatcgccattaaagaggcctaccaaaggctatttgataggagcctcgaatcagatgtcaaaggt

SEQ ID NO: 107827 - DNA, 1444 bp, Homo sapiens
  Payload ID: 1173
  Gene Symbol: ANXA2
  Gene Name: annexin A2
  Uniprot ID: P07355
  ENST ID: ENST00000332680
  CDS Start-End: 73-1146
ctcagcatttggggacgctctcagctctcggcgcacggcccaggtaagcggggcgcgccctgcccgcccgcgatgggccgccagctagcggggtgtggagacgctgggaagaaggcttccttcaaaatgtctactgttcacgaaatcctgtgcaagctcagcttggagggtgatcactctacacccccaagtgcatatgggtctgtcaaagcctatactaactttgatgctgagcgggatgctttgaacattgaaacagccatcaagaccaaaggtgtggatgaggtcaccattgtcaacattttgaccaaccgcagcaatgcacagagacaggatattgccttcgcctaccagagaaggaccaaaaaggaacttgcatcagcactgaagtcagccttatctggccacctggagacggtgattttgggcctattgaagacacctgctcagtatgacgcttctgagctaaaagcttccatgaaggggctgggaaccgacgaggactctctcattgagatcatctgctccagaaccaaccaggagctgcaggaaattaacagagtctacaaggaaatgtacaagactgatctggagaaggacattatttcggacacatctggtgacttccgcaagctgatggttgccctggcaaagggtagaagagcagaggatggctctgtcattgattatgaactgattgaccaagatgctcgggatctctatgacgctggagtgaagaggaaaggaactgatgttcccaagtggatcagcatcatgaccgagcggagcgtgccccacctccagaaagtatttgataggtacaagagttacagcccttatgacatgttggaaagcatcaggaaagaggttaaaggagacctggaaaatgctttcctgaacctggttcagtgcattcagaacaagcccctgtattttgctgatcggctgtatgactccatgaagggcaaggggacgcgagataaggtcctgatcagaatcatggtctcccgcagtgaagtggacatgttgaaaattaggtctgaattcaagagaaagtacggcaagtccctgtactattatatccagcaagacactaagggcgactaccagaaagcgctgctgtacctgtgtggtggagatgactgaagcccgacacggcctgagcgtccagaaatggtgctcaccatgcttccagctaacaggtctagaaaaccagcttgcgaataacagtccccgtggccatccctgtgagggtgacgttagcattacccccaacctcattttagttgcctaagcattgcctggccttcctgtctagtctctcctgtaagccaaagaaatgaacattccaaggagttggaagtgaagtctatgatgtgaaacactttgcctcctgtgtactgtgtcataaacagatgaataaactgaatttgtactttagaaa

SEQ ID NO: 107828 - DNA, 1676 bp, Homo sapiens
  Payload ID: 1173
  Gene Symbol: ANXA2
  Gene Name: annexin A2
  Uniprot ID: P07355
  ENST ID: ENST00000396024
  CDS Start-End: 161-1180
gctcagcatttggggacgctctcagctctcggcgcacggcccagggtgaaaatgtttgccattaaactcacatgaagtaggaaatatttatatggatacaaaaggcacctgcatgggataatgtcaaatttcatagatactgctttgtgcttccttcaaaatgtctactgttcacgaaatcctgtgcaagctcagcttggagggtgatcactctacacccccaagtgcatatgggtctgtcaaagcctatactaactttgatgctgagcgggatgctttgaacattgaaacagccatcaagaccaaaggtgtggatgaggtcaccattgtcaacattttgaccaaccgcagcaatgcacagagacaggatattgccttcgcctaccagagaaggaccaaaaaggaacttgcatcagcactgaagtcagccttatctggccacctggagacggtgattttgggcctattgaagacacctgctcagtatgacgcttctgagctaaaagcttccatgaaggggctgggaaccgacgaggactctctcattgagatcatctgctccagaaccaaccaggagctgcaggaaattaacagagtctacaaggaaatgtacaagactgatctggagaaggacattatttcggacacatctggtgacttccgcaagctgatggttgccctggcaaagggtagaagagcagaggatggctctgtcattgattatgaactgattgaccaagatgctcgggatctctatgacgctggagtgaagaggaaaggaactgatgttcccaagtggatcagcatcatgaccgagcggagcgtgccccacctccagaaagtatttgataggtacaagagttacagcccttatgacatgttggaaagcatcaggaaagaggttaaaggagacctggaaaatgctttcctgaacctggttcagtgcattcagaacaagcccctgtattttgctgatcggctgtatgactccatgaagggcaaggggacgcgagataaggtcctgatcagaatcatggtctcccgcagtgaagtggacatgttgaaaattaggtctgaattcaagagaaagtacggcaagtccctgtactattatatccagcaagacactaagggcgactaccagaaagcgctgctgtacctgtgtggtggagatgactgaagcccgacacggcctgagcgtccagaaatggtgctcaccatgcttccagctaacaggtctagaaaaccagcttgcgaataacagtccccgtggccatccctgtgagggtgacgttagcattacccccaacctcattttagttgcctaagcattgcctggccttcctgtctagtctctcctgtaagccaaagaaatgaacattccaaggagttggaagtgaagtctatgatgtgaaacactttgcctcctgtgtactgtgtcataaacagatgaataaactgaatttgtactttagaaacacgtactttgtggccctgctttcaactgaattgtttgaaaattaaacgtgcttggggttcagctggtgaggctgtccctgtaggaagaaagctctgggactgagctgtacagtatggttgcccctatccaagtgtcgctatttaagttaaatttaaatgaaataaaataaaataaaatcagttcctgagtcacacaa

SEQ ID NO: 107829 - DNA, 1435 bp, Homo sapiens
  Payload ID: 1173
  Gene Symbol: ANXA2
  Gene Name: annexin A2
  Uniprot ID: P07355
  ENST ID: ENST00000451270
  CDS Start-End: 113-1132
gcctcgcctagggaggatgtggcgggtataaaagccccacccaggccagccggctctgctcagcatttggggacgctctcagctctcggcgcacggcccagcttccttcaaaatgtctactgttcacgaaatcctgtgcaagctcagcttggagggtgatcactctacacccccaagtgcatatgggtctgtcaaagcctatactaactttgatgctgagcgggatgctttgaacattgaaacagccatcaagaccaaaggtgtggatgaggtcaccattgtcaacattttgaccaaccgcagcaatgcacagagacaggatattgccttcgcctaccagagaaggaccaaaaaggaacttgcatcagcactgaagtcagccttatctggccacctggagacggtgattttgggcctattgaagacacctgctcagtatgacgcttctgagctaaaagcttccatgaaggggctgggaaccgacgaggactctctcattgagatcatctgctccagaaccaaccaggagctgcaggaaattaacagagtctacaaggaaatgtacaagactgatctggagaaggacattatttcggacacatctggtgacttccgcaagctgatggttgccctggcaaagggtagaagagcagaggatggctctgtcattgattatgaactgattgaccaagatgctcgggatctctatgacgctggagtgaagaggaaaggaactgatgttcccaagtggatcagcatcatgaccgagcggagcgtgccccacctccagaaagtatttgataggtacaagagttacagcccttatgacatgttggaaagcatcaggaaagaggttaaaggagacctggaaaatgctttcctgaacctggttcagtgcattcagaacaagcccctgtattttgctgatcggctgtatgactccatgaagggcaaggggacgcgagataaggtcctgatcagaatcatggtctcccgcagtgaagtggacatgttgaaaattaggtctgaattcaagagaaagtacggcaagtccctgtactattatatccagcaagacactaagggcgactaccagaaagcgctgctgtacctgtgtggtggagatgactgaagcccgacacggcctgagcgtccagaaatggtgctcaccatgcttccagctaacaggtctagaaaaccagcttgcgaataacagtccccgtggccatccctgtgagggtgacgttagcattacccccaacctcattttagttgcctaagcattgcctggccttcctgtctagtctctcctgtaagccaaagaaatgaacattccaaggagttggaagtgaagtctatgatgtgaaacactttgcctcctgtgtactgtgtcataaacagatgaataaactgaatttgtactttagaaacacgt

SEQ ID NO: 107830 - DNA, 1444 bp, Homo sapiens
  Payload ID: 1173
  Gene Symbol: ANXA2
  Gene Name: annexin A2
  Uniprot ID: P07355
  ENST ID: ENST00000421017
  CDS Start-End: 137-1156
gctcagcatttggggacgctctcagctctcggcgcacggcccaggttatcttgtagcatagcaacttcggatttcactctacccggagagtttcccgcttggttgaacacattggcctcaggaagcttccttcaaaatgtctactgttcacgaaatcctgtgcaagctcagcttggagggtgatcactctacacccccaagtgcatatgggtctgtcaaagcctatactaactttgatgctgagcgggatgctttgaacattgaaacagccatcaagaccaaaggtgtggatgaggtcaccattgtcaacattttgaccaaccgcagcaatgcacagagacaggatattgccttcgcctaccagagaaggaccaaaaaggaacttgcatcagcactgaagtcagccttatctggccacctggagacggtgattttgggcctattgaagacacctgctcagtatgacgcttctgagctaaaagcttccatgaaggggctgggaaccgacgaggactctctcattgagatcatctgctccagaaccaaccaggagctgcaggaaattaacagagtctacaaggaaatgtacaagactgatctggagaaggacattatttcggacacatctggtgacttccgcaagctgatggttgccctggcaaagggtagaagagcagaggatggctctgtcattgattatgaactgattgaccaagatgctcgggatctctatgacgctggagtgaagaggaaaggaactgatgttcccaagtggatcagcatcatgaccgagcggagcgtgccccacctccagaaagtatttgataggtacaagagttacagcccttatgacatgttggaaagcatcaggaaagaggttaaaggagacctggaaaatgctttcctgaacctggttcagtgcattcagaacaagcccctgtattttgctgatcggctgtatgactccatgaagggcaaggggacgcgagataaggtcctgatcagaatcatggtctcccgcagtgaagtggacatgttgaaaattaggtctgaattcaagagaaagtacggcaagtccctgtactattatatccagcaagacactaagggcgactaccagaaagcgctgctgtacctgtgtggtggagatgactgaagcccgacacggcctgagcgtccagaaatggtgctcaccatgcttccagctaacaggtctagaaaaccagcttgcgaataacagtccccgtggccatccctgtgagggtgacgttagcattacccccaacctcattttagttgcctaagcattgcctggccttcctgtctagtctctcctgtaagccaaagaaatgaacattccaaggagttggaagtgaagtctatgatgtgaaacactttgcctcctgtgtactgtgtcataaacagatgaataaactgaatttgt

SEQ ID NO: 107831 - DNA, 663 bp, Homo sapiens
  Payload ID: 1173
  Gene Symbol: ANXA2
  Gene Name: annexin A2
  ENST ID: ENST00000560468
  CDS Start-End: 333-663
gctcagcatttggggacgctctcagctctcggcgcacggcccagagacgctcttctggctcttccgtgacgcattacaacagccatccaggccggtccagttacgctgcattccttcctccttcccatttcggcggacctgcatccagctagagactagcagattgaatcgatattcattaagttaggaatggttggtggtcctaagagcctcagcaaccgagaggagtcttgttatttaaaaaacaacgatactgggcgtggtcgtgggcctgtagtcccagctgctcaagctagtggatctcttgagtccaaggccaatcttccttcaaaatgtctactgttcacgaaatcctgtgcaagctcagcttggagggtgatcactctacacccccaagtgcatatgggtctgtcaaagcctatactaactttgatgctgagcgggatgctttgaacattgaaacagccatcaagaccaaaggtgtggatgaggtcaccattgtcaacattttgaccaaccgcagcaatgcacagagacaggatattgccttcgcctaccagagaaggaccaaaaaggaacttgcatcagcactgaagtcagccttatctggccacctggagacggtgattttgggcctattgaagacacctgctcagtatgacg

SEQ ID NO: 107832 - DNA, 834 bp, Homo sapiens
  Payload ID: 1173
  Gene Symbol: ANXA2
  Gene Name: annexin A2
  ENST ID: ENST00000561022
  CDS Start-End: 56-265
gctcagcatttggggacgctctcagctctcggcgcacggcccagcttccttcaaaatgtctactgttcacgaaatcctgtgcaagctcagcttggagggtgatcactctacacccccaagtgcatatgggtctgtcaaagcctatactaactttgatgctgagcgggatgctttgaacattgaaacagccatcaagaccaaaggtgccagacctgagccacgtagctatcaaacactggaaaaggagtccttggtgcctttctaattgtgtggatgaggtcaccattgtcaacattttgaccaaccgcagcaatgcacagagacaggatattgccttcgcctaccagagaaggaccaaaaaggaacttgcatcagcactgaagtcagccttatctggccacctggagacggtgattttgggcctattgaagacacctgctcagtatgacgcttctgagctaaaagcttccatgaaggggctgggaaccgacgaggactctctcattgagatcatctgctccagaaccaaccaggagctgcaggaaattaacagagtctacaaggaaatgtacaagactgatctggagaaggacattatttcggacacatctggtgacttccgcaagctgatggttgccctggcaaagggtagaagagcagaggatggctctgtcattgattatgaactgattgaccaagatgctcgggatctctatgacgctggagtgaagaggaaaggaactgatgttcccaagtggatcagcatcatgaccgagcggagcgtgccccacctccagaaagtatttgataggtacaagagttacagcccttatg

SEQ ID NO: 107833 - DNA, 812 bp, Homo sapiens
  Payload ID: 1173
  Gene Symbol: ANXA2
  Gene Name: annexin A2
  ENST ID: ENST00000557906
  CDS Start-End: 285-812
gctcagcatttggggacgctctcagctctcggcgcacggcccaggttatcttgtagcatagcaacttcggatttcactctacccggagagtttcccgcttggttgaacacattggcctcaggaagagacgctcttctggctcttccgtgacgcattacaacagccatccaggccggtccagttacgctgcattccttcctccttcccatttcggcggacctgcatccagctagagactagcagattgaatcgatattcattaagttaggaatgcttccttcaaaatgtctactgttcacgaaatcctgtgcaagctcagcttggagggtgatcactctacacccccaagtgcatatgggtctgtcaaagcctatactaactttgatgctgagcgggatgctttgaacattgaaacagccatcaagaccaaaggtgtggatgaggtcaccattgtcaacattttgaccaaccgcagcaatgcacagagacaggatattgccttcgcctaccagagaaggaccaaaaaggaacttgcatcagcactgaagtcagccttatctggccacctggagacggtgattttgggcctattgaagacacctgctcagtatgacgcttctgagctaaaagcttccatgaaggggctgggaaccgacgaggactctctcattgagatcatctgctccagaaccaaccaggagctgcaggaaattaacagagtctacaaggaaatgtacaagactgatctggagaaggacattatttcggacacatctggtgacttccgcaagctgatggttgccctggcaaag

SEQ ID NO: 107834 - DNA, 718 bp, Homo sapiens
  Payload ID: 1173
  Gene Symbol: ANXA2
  Gene Name: annexin A2
  ENST ID: ENST00000560165
  CDS Start-End: 191-718
ctctcagctctcggcgcacggcccaggtaagcggggcgcgccctgcccgcccgcgatgggccgccagctagcggggtgtggagacgctgggaagaagggttatcttgtagcatagcaacttcggatttcactctacccggagagtttcccgcttggttgaacacattggcctcaggaagcttccttcaaaatgtctactgttcacgaaatcctgtgcaagctcagcttggagggtgatcactctacacccccaagtgcatatgggtctgtcaaagcctatactaactttgatgctgagcgggatgctttgaacattgaaacagccatcaagaccaaaggtgtggatgaggtcaccattgtcaacattttgaccaaccgcagcaatgcacagagacaggatattgccttcgcctaccagagaaggaccaaaaaggaacttgcatcagcactgaagtcagccttatctggccacctggagacggtgattttgggcctattgaagacacctgctcagtatgacgcttctgagctaaaagcttccatgaaggggctgggaaccgacgaggactctctcattgagatcatctgctccagaaccaaccaggagctgcaggaaattaacagagtctacaaggaaatgtacaagactgatctggagaaggacattatttcggacacatctggtgacttccgcaagctgatggttgccctggcaaag

SEQ ID NO: 107835 - DNA, 369 bp, Homo sapiens
  Payload ID: 1173
  Gene Symbol: ANXA2
  Gene Name: annexin A2
  ENST ID: ENST00000557904
  CDS Start-End: 127-369
attccagcaggaaaacaggatggaggaaggtacaaagcatgaatgagcctggcctgtccagcagtggcacatggagcggtgaagagtgaagatgtgggggaatgaggctgcccagcttccttcaaaatgtctactgttcacgaaatcctgtgcaagctcagcttggagggtgatcactctacacccccaagtgcatatgggtctgtcaaagcctatactaactttgatgctgagcgggatgctttgaacattgaaacagccatcaagaccaaaggtgtggatgaggtcaccattgtcaacattttgaccaaccgcagcaatgcacagagacaggatattgccttcgcctaccagagaaggaccaaaaag

SEQ ID NO: 107836 - DNA, 513 bp, Homo sapiens
  Payload ID: 1173
  Gene Symbol: ANXA2
  Gene Name: annexin A2
  ENST ID: ENST00000558558
  CDS Start-End: 111-513
gctcagcatttggggacgctctcagctctcggcgcacggcccagagacgctcttctggctcttccgtgacgcattacaacagccatccaggccggtccacttccttcaaaatgtctactgttcacgaaatcctgtgcaagctcagcttggagggtgatcactctacacccccaagtgcatatgggtctgtcaaagcctatactaactttgatgctgagcgggatgctttgaacattgaaacagccatcaagaccaaaggtgtggatgaggtcaccattgtcaacattttgaccaaccgcagcaatgcacagagacaggatattgccttcgcctaccagagaaggaccaaaaaggaacttgcatcagcactgaagtcagccttatctggccacctggagacggtgattttgggcctattgaagacacctgctcagtatgacgcttctgagctaaaagcttccatgaaggggctgggaaccgacgaggactctctcattgagatcatctgctcca

SEQ ID NO: 107837 - DNA, 755 bp, Homo sapiens
  Payload ID: 1173
  Gene Symbol: ANXA2
  Gene Name: annexin A2
  ENST ID: ENST00000559467
  CDS Start-End: 399-755
tttggggacgctctcagctctcggcgcacggcccaggttatcttgtagcatagcaacttcggatttcactctacccggagagtttcccgcttggttgaacacattggcctcaggaagagacgctcttctggctcttccgtgacgcattacaacagccatccaggccggtccagttacgctgcattccttcctccttcccatttcggcggacctgcatccagctagagactagcagattgaatcgatattcattaagttaggaatgatggagcctggctctgtcacccagcctggagtgtagtcgcacgatctctcctcactgtagcctccgcctcccaggttcaagtgattctccagcctcaccctcccgagtagctgggattacagcttccttcaaaatgtctactgttcacgaaatcctgtgcaagctcagcttggagggtgatcactctacacccccaagtgcatatgggtctgtcaaagcctatactaactttgatgctgagcgggatgctttgaacattgaaacagccatcaagaccaaaggtgtggatgaggtcaccattgtcaacattttgaccaaccgcagcaatgcacagagacaggatattgccttcgcctaccagagaaggaccaaaaaggaacttgcatcagcactgaagtcagccttatctggccacctggagacggtgattttgggcctattgaagacacctgctcagtatgacgcttctgagctaaaagcttccatgaag

SEQ ID NO: 107838 - DNA, 780 bp, Homo sapiens
  Payload ID: 1173
  Gene Symbol: ANXA2
  Gene Name: annexin A2
  ENST ID: ENST00000558985
  CDS Start-End: 354-780
gggaggatgtggcgggtataaaagccccacccaggccagccggctctgctcagcatttggggacgctctcagctctcggcgcacggcccagcttccttcaaaatgtctactgttcacgaaatcctgtgcaagctcagcttggagggtgatgtgtggatgaggtcaccattgtcaacattttgaccaaccgcagcaatgcacagagacaggatattgccttcgcctaccagagaaggaccaaaaaggaacttgcatcagcactgaagtcagccttatctggccacctggagacggtgattttgggcctattgaagacacctgctcagtatgacgcttctgagctaaaagcttccatgaaggggctgggaaccgacgaggactctctcattgagatcatctgctccagaaccaaccaggagctgcaggaaattaacagagtctacaaggaaatgtacaagactgatctggagaaggacattatttcggacacatctggtgacttccgcaagctgatggttgccctggcaaagggtagaagagcagaggatggctctgtcattgattatgaactgattgaccaagatgctcgggatctctatgacgctggagtgaagaggaaaggaactgatgttcccaagtggatcagcatcatgaccgagcggagcgtgccccacctccagaaagtatttgataggtacaagagttacagcccttatgacatgttggaaagcatcaggaaagaggttaaaggagacctggaaaatgctttcctgaacctgg

SEQ ID NO: 107839 - DNA, 561 bp, Homo sapiens
  Payload ID: 1173
  Gene Symbol: ANXA2
  Gene Name: annexin A2
  ENST ID: ENST00000559725
  CDS Start-End: 427-561
aggccagccggctctgctcagcatttggggacgctctcagctctcggcgcacggcccagggtgaaaatgtttgccattaaactcacatgaagtaggaaatatttatatggatacaaaaggcacctgcatgggataatgtcaaatttcatagatactgctttgtgcttccttcaaaatgtctactgttcacgaaatcctgtgcaagctcagcttggagggtgatgtgtggatgaggtcaccattgtcaacattttgaccaaccgcagcaatgcacagagacaggatattgccttcgcctaccagagaaggaccaaaaaggaacttgcatcagcactgaagtcagccttatctggccacctggagacggtgattttgggcctattgaagacacctgctcagtatgacgcttctgagctaaaagcttccatgaaggggctgggaaccgacgaggactctctcattgagatcatctgctccagaaccaaccaggagctgcaggaaattaacagagtctacaaggaaatgtacaagactgatctggagaaggacattatttcggac

SEQ ID NO: 107840 - DNA, 828 bp, Homo sapiens
  Payload ID: 1173
  Gene Symbol: ANXA2
  Gene Name: annexin A2
  ENST ID: ENST00000558503
  CDS Start-End: 230-628
gggacgctctcagctctcggcgcacggcccaggttatcttgtagcatagcaacttcggatttcactctacccggagagtttcccgcttggttgaacacattggcctcaggaagggtgaaaatgtttgccattaaactcacatgaagtaggaaatatttatatggatacaaaaggcacctgcatgggataatgtcaaatttcatagatactgctttgtgcttccttcaaaatgtctactgttcacgaaatcctgtgcaagctcagcttggagggtgatcactctacacccccaagtgcatatgggtctgtcaaagcctatactaactttgatgctgagcgggatgctttgaacattgaaacagccatcaagaccaaaggtgtggatgaggtcaccattgtcaacattttgaccaaccgcagcaatgcacagagacaggatattgccttcgcctaccagagaaggaccaaaaaggaacttgcatcagcactgaagtcagccttatctggccacctggagacggtgattttgggcctattgaagacacctgctcagtatgacgcttctgagctaaaagcttccatgaaggtaaatgcatgggctgggaaccgacgaggactctctcattgagatcatctgctccagaaccaaccaggagctgcaggaaattaacagagtctacaaggaaatgtacaagactgatctggagaaggacattatttcggacacatctggtgacttccgcaagctgatggttgccctggcaaagggtagaagagcagaggatggctctgtcattgattatgaactgattgaccaagatgctcggg

SEQ ID NO: 107841 - DNA, 744 bp, Homo sapiens
  Payload ID: 1173
  Gene Symbol: ANXA2
  Gene Name: annexin A2
  ENST ID: ENST00000559176
  CDS Start-End: 1-744
gtaaccagattctaatctggtgtcagcaatgccaagaaaattctccaatatcaagtgtggatgaggtcaccattgtcaacattttgaccaaccgcagcaatgcacagagacaggatattgccttcgcctaccagagaaggaccaaaaaggaacttgcatcagcactgaagtcagccttatctggccacctggagacggtgattttgggcctattgaagacacctgctcagtatgacgcttctgagctaaaagcttccatgaaggggctgggaaccgacgaggactctctcattgagatcatctgctccagaaccaaccaggagctgcaggaaattaacagagtctacaaggaaatgtacaagactgatctggagaaggacattatttcggacacatctggtgacttccgcaagctgatggttgccctggcaaagggtagaagagcagaggatggctctgtcattgattatgaactgattgaccaagatgctcgggatctctatgacgctggagtgaagaggaaaggaactgatgttcccaagtggatcagcatcatgaccgagcggagcgtgccccacctccagaaagtatttgataggtacaagagttacagcccttatgacatgttggaaagcatcaggaaagaggttaaaggagacctggaaaatgctttcctgaacctggttcagtgcattcagaacaagcccctgtattttgctgatcggctgtatgactccatgaagg

SEQ ID NO: 107842 - DNA, 777 bp, Homo sapiens
  Payload ID: 1173
  Gene Symbol: ANXA2
  Gene Name: annexin A2
  ENST ID: ENST00000560367
  CDS Start-End: 96-777
gttatcttgtagcatagcaacttcggatttcactctacccggagagtttcccgcttggttgaacacattggcctcaggaaggtacttccttcaaaatgtctactgttcacgaaatcctgtgcaagctcagcttggagggtgatcactctacacccccaagtgcatatgggtctgtcaaagcctatactaactttgatgctgagcgggatgctttgaacattgaaacagccatcaagaccaaaggtgtggatgaggtcaccattgtcaacattttgaccaaccgcagcaatgcacagagacaggatattgccttcgcctaccagagaaggaccaaaaaggaacttgcatcagcactgaagtcagccttatctggccacctggagacggtgattttgggcctattgaagacacctgctcagtatgacgcttctgagctaaaagcttccatgaaggggctgggaaccgacgaggactctctcattgagatcatctgctccagaaccaaccaggagctgcaggaaattaacagagtctacaaggaaatgtacaagactgatctggagaaggacattatttcggacacatctggtgacttccgcaagctgatggttgccctggcaaagggtagaagagcagaggatggctctgtcattgattatgaactgattgaccaagatgctcgggatctctatgacgctggagtgaagaggaaaggaactgatgttcccaagtggatcagcatcatgaccgagcggagcgtgccccacctccagaaag

SEQ ID NO: 107843 - DNA, 521 bp, Homo sapiens
  Payload ID: 1173
  Gene Symbol: ANXA2
  Gene Name: annexin A2
  ENST ID: ENST00000559370
  CDS Start-End: 326-521
gctcagcatttggggacgctctcagctctcggcgcacggcccagagacgctcttctggctcttccgtgacgcattacaacagccatccaggccggtccagttacgctgcattccttcctccttcccatttcggcggacctgcatccagctagagactagcagattgaatcgatattcattaagttaggaatgatggagcctggctctgtcacccagcctggagtgtagtcgcacgatctctcctcactgtagcctccgcctcccaggttcaagtgattctccagcctcaccctcccgagtagctgggattacagcttccttcaaaatgtctactgttcacgaaatcctgtgcaagctcagcttggagggtgatcactctacacccccaagtgcatatgggtctgtcaaagcctatactaactttgatgctgagcgggatgctttgaacattgaaacagccatcaagaccaaaggtgtggatgaggtcaccattgtcaacattttgaccaaccgcagcaatg

SEQ ID NO: 107844 - DNA, 594 bp, Homo sapiens
  Payload ID: 1173
  Gene Symbol: ANXA2
  Gene Name: annexin A2
  ENST ID: ENST00000560389
  CDS Start-End: 67-594
atggctgtgatctttctctctgtgtcttaatcacttggaataaagaaccattgtgcttccttcaaaatgtctactgttcacgaaatcctgtgcaagctcagcttggagggtgatcactctacacccccaagtgcatatgggtctgtcaaagcctatactaactttgatgctgagcgggatgctttgaacattgaaacagccatcaagaccaaaggtgtggatgaggtcaccattgtcaacattttgaccaaccgcagcaatgcacagagacaggatattgccttcgcctaccagagaaggaccaaaaaggaacttgcatcagcactgaagtcagccttatctggccacctggagacggtgattttgggcctattgaagacacctgctcagtatgacgcttctgagctaaaagcttccatgaaggggctgggaaccgacgaggactctctcattgagatcatctgctccagaaccaaccaggagctgcaggaaattaacagagtctacaaggaaatgtacaagactgatctggagaaggacattatttcggacacatctggtgacttccgcaagctgatggttgccctggcaaag

SEQ ID NO: 107845 - DNA, 669 bp, Homo sapiens
  Payload ID: 1173
  Gene Symbol: ANXA2
  Gene Name: annexin A2
  ENST ID: ENST00000559350
  CDS Start-End: 222-669
gaagggaagagagctcaaaggtcctgcagggtggaagtctgcatttcacagttttataagtgtcttttgtatcctttaatatagtgcaggctcagcgtatgcttgggtgaaaatgtttgccattaaactcacatgaagtaggaaatatttatatggatacaaaaggcacctgcatgggataatgtcaaatttcatagatactgctttgtgcttccttcaaaatgtctactgttcacgaaatcctgtgcaagctcagcttggagggtgatcactctacacccccaagtgcatatgggtctgtcaaagcctatactaactttgatgctgagcgggatgctttgaacattgaaacagccatcaagaccaaaggtgtggatgaggtcaccattgtcaacattttgaccaaccgcagcaatgcacagagacaggatattgccttcgcctaccagagaaggaccaaaaaggaacttgcatcagcactgaagtcagccttatctggccacctggagacggtgattttgggcctattgaagacacctgctcagtatgacgcttctgagctaaaagcttccatgaaggggctgggaaccgacgaggactctctcattgagatcatctgctccagaaccaaccaggagctgcaggaaattaacagagtctacaaggaaa

SEQ ID NO: 107846 - DNA, 558 bp, Homo sapiens
  Payload ID: 1173
  Gene Symbol: ANXA2
  Gene Name: annexin A2
  ENST ID: ENST00000559956
  CDS Start-End: 202-558
tcagcatttggggacgctctcagctctcggcgcacggcccagagacgctcttctggctcttccgtgacgcattacaacagccatccaggccggtccagttacgctgcattccttcctccttcccatttcggcggacctgcatccagctagagactagcagattgaatcgatattcattaagttaggaatgcttccttcaaaatgtctactgttcacgaaatcctgtgcaagctcagcttggagggtgatcactctacacccccaagtgcatatgggtctgtcaaagcctatactaactttgatgctgagcgggatgctttgaacattgaaacagccatcaagaccaaaggtgtggatgaggtcaccattgtcaacattttgaccaaccgcagcaatgcacagagacaggatattgccttcgcctaccagagaaggaccaaaaaggaacttgcatcagcactgaagtcagccttatctggccacctggagacggtgattttgggcctattgaagacacctgctcagtatgacgcttctgagctaaaagcttccatgaag

SEQ ID NO: 107847 - DNA, 560 bp, Homo sapiens
  Payload ID: 1173
  Gene Symbol: ANXA2
  Gene Name: annexin A2
  ENST ID: ENST00000558986
  CDS Start-End: 161-560
actctcagtgtgtcacagaggcacgaagggaagagagctcaaagggtgaaaatgtttgccattaaactcacatgaagtaggaaatatttatatggatacaaaaggcacctgcatgggataatgtcaaatttcatagatactgctttgtgcttccttcaaaatgtctactgttcacgaaatcctgtgcaagctcagcttggagggtgatcactctacacccccaagtgcatatgggtctgtcaaagcctatactaactttgatgctgagcgggatgctttgaacattgaaacagccatcaagaccaaaggtgtggatgaggtcaccattgtcaacattttgaccaaccgcagcaatgcacagagacaggatattgccttcgcctaccagagaaggaccaaaaaggaacttgcatcagcactgaagtcagccttatctggccacctggagacggtgattttgggcctattgaagacacctgctcagtatgacgcttctgagctaaaagcttccatgaaggggctgggaaccgacgaggactctctcattgagatcatctgct

SEQ ID NO: 107848 - DNA, 733 bp, Homo sapiens
  Payload ID: 1173
  Gene Symbol: ANXA2
  Gene Name: annexin A2
  ENST ID: ENST00000557986
  CDS Start-End: 720-733
ggacgctctcagctctcggcgcacggcccaggttatcttgtagcatagcaacttcggatttcactctacccggagagtttcccgcttggttgaacacattggcctcaggaagagacgctcttctggctcttccgtgacgcattacaacagccatccaggccggtccagttacgctgcattccttcctccttcccatttcggcggacctgcatccagctagagactagcagattgaatcgatattcattaagttaggaatggttggtggtcctaagagcctcagcaaccgagaggagtcttgttatttaaaaaacaacgatactgggcgtggtcgtgggcctgtagtcccagctgctcaagctagtggatctcttgagtccaaggccaatgcggccaggccctgttgaaaatacaatatgtgggccataaaacactgaaattgagttgcagacttgaaggcctggatttcccaaccctgaaagtgcttcatgccaagtgacatcattcttcctgccggtctctttccacccactccaaccccagatcaggataccagcagagagaggctgtgagagcatgaagctgcaacaagtcagtagggagcaaacaaatattgattcagatcaggccacagaagagacaagctggagcaagtgctgtgtgtccctcctgctcagtttgatcgaggtcactgggccgaattccaggaattctggggaatgagttggccctg

SEQ ID NO: 107849 - DNA, 2339 bp, Homo sapiens
  Payload ID: 1173
  Gene Symbol: ANXA2
  Gene Name: annexin A2
  ENST ID: ENST00000560014
  CDS Start-End: 1023-1715
acatactctcgccaaaccagttttatgaaaatatttagactaaacaaagtgaagagaatagaaagctgtatttgcatgtgtgcagtttccttgatcaaagaatattaagcaaaaagagaccaaagcaggagtcactgcaatttaaatgtcgttcctgtctatttcaggacgcagctctactctgttttctttattcttggggtgattatgttgatgacctgtcttgtctctgttgagataaatttaccaccaattgagcactccttattggcagggattgggtgtatcaattccgagaactgtatgattgcaaaggtggaaagccaattcatcaggctattgttttgctgccccattaagtatattaactggaagatgacttcatttcaaccatttcaaatcttaaatacaacagattcagtcctttatggaatgagttaaggtcagaaaatctgtccatcgtctttctcataaatactttaatatcttccaagtatcattggactaagaaagtaattatgggtaataataaagattccaattaagaattagggcaacatgaaaatgctactaatttcgattcacatcgtagctttcaggtccttctcaatatgtttaattacttgtgagaaatacagaagtagtggctggttcggcaagcccatcaccttttatgagaagtagaagactcagttttatcctgtctgaacaggttgcattagccatggggaacattttgtttttgcattcacacatcagtctccccaggttctgtttacacagaggaagagaaagactggctagtttagtagtccatcccaacccaaggcagaccatctctgaggtttagtttttacagtcgtaagatgggaattgcatctgtttgcaaaaactactccaatatcgtcagatgaaatggtccaaggagtagaaattagcataatgaatcgctgtgcttcagagtaaaggagagcctcttcataaagactttttgttgtactttttttccagcttccttcaaaatgtctactgttcacgaaatcctgtgcaagctcagcttggagggtgatcactctacacccccaagtgcatatgggtctgtcaaagcctatactaactttgatgctgagcgggatgctttgaacattgaaacagccatcaagaccaaaggtgtggatgaggtcaccattgtcaacattttgaccaaccgcagcaatgcacagagacaggatattgccttcgcctaccagagaaggaccaaaaaggaacttgcatcagcactgaagtcagccttatctggccacctggagacggtgattttgggcctattgaagacacctgctcagtatgacgcttctgagctaaaagcttccatgaaggggctgggaaccgacgaggactctctcattgagatcatctgctccagaaccaaccaggagctgcaggaaattaacagagtctacaaggaaatgtacaagactgatctggagaaggacattatttcggacacatctggtgacttccgcaagctgatggttgccctggcaaagggtagaagagcagaggatggctctgtcattgattatgaactgattgaccaagatgctcgggatctctatgacgctggagtgaagaggaaaggaactgatgttcccaagtggatcagcatcatgaccgagcggagcgtgccccacctccagaaaggtggtatttgataggtacaagagttacagcccttatgacatgttggaaagcatcaggaaagaggttaaaggagacctggaaaatgctttcctgaacctggttcagtgcattcagaacaagcccctgtattttgctgatcggctgtatgactccatgaagggcaaggggacgcgagataaggtcctgatcagaatcatggtctcccgcagtgaagtggacatgttgaaaattaggtctgaattcaagagaaagtacggcaagtccctgtactattatatccagcaagacactaagggcgactaccagaaagcgctgctgtacctgtgtggtggagatgactgaagcccgacacggcctgagcgtccagaaatggtgctcaccatgcttccagctaacaggtctagaaaaccagcttgcgaataacagtccccgtggccatccctgtgagggtgacgttagcattacccccaacctcattttagttgcctaagcattgcctggccttcctgtctagtctctcctgtaagccaaagaaatgaacattccaaggagttggaagtgaagtctatgatgtgaaacactttgcctcctgtgtactgtgtcataaacagatgaataaactgaatttgtacttt

SEQ ID NO: 107850 - DNA, 802 bp, Homo sapiens
  Payload ID: 1173
  Gene Symbol: ANXA2
  Gene Name: annexin A2
  ENST ID: ENST00000559780
  CDS Start-End: 363-802
gggacgctctcagctctcggcgcacggcccaggcggccaggccctgttgaaaatacaatatgtgggccataaaacactgaaattgagttgcagacttgaaggcctggatttcccaaccctgaaagtgcttcatgccaagtgacatcattcttcctgccggtctctttccacccactccaaccccagatcaggataccagcagagagaggctgtgagagcatgaagctgcaacaagtcagtagggagcaaacaaatattgattcagatcaggccacagaagagacaagctggagcaagtgctgtgtgtccctcctgctcagtttgatcgaggtcactgggccgaattccaggaattctggggaatgagttggccctgtgactcagtcattaatcaagaccataaaaccaaggagaagaatatctgctttcaaaaagcttccttcaaaatgtctactgttcacgaaatcctgtgcaagctcagcttggagggtgatcactctacacccccaagtgcatatgggtctgtcaaagcctatactaactttgatgctgagcgggatgctttgaacattgaaacagccatcaagaccaaaggtgtggatgaggtcaccattgtcaacattttgaccaaccgcagcaatgcacagagacaggatattgccttcgcctaccagagaaggaccaaaaaggaacttgcatcagcactgaagtcagccttatctggccacctggagacggtgattttgggcctattgaagacacctgctcagtatgacgcttctgagctaaaagcttccatgaa

SEQ ID NO: 107851 - DNA, 665 bp, Homo sapiens
  Payload ID: 1173
  Gene Symbol: ANXA2
  Gene Name: annexin A2
  ENST ID: ENST00000560466
  CDS Start-End: 248-665
gctcagcatttggggacgctctcagctctcggcgcacggcccaggtgtggatgaggtcaccattgtcaacattttgaccaaccgcagcaatgcacagagacaggatattgccttcgcctaccagagaaggaccaaaaaggaacttgcatcagcactgaagtcagccttatctggccacctggagacggtgattttgggcctattgaagacacctgctcagtatgacgcttctgagctaaaagcttccatgaaggggctgggaaccgacgaggactctctcattgagatcatctgctccagaaccaaccaggagctgcaggaaattaacagagtctacaaggaaatgtacaagactgatctggagaaggacattatttcggacacatctggtgacttccgcaagctgatggttgccctggcaaagggtagaagagcagaggatggctctgtcattgattatgaactgattgaccaagatgctcgggatctctatgacgctggagtgaagaggaaaggaactgatgttcccaagtggatcagcatcatgaccgagcggagcgtgccccacctccagaaagtatttgataggtacaagagttacagcccttatgacatgttggaaagcatcaggaaagaggttaaaggagacctggaaaatgctttcc

SEQ ID NO: 107852 - DNA, 878 bp, Homo sapiens
  Payload ID: 1173
  Gene Symbol: ANXA2
  Gene Name: annexin A2
  ENST ID: ENST00000559818
  CDS Start-End: 110-878
actgcctgctacgaggccgcgcagagatgccccaggcgcggagagaagcggagcacagccgtgctagggacaggggcgccaccctgggcgggactgagcttccttcaaaatgtctactgttcacgaaatcctgtgcaagctcagcttggagggtgatcactctacacccccaagtgcatatgggtctgtcaaagcctatactaactttgatgctgagcgggatgctttgaacattgaaacagccatcaagaccaaaggtgtggatgaggtcaccattgtcaacattttgaccaaccgcagcaatgcacagagacaggatattgccttcgcctaccagagaaggaccaaaaaggaacttgcatcagcactgaagtcagccttatctggccacctggagacggtgattttgggcctattgaagacacctgctcagtatgacgcttctgagctaaaagcttccatgaaggggctgggaaccgacgaggactctctcattgagatcatctgctccagaaccaaccaggagctgcaggaaattaacagagtctacaaggaaatgtacaagactgatctggagaaggacattatttcggacacatctggtgacttccgcaagctgatggttgccctggcaaagggtagaagagcagaggatggctctgtcattgattatgaactgattgaccaagatgctcgggatctctatgacgctggagtgaagaggaaaggaactgatgttcccaagtggatcagcatcatgaccgagcggagcgtgccccacctccagaaagtatttgataggtacaagagttacagcccttatgacatgttggaaagcatcaggaaagaggttaaaggagacctggaaaatgctttcc

SEQ ID NO: 107853 - DNA, 564 bp, Homo sapiens
  Payload ID: 1173
  Gene Symbol: ANXA2
  Gene Name: annexin A2
  ENST ID: ENST00000559113
  CDS Start-End: 388-564
gctcagcatttggggacgctctcagctctcggcgcacggcccaggttatcttgtagcatagcaacttcggatttcactctacccggagagtttcccgcttggttgaacacattggcctcaggaagcttccttcaaaatgtctactgttcacgaaatcctgtgcaagctcagcttggagggtgatgtgtggatgaggtcaccattgtcaacattttgaccaaccgcagcaatgcacagagacaggatattgccttcgcctaccagagaaggaccaaaaaggaacttgcatcagcactgaagtcagccttatctggccacctggagacggtgattttgggcctattgaagacacctgctcagtatgacgcttctgagctaaaagcttccatgaaggggctgggaaccgacgaggactctctcattgagatcatctgctccagaaccaaccaggagctgcaggaaattaacagagtctacaaggaaatgtacaagactgatctggagaaggacattatttcggacacatctggtgacttccgcaagctgatggttgccctggcaaag

SEQ ID NO: 107854 - DNA, 543 bp, Homo sapiens
  Payload ID: 1173
  Gene Symbol: ANXA2
  Gene Name: annexin A2
  ENST ID: ENST00000558998
  CDS Start-End: 307-543
cagctctcggcgcacggcccaggttatcttgtagcatagcaacttcggatttcactctacccggagagtttcccgcttggttgaacacattggcctcaggaaggtgtggatgaggtcaccattgtcaacattttgaccaaccgcagcaatgcacagagacaggatattgccttcgcctaccagagaaggaccaaaaaggaacttgcatcagcactgaagtcagccttatctggccacctggagacggtgattttgggcctattgaagacacctgctcagtatgacgcttctgagctaaaagcttccatgaaggggctgggaaccgacgaggactctctcattgagatcatctgctccagaaccaaccaggagctgcaggaaattaacagagtctacaaggaaatgtacaagactgatctggagaaggacattatttcggacacatctggtgacttccgcaagctgatggttgccctggcaaagggtagaagagcagaggatggctctgtcattgattatgaactgattgaccaagatgctcgg

SEQ ID NO: 107855 - DNA, 557 bp, Homo sapiens
  Payload ID: 1173
  Gene Symbol: ANXA2
  Gene Name: annexin A2
  ENST ID: ENST00000558169
  CDS Start-End: 416-557
ctgctcagcatttggggacgctctcagctctcggcgcacggcccaggttatcttgtagcatagcaacttcggatttcactctacccggagagtttcccgcttggttgaacacattggcctcaggaagagacgctcttctggctcttccgtgacgcattacaacagccatccaggccggtccagttacgctgcattccttcctccttcccatttcggcggacctgcatccagctagagactagcagattgaatcgatattcattaagttaggaatggttggtggtcctaagagcctcagcaaccgagaggagtcttgttatttaaaaaacaacgatactgggcgtggtcgtgggcctgtagtcccagctgctcaagctagtggatctcttgagtccaaggccaatcttccttcaaaatgtctactgttcacgaaatcctgtgcaagctcagcttggagggtgatcactctacacccccaagtgcatatgggtctgtcaaagcctatactaactttgatgctgagcgggatgctttgaacattgaaacagccatcaaga

SEQ ID NO: 107856 - DNA, 580 bp, Homo sapiens
  Payload ID: 1173
  Gene Symbol: ANXA2
  Gene Name: annexin A2
  ENST ID: ENST00000558132
  CDS Start-End: 56-580
gctcagcatttggggacgctctcagctctcggcgcacggcccagcttccttcaaaatgtctactgttcacgaaatcctgtgcaagctcagcttggagggtgatgaacttgcatcagcactgaagtcagccttatctggccacctggagacggtgattttgggcctattgaagacacctgctcagtatgacgcttctgagctaaaagcttccatgaaggggctgggaaccgacgaggactctctcattgagatcatctgctccagaaccaaccaggagctgcaggaaattaacagagtctacaaggaaatgtacaagactgatctggagaaggacattatttcggacacatctggtgacttccgcaagctgatggttgccctggcaaagggtagaagagcagaggatggctctgtcattgattatgaactgattgaccaagatgctcgggatctctatgacgctggagtgaagaggaaaggaactgatgttcccaagtggatcagcatcatgaccgagcggagcgtgccccacctccagaaagtatttgataggtacaagagttacagcccttatgacatg

SEQ ID NO: 107857 - DNA, 2234 bp, Homo sapiens
  Payload ID: 1174
  Gene Symbol: ANXA2R
  Gene Name: annexin A2 receptor
  Uniprot ID: Q3ZCQ2
  ENST ID: ENST00000314890
  CDS Start-End: 1421-2002
gggtgccccccaccatccccagcccgcagcataatcggtgaagggagcctgcggtttctccgccgcgccttcgcccgttgcgtcctgcgaagccagtggaatcggtggtcacaaggaaattatgacaggagcaacctgcaggggtttagatctgacagaaatattctaatggtaggcattgcatcgcttagccatatttgtaatttcttctttgtagggttggttctctgtaacttttgcttaccttaaaattatttttgtgtcttgctctgaggacaatgttaccgatgtgtttttcatttttacttgcatttcagactttcattattttaaattatgtattttttttttcttctaattttgagcgtctcagattcgtgcttcttgactttcattctctcaggagccggggagccgagctcggtcttagcctcgctggtatcaggttccgggttctgtctggaggctccgcttcctatgcagagctggcggttttgtatcagcacgtttgccagtggcgcccactgggcgttttctcagttgctgcacccaacgtgacatttcccgttcgcggggtccttaggttctcagtgctgtcactttttcgctcctacaaccgctagtatctcctaggaacttcctgaaccccgttttgccgtgcagaacggtgattgcaccgagccgctgttcgcactagtaattgtgtggtaccattagccggcgctttttctgtcacaacccattaaaacgggttaaaacatattaaacctatcaaacacattgaacggattaaaacacattaaatgccgcaacacatttttctggtacaacacattgaaacagagttggttcattcctccaaacaggttgtttaggtgtggaagcaccgctcttagttctaagagcatgctgtttctctttagcagcaccctttacggcgccaaaacggatatttgtttggcaataccagcgctatccgctaggtgccggcgcttgctaagttcaacgcgccagtttctcgtttgcaaggtggttagggcagagccctagcagacagttttccggtggcagcaacgctcatttcccggaaacgggtggttcttggcccttgcgcgctcttgaatacctgcgttctgtagcgctagttctcttcaagatttgcttagtgtcatttcatttcggtttcttttctcgccatgtttttctgtcggaattacggttcgttttggttctatgtactctctaaaatgttatcgtttttcatttgtctactaattttcgtgcatttgttactactgagtttcttaatatctgactggcctccgcccacgggctctgcagagcataaatactcaggctgatggtagtgcagagactctccctccttgatcagcgcaaacgttggtctgaggcttgagggatggagcaacattttcttggctgtgtgaagcgggcttgggattccgcagaggtggcgccagagccccagcctccacctattgtgagttcagaagatcgtgggccgtggcctcttcctttgtatccagtactaggagagtactcactggacagctgtgatttgggactgctttccagcccttgctggcggctgcccggagtctactggcaaaacggactctctcctggagtccagagcaccttggaaccaagtacagcgaagcccactgagttcagttggccggggacacagaagcagcaagaggcacccgtagaagaggtggggcaggcagaggaacccgacagactcaggctccagcagcttccctggagcagtcctctccatccctgggacagacagcaggacaccgaggtctgtgacagcgggtgccttttggaacgccgccatcctcctgccctccagccgtggcgccacctcccgggtttctcagactgcctggagtggattcttcgcgttggttttgccgcgttctctgtactctgggcgtgctgttcacggatctgtggagctaagcagccttagatagcagcagaaggctttttggattctcctccttgaaaagattctcagttaccaaacgtctccacctagaaaataaaaatacattaagatgtgctttcattgctggttgtcagtttttaaattctctttttcccttatgtttctttcttgtttcgcgtcgcttattactttcagtttccttgtattttaaatatttgtatttatttcattaaatatttcattcgtatctgtt

SEQ ID NO: 107858 - DNA, 1265 bp, Homo sapiens
  Payload ID: 1174
  Gene Symbol: ANXA2R
  Gene Name: annexin A2 receptor
  Uniprot ID: Q3ZCQ2
  ENST ID: ENST00000616064
  CDS Start-End: 300-881
aatacctgcgttctgtagcgctagttctcttcaagatttgcttagtgtcatttcatttcggtttcttttctcgccatgtttttctgtcggaattacggttcgttttggttctatgtactctctaaaatgttatcgtttttcatttgtctactaattttcgtgcatttgttactactgagtttcttaatatctgactggcctccgcccacgggctctgcagagcataaatactcaggctgatggtagtgcagagactctccctccttgatcagcgcaaacgttggtctgaggcttgagggatggagcaacattttcttggctgtgtgaagcgggcttgggattccgcagaggtggcgccagagccccagcctccacctattgtgagttcagaagatcgtgggccgtggcctcttcctttgtatccagtactaggagagtactcactggacagctgtgatttgggactgctttccagcccttgctggcggctgcccggagtctactggcaaaacggactctctcctggagtccagagcaccttggaaccaagtacagcgaagcccactgagttcagttggccggggacacagaagcagcaagaggcacccgtagaagaggtggggcaggcagaggaacccgacagactcaggctccagcagcttccctggagcagtcctctccatccctgggacagacagcaggacaccgaggtctgtgacagcgggtgccttttggaacgccgccatcctcctgccctccagccgtggcgccacctcccgggtttctcagactgcctggagtggattcttcgcgttggttttgccgcgttctctgtactctgggcgtgctgttcacggatctgtggagctaagcagccttagatagcagcagaaggctttttggattctcctccttgaaaagattctcagttaccaaacgtctccacctagaaaataaaaatacattaagatgtgctttcattgctggttgtcagtttttaaattctctttttcccttatgtttctttcttgtttcgcgtcgcttattactttcagtttccttgtattttaaatatttgtatttatttcattaaatatttcattcgtatctgttttcactttgagaaatctattttacgattgtagaattcttagagtttttggcaaatttaaaatttgtttttttccattgtattttaaaatcttattcctactatttttctaattattgctttttaaatgtattgtttgtttacatttaatttt

SEQ ID NO: 107859 - DNA, 1657 bp, Homo sapiens
  Payload ID: 1175
  Gene Symbol: ANXA3
  Gene Name: annexin A3
  Uniprot ID: P12429
  ENST ID: ENST00000264908
  CDS Start-End: 380-1351
attgcagtacatttgagaaagtaaaggtgtagtggaaaccgagagcgaaatgagggcgtagggagaaaagggtggggaagcttagagaccggtgagggagcagagctggggcgcctgtgtacagggatagagcccggcggcagcagggcgcggcttccctttcccggggcctggggccgcaatcaggtggagtcgagaggccggaggaggggcaggaggaaggggtgcggtcgcgatccggacccggagccagcgcggagcacctgcgcccgcggctgacaccttcgctcgcagtttgttcgcagtttactcgcacaccagtttcccccaccgcgctttggattagtgtgatctcagctcaaggcaaaggtgggatatcatggcatctatctgggttggacaccgaggaacagtaagagattatccagactttagcccatcagtggatgctgaagctattcagaaagcaatcagaggaattggaactgatgagaaaatgctcatcagcattctgactgagaggtcaaatgcacagcggcagctgattgttaaggaatatcaagcagcatatggaaaggagctgaaagatgacttgaagggtgatctctctggccactttgagcatctcatggtggccctagtgactccaccagcagtctttgatgcaaagcagctaaagaaatccatgaagggcgcgggaacaaacgaagatgccttgattgaaatcttaactaccaggacaagcaggcaaatgaaggatatctctcaagcctattatacagtatacaagaagagtcttggagatgacattagttccgaaacatctggtgacttccggaaagctctgttgactttggcagatggcagaagagatgaaagtctgaaagtggatgagcatctggccaaacaagatgcccagattctctataaagctggtgagaacagatggggcacggatgaagacaaattcactgagatcctgtgtttaaggagctttcctcaattaaaactaacatttgatgaatacagaaatatcagccaaaaggacattgtggacagcataaaaggagaattatctgggcattttgaagacttactgttggccatagttaattgtgtgaggaacacgccggcctttttagccgaaagactgcatcgagccttgaagggtattggaactgatgagtttactctgaaccgaataatggtgtccagatcagaaattgaccttttggacattcgaacagagttcaagaagcattatggctattccctatattcagcaattaaatcggatacttctggagactatgaaatcacactcttaaaaatctgtggtggagatgactgaaccaagaagataatctccaaaggtccacgatgggctttcccaacagctccaccttacttcttctcatactatttaagagaacaagcaaatataaacagcaacttgtgttcctaacaggaattttcattgttctataacaacaacaacaaaagcgattattattttagagcatctcatttataatgtagcagctcataaatgaaattgaaaatggtattaaagatctgcaactactatccaacttatatttctgctttcaaagttaagaatctttatagttctactccattaaatataaagcaagat

SEQ ID NO: 107860 - DNA, 1524 bp, Homo sapiens
  Payload ID: 1175
  Gene Symbol: ANXA3
  Gene Name: annexin A3
  ENST ID: ENST00000503570
  CDS Start-End: 399-1253
ggacccggagccagcgcggagcacctgcgcccgcggctgacaccttcgctcgcagtttgttcgcagtttactcgcacaccagtttcccccaccgcgctttggattagtgtgatctcagctcaaggcaaaggtgggatatcatggcatctatctggacacggtctcactctgtcacctagactacagtgcagtgacacaatcacagctcactgcagccttgaccttctgcgctcaagtggtcctcccacctcagcctcccaagtagctgggaccacacctgcacaccaccacacctggttggacaccgaggaacagtaagagattatccagactttagcccatcagtggatgctgaagctattcagaaagcaatcagaggaattggaactgatgagaaaatgctcatcagcattctgactgagaggtcaaatgcacagcggcagctgattgttaaggaatatcaagcagcatatggaaaggagctgaaagatgacttgaagggtgatctctctggccactttgagcatctcatggtggccctagtgactccaccagcagtctttgatgcaaagcagctaaagaaatccatgaagggcgcgggaacaaacgaagatgccttgattgaaatcttaactaccaggacaagcaggcaaatgaaggatatctctcaagcctattatacagtatacaagaagagtcttggagatgacattagttccgaaacatctggtgacttccggaaagctctgttgactttggcagatggcagaagagatgaaagtctgaaagtggatgagcatctggccaaacaagatgcccagattctctataaagctggtgagaacagatggggcacggatgaagacaaattcactgagatcctgtgtttaaggagctttcctcaattaaaactaacatttgatgaatacagaaatatcagccaaaaggacattgtggacagcataaaaggagaattatctgggcattttgaagacttactgttggccatagttaattgtgtgaggaacacgccggcctttttagccgaaagactgcatcgagccttgaagggtattggaactgatgagtttactctgaaccgaataatggtgtccagatcagaaattgaccttttggacattcgaacagagttcaagaagcattatggctattccctatattcagcaattaaatcggatacttctggagactatgaaatcacactcttaaaaatctgtggtggagatgactgaaccaagaagataatctccaaaggtccacgatgggctttcccaacagctccaccttacttcttctcatactatttaagagaacaagcaaatataaacagcaacttgtgttcctaacaggaattttcattgttctataacaacaacaacaaaagcgattattattttagagcatctcatttataatgtagcagctcataaatgaaattgaaaatggtattaaagatctgcaactactatccaacttatatttctgctttcaaagttaagaatc

SEQ ID NO: 107861 - DNA, 880 bp, Homo sapiens
  Payload ID: 1175
  Gene Symbol: ANXA3
  Gene Name: annexin A3
  ENST ID: ENST00000514171
  CDS Start-End: 418-880
ctcgaccctgggcagggctggcggctggcgcccgcgcccggccccaacccagctgcgtgggtggggagctggagggacctcagtcctgcatttcagagtcgaggagactgggcccacgggggggaaagtgccgtgccatgggtgggtcacccaggtcttggtggggcccaagctgatactcagctgtcctcgctccctgaaagcttcgcttattacagctagcagcgtaagggatccacttagccatctcggcctccccagtcctaaaggtctaggggacagaaaaaagctgggagtcggaaggttcctcgggtccccggcatggcagacggggctggctcagaggtctgctctgtggacttggaatcgcacccatcctattagtgtgatctcagctcaaggcaaaggtgggatatcatggcatctatctgggttggacaccgaggaacagtaagagattatccagactttagcccatcagtggatgctgaagctattcagaaagcaatcagaggaattggaactgatgagaaaatgctcatcagcattctgactgagaggtcaaatgcacagcggcagctgattgttaaggaatatcaagcagcatatggaaaggagctgaaagatgacttgaagggtgatctctctggccactttgagcatctcatggtggccctagtgactccaccagcagtctttgatgcaaagcagctaaagaaatccatgaagggcgcgggaacaaacgaagatgccttgattgaaatcttaactaccaggacaagcaggcaaatgaaggatatctctcaagcctattatacagtatacaagaagagtcttggagatgacattagttccgaaacatctggtgacttccggaaag

SEQ ID NO: 107862 - DNA, 567 bp, Homo sapiens
  Payload ID: 1175
  Gene Symbol: ANXA3
  Gene Name: annexin A3
  ENST ID: ENST00000508214
  CDS Start-End: 165-567
cctcctcaaagagcagatgtgtctttataacagactgtaggcttggagccttgtaaaatgtacatggagtttcacaatcaagcacaaggaatccaactgaaggcagctaaactttgtgttgatttgattagtgtgatctcagctcaaggcaaaggtgggatatcatggcatctatctgggttggacaccgaggaacagtaagagattatccagactttagcccatcagtggatgctgaagctattcagaaagcaatcagaggaattggaactgatgagaaaatgctcatcagcattctgactgagaggtcaaatgcacagcggcagctgattgttaaggaatatcaagcagcatatggaaaggagctgaaagatgacttgaagggtgatctctctggccactttgagcatctcatggtggccctagtgactccaccagcagtctttgatgcaaagcagctaaagaaatccatgaagggcgcgggaacaaacgaagatgccttgattgaaatcttaactaccaggacaagcaggcaaatgaaggatatctctcaagcctattatacag

SEQ ID NO: 107863 - DNA, 1335 bp, Homo sapiens
  Payload ID: 1175
  Gene Symbol: ANXA3
  Gene Name: annexin A3
  ENST ID: ENST00000512884
  CDS Start-End: 181-1035
ggtcgcgatccggacccggagccagcgcggagcacctgcgcccgcggctgacaccttcgctcgcagtttgttcgcagtttactcgcacaccagtttcccccaccgcgctttggattagtgtgatctcagctcaaggcaaaggtgggatatcatggcatctatctgggaactgatgagaaaatgctcatcagcattctgactgagaggtcaaatgcacagcggcagctgattgttaaggaatatcaagcagcatatggaaaggagctgaaagatgacttgaagggtgatctctctggccactttgagcatctcatggtggccctagtgactccaccagcagtctttgatgcaaagcagctaaagaaatccatgaagggcgcgggaacaaacgaagatgccttgattgaaatcttaactaccaggacaagcaggcaaatgaaggatatctctcaagcctattatacagtatacaagaagagtcttggagatgacattagttccgaaacatctggtgacttccggaaagctctgttgactttggcagatggcagaagagatgaaagtctgaaagtggatgagcatctggccaaacaagatgcccagattctctataaagctggtgagaacagatggggcacggatgaagacaaattcactgagatcctgtgtttaaggagctttcctcaattaaaactaacatttgatgaatacagaaatatcagccaaaaggacattgtggacagcataaaaggagaattatctgggcattttgaagacttactgttggccatagttaattgtgtgaggaacacgccggcctttttagccgaaagactgcatcgagccttgaagggtattggaactgatgagtttactctgaaccgaataatggtgtccagatcagaaattgaccttttggacattcgaacagagttcaagaagcattatggctattccctatattcagcaattaaatcggatacttctggagactatgaaatcacactcttaaaaatctgtggtggagatgactgaaccaagaagataatctccaaaggtccacgatgggctttcccaacagctccaccttacttcttctcatactatttaagagaacaagcaaatataaacagcaacttgtgttcctaacaggaattttcattgttctataacaacaacaacaaaagcgattattattttagagcatctcatttataatgtagcagctcataaatgaaattgaaaatggtattaaagatctgcaactactatccaacttatatttctgctttcaaagttaagaatctttatagttctactccattaaatataaag

SEQ ID NO: 107864 - DNA, 545 bp, Homo sapiens
  Payload ID: 1175
  Gene Symbol: ANXA3
  Gene Name: annexin A3
  ENST ID: ENST00000512373
  CDS Start-End: 233-545
actcgcacaccagtttcccccaccgcgctttggctagcagcgtaagggatccacttagccatctcggcctccccagtcctaaaggtctaggggacagaaaaaagctgggagtcggaaggttcctcgggtccccggcatggcagacggggctggctcagaggtctgctctgtggacttggaatcgcacccatcctattagtgtgatctcagctcaaggcaaaggtgggatatcatggcatctatctgggttggacaccgaggaacagtaagagattatccagactttagcccatcagtggatgctgaagctattcagaaagcaatcagaggaattggaactgatgagaaaatgctcatcagcattctgactgagaggtcaaatgcacagcggcagctgattgttaaggaatatcaagcagcatatggaaaggagctgaaagatgacttgaagggtgatctctctggccactttgagcatctcatggtggccctagtgactccaccagcagtctttgatgcaaagcagctaaagaaatccatgaagg

SEQ ID NO: 107865 - DNA, 307 bp, Homo sapiens
  Payload ID: 1175
  Gene Symbol: ANXA3
  Gene Name: annexin A3
  ENST ID: ENST00000512542
  CDS Start-End: 142-307
cggacccggagccagcgcggagcacctgcgcccgcggctgacaccttcgctcgcagtttgttcgcagtttactcgcacaccagtttcccccaccgcgctttggattagtgtgatctcagctcaaggcaaaggtgggatatcatggcatctatctggggcagaagagatgaaagtctgaaagtggatgagcatctggccaaacaagatgcccagattctctataaagctggtgagaacagatggggcacggatgaagacaaattcactgagatcctgtgtttaaggagctttcctcaattaaaactaa

SEQ ID NO: 107866 - DNA, 2799 bp, Homo sapiens
  Payload ID: 1176
  Gene Symbol: ANXA4
  Gene Name: annexin A4
  Uniprot ID: P09525
  ENST ID: ENST00000394295
  CDS Start-End: 249-1214
gcgcggccgtcccggcccggggccccaggtgcgcttcccctagagagggattttccggtctcgtgggcagaggaacaaccaggaacttgggctcagtctccaccccacagtggggcggatccgtcccggataagacccgctgtctggccctgagtagggtgtgacctccgcagccgcagaggaggagcgcagcccggcctcgaagaacttctgcttgggtggctgaactctgatcttgacctagagtcatggccatggcaaccaaaggaggtactgtcaaagctgcttcaggattcaatgccatggaagatgcccagaccctgaggaaggccatgaaagggctcggcaccgatgaagacgccattattagcgtccttgcctaccgcaacaccgcccagcgccaggagatcaggacagcctacaagagcaccatcggcagggacttgatagacgacctgaagtcagaactgagtggcaacttcgagcaggtgattgtggggatgatgacgcccacggtgctgtatgacgtgcaagagctgcgaagggccatgaagggagccggcactgatgagggctgcctaattgagatcctggcctcccggacccctgaggagatccggcgcataagccaaacctaccagcagcaatatggacggagccttgaagatgacattcgctctgacacatcgttcatgttccagcgagtgctggtgtctctgtcagctggtgggagggatgaaggaaattatctggacgatgctctcgtgagacaggatgcccaggacctgtatgaggctggagagaagaaatgggggacagatgaggtgaaatttctaactgttctctgttcccggaaccgaaatcacctgttgcatgtgtttgatgaatacaaaaggatatcacagaaggatattgaacagagtattaaatctgaaacatctggtagctttgaagatgctctgctggctatagtaaagtgcatgaggaacaaatctgcatattttgctgaaaagctctataaatcgatgaagggcttgggcaccgatgataacaccctcatcagagtgatggtttctcgagcagaaattgacatgttggatatccgggcacacttcaagagactctatggaaagtctctgtactcgttcatcaagggtgacacatctggagactacaggaaagtactgcttgttctctgtggaggagatgattaaaataaaaatcccagaaggacaggaggattctcaacactttgaatttttttaacttcatttttctacactgctattatcattatctcagaatgcttatttccaattaaaacgcctacagctgcctcctagaatatagactgtctgtattattattcacctataattagtcattatgatgctttaaagctgtacttgcatttcaaagcttataagatataaatggagattttaaagtagaaataaatatgtattccatgtttttaaaagattactttctactttgtgtttcacagacattgaatatattaaattattccatattttcttttcagtgaaaaattttttaaatggaagactgttctaaaatcacttttttccctaatccaatttttagagtggctagtagtttcttcatttgaaattgtaagcatccggtcagtaagaatgcccatccagttttctatatttcatagtcaaagccttgaaagcatctacaaatctctttttttaggttttgtccatagcatcagttgatccttactaagtttttcatgggagacttccttcatcacatcttatgttgaaatcactttctgtagtcaaagtataccaaaaccaatttatctgaactaaattctaaagtatggttatacaaaccatatacatctggttaccaaacataaatgctgaacattccatattattatagttaatgtcttaatccagcttgcaagtgaatggaaaaaaaaataagcttcaaactaggtattctgggaatgatgtaatgctctgaatttagtatgatataaagaaaacttttttgtgctaaaaatactttttaaaatcaattttgttgattgtagtaatttctatttgcactgtgcctttcaactccagaaacattctgaagatgtacttggatttaattaaaaagttcactttgtaagaacgtggaaaaataattttaatttaaaaatggtgtttttaggccgggggcgggggctcacgccagtaatcccaacactttgggaggccaaggcgggtggatcacctaaggtcaggagttcaagactagcctggccaacatggagaaactgcatctctactaaaaatataaaaattagccgggtgtggtggctggtgcctgtaatcccagccactcggaggctgagtcagggagaactgcttgaacccaggaggcaggaggcaaaggttgcagtgagccgagatcacgccagcctgggcgacagagcgagaatccatctaaaaaaaaaaaaaaaaaaagtgtctttaaagtgaggtatagtctttctctgatccacttttcaccttctgaggtttttcatcttggcccctgaaaggagctatttttgaaggacttgtgttactcagtttctacaggaattacaagataagaaaaaaaaaatcatatttagtcttatgcgtgcctactggctaatgttcacatatgccaaacactactcaataacataaaataatgtatgaacttattctctggaaatgagtgatgccctctgctctaagtagaccatttatattaaatatcataaatgtataaaggaca

SEQ ID NO: 107867 - DNA, 1414 bp, Homo sapiens
  Payload ID: 1176
  Gene Symbol: ANXA4
  Gene Name: annexin A4
  ENST ID: ENST00000409920
  CDS Start-End: 249-1148
gcgcggccgtcccggcccggggccccaggtgcgcttcccctagagagggattttccggtctcgtgggcagaggaacaaccaggaacttgggctcagtctccaccccacagtggggcggatccgtcccggataagacccgctgtctggccctgagtagggtgtgacctccgcagccgcagaggaggagcgcagcccggcctcgaagaacttctgcttgggtggctgaactctgatcttgacctagagtcatggccatggcaaccaaaggaggtactgtcaaagctgcttcaggattcaatgccatggaagatgcccagaccctgaggaaggccatgaaagggctcggcaccgatgaagacgccattattagcgtccttgcctaccgcaacaccgcccagcgccaggagatcaggacagcctacaagagcaccatcggcagggacttgatagacgacctgaagtcagaactgagtggcaacttcgagcagggagccggcactgatgagggctgcctaattgagatcctggcctcccggacccctgaggagatccggcgcataagccaaacctaccagcagcaatatggacggagccttgaagatgacattcgctctgacacatcgttcatgttccagcgagtgctggtgtctctgtcagctggtgggagggatgaaggaaattatctggacgatgctctcgtgagacaggatgcccaggacctgtatgaggctggagagaagaaatgggggacagatgaggtgaaatttctaactgttctctgttcccggaaccgaaatcacctgttgcatgtgtttgatgaatacaaaaggatatcacagaaggatattgaacagagtattaaatctgaaacatctggtagctttgaagatgctctgctggctatagtaaagtgcatgaggaacaaatctgcatattttgctgaaaagctctataaatcgatgaagggcttgggcaccgatgataacaccctcatcagagtgatggtttctcgagcagaaattgacatgttggatatccgggcacacttcaagagactctatggaaagtctctgtactcgttcatcaagggtgacacatctggagactacaggaaagtactgcttgttctctgtggaggagatgattaaaataaaaatcccagaaggacaggaggattctcaacactttgaatttttttaacttcatttttctacactgctattatcattatctcagaatgcttatttccaattaaaacgcctacagctgcctcctagaatatagactgtctgtattattattcacctataattagtcattatgatgctttaaagctgtacttgcatttcaaagcttataagatataaatggagattttaaagtagaaataaatatgtattccatgtttttaaaa

SEQ ID NO: 107868 - DNA, 1492 bp, Homo sapiens
  Payload ID: 1176
  Gene Symbol: ANXA4
  Gene Name: annexin A4
  ENST ID: ENST00000635311
  CDS Start-End: 91-519
gtgtgacctccgcagccgcagaggaggagcgcagcccggcctcgaagaacttctgcttgggtggctgaactctgatcttgacctagagtcatggccatggcaaccaaaggaggtactgtcaaagctgcttcaggattcaatgccatggaagatgcccagaccctgaggaaggccatgaaagggctcggcaccgatgaagacgccattattagcgtccttgcctaccgcaacaccgcccagcgccaggagatcaggacagcctacaagagcaccatcggcagggacttgatagacgacctgaagtcagaactgagtggcaacttcgagcagggagccggcactgatgagggctgcctaattgagatcctggcctcccggacccctgaggagatccggcgcataagccaaacctaccagcagcaatatggacggagccttgaagatgacattcgctctgacacatcgttcatgttccagcgagtgctggtgtctctgtcagctgtgagtgactgcttctgatggggggcgggttttatcgaaatgtccactctatcccctttgccagcctttctcatcctttcagcccctgacatgtggatattccccaggtagtgttctcagacccctctgttcctttatcttatttctccttcagagactctggctaatcctgcctgcccattttttctactttaatttgatatttacaagtacctaacacctgccaggtccccctgtcactcagtgcattgagagttatgaagatgattcagaggcagttcctgggccttaagagtatatattgtcataagggaatacatcaggtacacagttgctagaaggcatgaaaagattacatgccaaaggagaggcgcataggaaaaagaagattcaaggagaaaatttggttgtagaaacaaagaaaagccttcatgacagagatgctggttcagagaggacttggaggattactagaatttcaagaggcagagacgtgggtgggtgtattgcagacaggaagaacagcaagaataaggcagggaacatggggttcagggaacaactgggtgaacagttgggctggtgattctggaaacagggtgggaggataaactggaattctatgttgggagcagtttacacttatttatttgggagcagtagatgacgtgatgatgacaacgatgatgggagtgatgtgactggagctgcactttcagaagagtaatgtaatagtgacgtgtaggatgaacagtggagaggaactggaggctggacgaccagggtgggagggatgaaggaaattatctggacgatgctctcgtgagacaggatgcccaggacctgtatgaggctggagagaagaaatgggggacagatgaggtgaaatttctaactgttctctgttcccggaaccgaaatcacctgttgcatgtgtttgatgaatacaaaaggatatcacagaaggatattgaacagagtattaaatctg

SEQ ID NO: 107869 - DNA, 376 bp, Homo sapiens
  Payload ID: 1176
  Gene Symbol: ANXA4
  Gene Name: annexin A4
  ENST ID: ENST00000472124
  CDS Start-End: 1-23
aaacctaccagcagcgtacgtgacatccgcagtggccctggctgaggtttcgctgtgattagagaatgagggtagcagcgggttgttgtttgctgattagacttttcacagaacgctgagcatgagggatcctcggtgccaagctctgcttcgagggagatccctgtttagccaaatggcggtctgttggctccttaagatttctcagaatatggacggagccttgaagatgacattcgctctgacacatcgttcatgttccagcgagtgctggtgtctctgtcagctatgacgtgatgatgacaacgatgatgggagtgatgtgactggagctgcactttcagaagagtaatgtaatagtgacgtgtaggatgaa

SEQ ID NO: 107870 - DNA, 521 bp, Homo sapiens
  Payload ID: 1176
  Gene Symbol: ANXA4
  Gene Name: annexin A4
  ENST ID: ENST00000468815
  CDS Start-End: 1-27
agccaaacctaccagcagcgtacgtgacatccgcagtggccctggctgaggtttcgctgtgattagagaatgagggtagcagcgggttgttgtttgctgattagacttttcacagaacgctgagcatgagggatcctcggtgccaagctctgcttcgagggagatccctgtttagccaaatggcggtctgttggctccttaagatttctcagaatatggacggagccttgaagatgacattcgctctgacacatcgttcatgttccagcgagtgctggtgtctctgtcagctgtgagtgactgcttctgatggggggcgggttttatcgaaatgtccactctatcccctttgccagcctttctcatcctttcagcccctgacatgtggatattccccaggtagtgttctcagacccctctgttcctttatcttatttctccttcagagactctggctaatcctgcctgcccattttttctactttaatttgatatttacaagtacctaacacctgccaggt

SEQ ID NO: 107871 - DNA, 1762 bp, Homo sapiens
  Payload ID: 1177
  Gene Symbol: ANXA5
  Gene Name: annexin A5
  Uniprot ID: P08758
  ENST ID: ENST00000296511
  CDS Start-End: 287-1249
aggcgcgctgaggccggggcaggggcgggcccggctggcgcggccggcctgcggttggggccctggcgggggtgggacgggccaagccgggcagggccggggtggggccgctggcgtttccgttgcttggatcagtctaggtgcagctgccggatccttcagcgtctgcatctcggcgtcgccccgcgtaccgtcgcccggctctccgccgctctcccggggtttcggggcacttgggtcccacagtctggtcctgcttcaccttcccctgacctgagtagtcgccatggcacaggttctcagaggcactgtgactgacttccctggatttgatgagcgggctgatgcagaaactcttcggaaggctatgaaaggcttgggcacagatgaggagagcatcctgactctgttgacatcccgaagtaatgctcagcgccaggaaatctctgcagcttttaagactctgtttggcagggatcttctggatgacctgaaatcagaactaactggaaaatttgaaaaattaattgtggctctgatgaaaccctctcggctttatgatgcttatgaactgaaacatgccttgaagggagctggaacaaatgaaaaagtactgacagaaattattgcttcaaggacacctgaagaactgagagccatcaaacaagtttatgaagaagaatatggctcaagcctggaagatgacgtggtgggggacacttcagggtactaccagcggatgttggtggttctccttcaggctaacagagaccctgatgctggaattgatgaagctcaagttgaacaagatgctcaggctttatttcaggctggagaacttaaatgggggacagatgaagaaaagtttatcaccatctttggaacacgaagtgtgtctcatttgagaaaggtgtttgacaagtacatgactatatcaggatttcaaattgaggaaaccattgaccgcgagacttctggcaatttagagcaactactccttgctgttgtgaaatctattcgaagtatacctgcctaccttgcagagaccctctattatgctatgaagggagctgggacagatgatcataccctcatcagagtcatggtttccaggagtgagattgatctgtttaacatcaggaaggagtttaggaagaattttgccacctctctttattccatgattaagggagatacatctggggactataagaaagctcttctgctgctctgtggagaagatgactaacgtgtcacggggaagagctccctgctgtgtgcctgcaccaccccactgccttccttcagcacctttagctgcatttgtatgccagtgcttaacacattgccttattcatactagcatgctcatgaccaacacatacacgtcatagaagaaaatagtggtgcttctttctgatctctagtggagatctctttgactgctgtagtactaaagtgtacttaatgttactaagtttaatgcctggccattttccatttatatatattttttaagaggctagagtgcttttagccttttttaaaaactccatttatattacatttgtaaccatgatactttaatcagaagcttagccttgaaattgtgaactcttggaaatgttattagtgaagttcgcaactaaactaaacctgtaaaattatgatgattgtattcaaaagattaatgaaaaataaacatttctgtccccctgaattatgtgtacatgtgtgtttagatttattattaaatttattt

SEQ ID NO: 107872 - DNA, 1606 bp, Homo sapiens
  Payload ID: 1177
  Gene Symbol: ANXA5
  Gene Name: annexin A5
  ENST ID: ENST00000506395
  CDS Start-End: 140-631
tgccggatccttcagcgtctgcatctcggcgtcgccccgcgtaccgtcgcccggctctccgccgctctcccggggtttcggggcacttgggtcccacagtctggtcctgcttcaccttcccctgacctgagtagtcgccatggcacaggttctcagaggcactgtgactgacttccctggatttgatgagcgggctgatgcagaaactcttcggaaggctatgaaaggcttgggcacagatgaggagagcatcctgactctgttgacatcccgaagtaatgctcagcgccaggaaatctctgcagcttttaagactctgtttggcagggatcttctggatgacctgaaatcagaactaactggaaaatttgaaaaattaattgtggctctgatgaaaccctctcggctttatgatgcttatgaactgaaacatgccttgaagggagctggaacaaatgaaaaagtactgacagaaattattgcttcaaggacacctgaagaactgagagccatcaaacaagtttatgaagaagaatatggctcaagcctggaagatgacgtggtgggggacacttcagggtactaccagcggatgttggtggttctccttcaggtattgcgtggagattaattacagtttgattaaaaagcctgaagttggactgggctgaatctagctaacagagaccctgatgctggaattgatgaagctcaagttgaacaagatgctcaggctttatttcaggctggagaacttaaatgggggacagatgaagaaaagtttatcaccatctttggaacacgaagtgtgtctcatttgagaaaggtgtttgacaagtacatgactatatcaggatttcaaattgaggaaaccattgaccgcgagacttctggcaatttagagcaactactccttgctgttgtgaaatctattcgaagtatacctgcctaccttgcagagaccctctattatgctatgaagggagctgggacagatgatcataccctcatcagagtcatggtttccaggagtgagattgatctgtttaacatcaggaaggagtttaggaagaattttgccacctctctttattccatgattaagggagatacatctggggactataagaaagctcttctgctgctctgtggagaagatgactaacgtgtcacggggaagagctccctgctgtgtgcctgcaccaccccactgccttccttcagcacctttagctgcatttgtatgccagtgcttaacacattgccttattcatactagcatgctcatgaccaacacatacacgtcatagaagaaaatagtggtgcttctttctgatctctagtggagatctctttgactgctgtagtactaaagtgtacttaatgttactaagtttaatgcctggccattttccatttatatatattttttaagaggctagagtgcttttagccttttttaaaaactccatttatattacatttgtaaccatgatactttaatcagaagcttagccttgaaattgtgaactcttggaaatgttattagtgaagttcgcaactaaactaaacctgtaaaattatgatgattgtattcaaaagatta

SEQ ID NO: 107873 - DNA, 1363 bp, Homo sapiens
  Payload ID: 1177
  Gene Symbol: ANXA5
  Gene Name: annexin A5
  ENST ID: ENST00000501272
  CDS Start-End: 140-922
tgccggatccttcagcgtctgcatctcggcgtcgccccgcgtaccgtcgcccggctctccgccgctctcccggggtttcggggcacttgggtcccacagtctggtcctgcttcaccttcccctgacctgagtagtcgccatggcacaggatcttctggatgacctgaaatcagaactaactggaaaatttgaaaaattaattgtggctctgatgaaaccctctcggctttatgatgcttatgaactgaaacatgccttgaagggagctggaacaaatgaaaaagtactgacagaaattattgcttcaaggacacctgaagaactgagagccatcaaacaagtttatgaagaagaatatggctcaagcctggaagatgacgtggtgggggacacttcagggtactaccagcggatgttggtggttctccttcaggctaacagagaccctgatgctggaattgatgaagctcaagttgaacaagatgctcaggctttatttcaggctggagaacttaaatgggggacagatgaagaaaagtttatcaccatctttggaacacgaagtgtgtctcatttgagaaaggtgtttgacaagtacatgactatatcaggatttcaaattgaggaaaccattgaccgcgagacttctggcaatttagagcaactactccttgctgttgtgaaatctattcgaagtatacctgcctaccttgcagagaccctctattatgctatgaagggagctgggacagatgatcataccctcatcagagtcatggtttccaggagtgagattgatctgtttaacatcaggaaggagtttaggaagaattttgccacctctctttattccatgattaagggagatacatctggggactataagaaagctcttctgctgctctgtggagaagatgactaacgtgtcacggggaagagctccctgctgtgtgcctgcaccaccccactgccttccttcagcacctttagctgcatttgtatgccagtgcttaacacattgccttattcatactagcatgctcatgaccaacacatacacgtcatagaagaaaatagtggtgcttctttctgatctctagtggagatctctttgactgctgtagtactaaagtgtacttaatgttactaagtttaatgcctggccattttccatttatatatattttttaagaggctagagtgcttttagccttttttaaaaactccatttatattacatttgtaaccatgatactttaatcagaagcttagccttgaaattgtgaactcttggaaatgttattagtgaagttcgcaactaaactaaacctgtaaaattatgatgattgtattcaaaagatta

SEQ ID NO: 107874 - DNA, 1190 bp, Homo sapiens
  Payload ID: 1177
  Gene Symbol: ANXA5
  Gene Name: annexin A5
  ENST ID: ENST00000515017
  CDS Start-End: 136-798
ggatccttcagcgtctgcatctcggcgtcgccccgcgtaccgtcgcccggctctccgccgctctcccggggtttcggggcacttgggtcccacagtctggtcctgcttcaccttcccctgacctgagtagtcgccatggcacaggttctcagaggcactgtgactgacttccctggatttgatgagcgggctgatgcagaaactcttcggaaggctatgaaaggcttggaatatggctcaagcctggaagatgacgtggtgggggacacttcagggtactaccagcggatgttggtggttctccttcaggctaacagagaccctgatgctggaattgatgaagctcaagttgaacaagatgctcaggctttatttcaggctggagaacttaaatgggggacagatgaagaaaagtttatcaccatctttggaacacgaagtgtgtctcatttgagaaaggtgtttgacaagtacatgactatatcaggatttcaaattgaggaaaccattgaccgcgagacttctggcaatttagagcaactactccttgctgttgtgaaatctattcgaagtatacctgcctaccttgcagagaccctctattatgctatgaagggagctgggacagatgatcataccctcatcagagtcatggtttccaggagtgagattgatctgtttaacatcaggaaggagtttaggaagaattttgccacctctctttattccatgattaagggagatacatctggggactataagaaagctcttctgctgctctgtggagaagatgactaacgtgtcacggggaagagctccctgctgtgtgcctgcaccaccccactgccttccttcagcacctttagctgcatttgtatgccagtgcttaacacattgccttattcatactagcatgctcatgaccaacacatacacgtcatagaagaaaatagtggtgcttctttctgatctctagtggagatctctttgactgctgtagtactaaagtgtacttaatgttactaagtttaatgcctggccattttccatttatatatattttttaagaggctagagtgcttttagccttttttaaaaactccatttatattacatttgtaaccatgatactttaatcagaagcttagccttgaaattgtgaactcttggaaatgttattagtgaagttc

SEQ ID NO: 107875 - DNA, 447 bp, Homo sapiens
  Payload ID: 1177
  Gene Symbol: ANXA5
  Gene Name: annexin A5
  ENST ID: ENST00000513728
  CDS Start-End: 149-256
aggtgcagctgccggatccttcagcgtctgcatctcggcgtcgccccgcgtaccgtcgcccggctctccgccgctctcccggggtttcggggcacttgggtcccacagtctggtcctgcttcaccttcccctgacctgagtagtcgccatggcacaggttctcagaggcactgtgactgacttccctggatttgatgagcgggctgatgcagaaactcttcggaaggctatgaaaggcttgggatcttctggatgacctgaaatcagaactaactggaaaatttgaaaaattaattgtggctctgatgaaaccctctcggctttatgatgcttatgaactgaaacatgccttgaagggagctggaacaaatgaaaaagtactgacagaaattattgcttcaaggacacctgaagaactgagagccatcaaacaagtttatgaagaag

SEQ ID NO: 107876 - DNA, 2593 bp, Homo sapiens
  Payload ID: 1178
  Gene Symbol: ANXA6
  Gene Name: annexin A6
  Uniprot ID: P08133
  ENST ID: ENST00000354546
  CDS Start-End: 229-2250
agaggggtggggtggaggagggaggcgggcgcgccggattggcctctgcgcgccacgtgtccggctcggagcccacggctgtcctcccggtccgccccgcgctgcggttgctgctgggctaacgggctccgatccagcgagcgctgcgtcctcgagtccctgcgcccgtgcgtccgtctgcgacccgaggcctccgctgcgcgtggattctgctgcgaaccggagaccatggccaaaccagcacagggtgccaagtaccggggctccatccatgacttcccaggctttgaccccaaccaggatgccgaggctctgtacactgccatgaagggctttggcagtgacaaggaggccatactggacataatcacctcacggagcaacaggcagaggcaggaggtctgccagagctacaagtccctctacggcaaggacctcattgctgatttaaagtatgaattgacgggcaagtttgaacggttgattgtgggcctgatgaggccacctgcctattgtgatgccaaagaaattaaagatgccatctcgggcattggcactgatgagaagtgcctcattgagatcttggcttcccggaccaatgagcagatgcaccagctggtggcagcatacaaagatgcctacgagcgggacctggaggctgacatcatcggcgacacctctggccacttccagaagatgcttgtggtcctgctccagggaaccagggaggaggatgacgtagtgagcgaggacctggtacaacaggatgtccaggacctatacgaggcaggggaactgaaatggggaacagatgaagcccagttcatttacatcttgggaaatcgcagcaagcagcatcttcggttggtgttcgatgagtatctgaagaccacagggaagccgattgaagccagcatccgaggggagctgtctggggactttgagaagctaatgctggccgtagtgaagtgtatccggagcaccccggaatattttgctgaaaggctcttcaaggctatgaagggcctggggactcgggacaacaccctgatccgcatcatggtctcccgtagtgagttggacatgctcgacattcgggagatcttccggaccaagtatgagaagtccctctacagcatgatcaagaatgacacctctggcgagtacaagaagactctgctgaagctgtctgggggagatgatgatgctgctggccagttcttcccggaggcagcgcaggtggcctatcagatgtgggaacttagtgcagtggcccgagtagagctgaagggaactgtgcgcccagccaatgacttcaaccctgacgcagatgccaaagcgctgcggaaagccatgaagggactcgggactgacgaagacacaatcatcgatatcatcacgcaccgcagcaatgtccagcggcagcagatccggcagaccttcaagtctcactttggccgggacttaatgactgacctgaagtctgagatctctggagacctggcaaggctgattctggggctcatgatgccaccggcccattacgatgccaagcagttgaagaaggccatggagggagccggcacagatgaaaaggctcttattgaaatcctggccactcggaccaatgctgaaatccgggccatcaatgaggcctataaggaggactatcacaagtccctggaggatgctctgagctcagacacatctggccacttcaggaggatcctcatttctctggccacggggcatcgtgaggagggaggagaaaacctggaccaggcacgggaagatgcccaggtggctgctgagatcttggaaatagcagacacacctagtggagacaaaacttccttggagacacgtttcatgacgatcctgtgtacccggagctatccgcacctccggagagtcttccaggagttcatcaagatgaccaactatgacgtggagcacaccatcaagaaggagatgtctggggatgtcagggatgcatttgtggccattgttcaaagtgtcaagaacaagcctctcttctttgccgacaaactttacaaatccatgaagggtgctggcacagatgagaagactctgaccaggatcatggtatcccgcagtgagattgacctgctcaacatccggagggaattcattgagaaatatgacaagtctctccaccaagccattgagggtgacacctccggagacttcctgaaggccttgctggctctctgtggtggtgaggactagggccacagctttggcgggcacttctgccaagaaatggttatcagcaccagccgccatggccaagcctgattgttccagctccagagactaaggaaggggcaggggtggggggaggggttgggttgggctcttatcttcagtggagcttaggaaacgctcccactcccacgggccatcgagggcccagcacggctgagcggctgaaaaaccgtagccatagatcctgtccacctccactcccctctgaccctcaggctttcccagcttcctccccttgctacagcctctgccctggtttgggctatgtcagatccaaaaacatcctgaacctctgtctgtaaaa

SEQ ID NO: 107877 - DNA, 1430 bp, Homo sapiens
  Payload ID: 1178
  Gene Symbol: ANXA6
  Gene Name: annexin A6
  ENST ID: ENST00000377751
  CDS Start-End: 99-1091
gatccagcgagcgctgcgtcctcgagtccctgcgcccgtgcgtccgtctgcgacccgaggcctccgctgcgcgtggattctgctgcgaaccggagaccatggccaaaccagcacagggtgccaagtaccggggctccatccatgacttcccaggctttgaccccaaccaggatgccgaggctctgtacactgccatgaagggctttggcagtgacaaggaggccatactggacataatcacctcacggagcaacaggcagaggcaggaggtctgccagagctacaagtccctctacggcaaggacttaatgactgacctgaagtctgagatctctggagacctggcaaggctgattctggggctcatgatgccaccggcccattacgatgccaagcagttgaagaaggccatggagggagccggcacagatgaaaaggctcttattgaaatcctggccactcggaccaatgctgaaatccgggccatcaatgaggcctataaggaggactatcacaagtccctggaggatgctctgagctcagacacatctggccacttcaggaggatcctcatttctctggccacggggcatcgtgaggagggaggagaaaacctggaccaggcacgggaagatgcccaggtggctgctgagatcttggaaatagcagacacacctagtggagacaaaacttccttggagacacgtttcatgacgatcctgtgtacccggagctatccgcacctccggagagtcttccaggagttcatcaagatgaccaactatgacgtggagcacaccatcaagaaggagatgtctggggatgtcagggatgcatttgtggccattgttcaaagtgtcaagaacaagcctctcttctttgccgacaaactttacaaatccatgaagggtgctggcacagatgagaagactctgaccaggatcatggtatcccgcagtgagattgacctgctcaacatccggagggaattcattgagaaatatgacaagtctctccaccaagccattgagggtgacacctccggagacttcctgaaggccttgctggctctctgtggtggtgaggactagggccacagctttggcgggcacttctgccaagaaatggttatcagcaccagccgccatggccaagcctgattgttccagctccagagactaaggaaggggcaggggtggggggaggggttgggttgggctcttatcttcagtggagcttaggaaacgctcccactcccacgggccatcgagggcccagcacggctgagcggctgaaaaaccgtagccatagatcctgtccacctccactcccctctgaccctcaggctttcccagcttcctccccttgctacagcctctgccctggtttgggctatgtcagatccaaaaacatcctgaacctctgtctgt

SEQ ID NO: 107878 - DNA, 562 bp, Homo sapiens
  Payload ID: 1178
  Gene Symbol: ANXA6
  Gene Name: annexin A6
  ENST ID: ENST00000517486
  CDS Start-End: 94-562
agcgagcgctgcgtcctcgagtccctgcgcccgtgcgtccgtctgcgacccgaggcctccgctgcgcgtggattctgctgcgaaccggagaccatggccaaaccagcacagggtgccaagtaccggggctccatccatgacttcccaggctttgaccccaaccaggatgccgaggctctgtacactgccatgaagggctttggcagtgacaaggaggccatactggacataatcacctcacggagcaacaggcagaggcaggaggtctgccagagctacaagtccctctacggcaaggacctcattgctgatttaaagtatgaattgacgggcaagtttgaacggttgattgtgggcctgatgaggccacctgcctattgtgatgccaaagaaattaaagatgccatctcgggtgctggcacagatgagaagactctgaccaggatcatggtatcccgcagtgagattgacctgctcaacatccggagggaattcattgagaaatatgacaagtctctccaccaagccattgagggtgacacctccggagacttcctgaagg

SEQ ID NO: 107879 - DNA, 1793 bp, Homo sapiens
  Payload ID: 1178
  Gene Symbol: ANXA6
  Gene Name: annexin A6
  ENST ID: ENST00000521512
  CDS Start-End: 107-1489
cgggctccgatccagcgagcgctgcgtcctcgagtccctgcgcccgtgcgtccgtctgcgacccgaggcctccgctgcgcgtggattctgctgcgaaccggagaccatggccaaaccagcacagggtgccaagtaccggggctccatccatgacttcccaggctttgaccccaaccaggatgccgaggctctgtacactgccatgaagggctttggcagtgacaaggaggccatactggacataatcacctcacggagcaacaggcagaggcaggaggtctgccagagctacaagtccctctacggcaaggacctcattgctgatttaaatgagttggacatgctcgacattcgggagatcttccggaccaagtatgagaagtccctctacagcatgatcaagaatgacacctctggcgagtacaagaagactctgctgaagctgtctgggggagatgatgatgctgctggccagttcttcccggaggcagcgcaggtggcctatcagatgtgggaacttagtgcagtggcccgagtagagctgaagggaactgtgcgcccagccaatgacttcaaccctgacgcagatgccaaagcgctgcggaaagccatgaagggactcgggactgacgaagacacaatcatcgatatcatcacgcaccgcagcaatgtccagcggcagcagatccggcagaccttcaagtctcactttggccgggacttaatgactgacctgaagtctgagatctctggagacctggcaaggctgattctggggctcatgatgccaccggcccattacgatgccaagcagttgaagaaggccatggagggagccggcacagatgaaaaggctcttattgaaatcctggccactcggaccaatgctgaaatccgggccatcaatgaggcctataaggaggactatcacaagtccctggaggatgctctgagctcagacacatctggccacttcaggaggatcctcatttctctggccacggggcatcgtgaggagggaggagaaaacctggaccaggcacgggaagatgcccaggaaatagcagacacacctagtggagacaaaacttccttggagacacgtttcatgacgatcctgtgtacccggagctatccgcacctccggagagtcttccaggagttcatcaagatgaccaactatgacgtggagcacaccatcaagaaggagatgtctggggatgtcagggatgcatttgtggccattgttcaaagtgtcaagaacaagcctctcttctttgccgacaaactttacaaatccatgaagggtgctggcacagatgagaagactctgaccaggatcatggtatcccgcagtgagattgacctgctcaacatccggagggaattcattgagaaatatgacaagtctctccaccaagccattgagggtgacacctccggagacttcctgaaggccttgctggctctctgtggtggtgaggactagggccacagctttggcgggcacttctgccaagaaatggttatcagcaccagccgccatggccaagcctgattgttccagctccagagactaaggaaggggcaggggtggggggaggggttgggttgggctcttatcttcagtggagcttaggaaacgctcccactcccacgggccatcgagggcccagcacggctgagcggctgaaaaaccgtagccatagatcctgtccacctccactcccctctgaccctcaggctttcccagcttcctccccttgctacagcctctgccctggtttgggcta

SEQ ID NO: 107880 - DNA, 880 bp, Homo sapiens
  Payload ID: 1178
  Gene Symbol: ANXA6
  Gene Name: annexin A6
  ENST ID: ENST00000521749
  CDS Start-End: 431-880
agagaccagagagcatccagaggcctggccggggtcctgcagtgcagacgttgggaggcacggagacggggagagggggaggcggtccaggactcactctgctccacctctgactccttgaagggatcattttcatctcctatactcagccaggcttttttaccctctcctggatgctttggaaggtggtgcagggctgcaggccttggccaagcccccctcccttggggaaatggcactgtcctttgggcgggttgcagcaggtggtatgggaaagtcatccacaccgctccccagggtgtatgtggccagcactggattttgcagggaaagcagctcagcctggaccaggggtgccaagtaccggggctccatccatgacttcccaggctttgaccccaaccaggatgccgaggctctgtacactgccatgaagggctttggcagtgacaaggaggccatactggacataatcacctcacggagcaacaggcagaggcaggaggtctgccagagctacaagtccctctacggcaaggacctcattgctgatttaaagtatgaattgacgggcaagtttgaacggttgattgtgggcctgatgaggccacctgcctattgtgatgccaaagaaattaaagatgccatctcgggcattggcactgatgagaagtgcctcattgagatcttggcttcccggaccaatgagcagatgcaccagctggtggcagcatacaaagatgcctacgagcgggacctggaggctgacatcatcggcgacacctctggccacttccagaagatgcttgtggtcctgctccagggaaccagggaggaggatgacgtagtgagcgaggacctggtacaacaggatgtccag

SEQ ID NO: 107881 - DNA, 2451 bp, Homo sapiens
  Payload ID: 1178
  Gene Symbol: ANXA6
  Gene Name: annexin A6
  Uniprot ID: P08133
  ENST ID: ENST00000523714
  CDS Start-End: 187-2112
tccagaggcctggccggggtcctgcagtgcagacgttgggaggcacggagacggggagagggggaggcggtccaggactcactctgctccacctctgactccttgaagggtgccaagtaccggggctccatccatgacttcccaggctttgaccccaaccaggatgccgaggctctgtacactgccatgaagggctttggcagtgacaaggaggccatactggacataatcacctcacggagcaacaggcagaggcaggaggtctgccagagctacaagtccctctacggcaaggacctcattgctgatttaaagtatgaattgacgggcaagtttgaacggttgattgtgggcctgatgaggccacctgcctattgtgatgccaaagaaattaaagatgccatctcgggcattggcactgatgagaagtgcctcattgagatcttggcttcccggaccaatgagcagatgcaccagctggtggcagcatacaaagatgcctacgagcgggacctggaggctgacatcatcggcgacacctctggccacttccagaagatgcttgtggtcctgctccagggaaccagggaggaggatgacgtagtgagcgaggacctggtacaacaggatgtccaggacctatacgaggcaggggaactgaaatggggaacagatgaagcccagttcatttacatcttgggaaatcgcagcaagcagcatcttcggttggtgttcgatgagtatctgaagaccacagggaagccgattgaagccagcatccgaggggagctgtctggggactttgagaagctaatgctggccgtagtgaagtgtatccggagcaccccggaatattttgctgaaaggctcttcaaggctatgaagggcctggggactcgggacaacaccctgatccgcatcatggtctcccgtagtgagttggacatgctcgacattcgggagatcttccggaccaagtatgagaagtccctctacagcatgatcaagaatgacacctctggcgagtacaagaagactctgctgaagctgtctgggggagatgatgatgctgctggccagttcttcccggaggcagcgcaggtggcctatcagatgtgggaacttagtgcagtggcccgagtagagctgaagggaactgtgcgcccagccaatgacttcaaccctgacgcagatgccaaagcgctgcggaaagccatgaagggactcgggactgacgaagacacaatcatcgatatcatcacgcaccgcagcaatgtccagcggcagcagatccggcagaccttcaagtctcactttggccgggacttaatgactgacctgaagtctgagatctctggagacctggcaaggctgattctggggctcatgatgccaccggcccattacgatgccaagcagttgaagaaggccatggagggagccggcacagatgaaaaggctcttattgaaatcctggccactcggaccaatgctgaaatccgggccatcaatgaggcctataaggaggactatcacaagtccctggaggatgctctgagctcagacacatctggccacttcaggaggatcctcatttctctggccacggggcatcgtgaggagggaggagaaaacctggaccaggcacgggaagatgcccaggtggctgctgagatcttggaaatagcagacacacctagtggagacaaaacttccttggagacacgtttcatgacgatcctgtgtacccggagctatccgcacctccggagagtcttccaggagttcatcaagatgaccaactatgacgtggagcacaccatcaagaaggagatgtctggggatgtcagggatgcatttgtggccattgttcaaagtgtcaagaacaagcctctcttctttgccgacaaactttacaaatccatgaagggtgctggcacagatgagaagactctgaccaggatcatggtatcccgcagtgagattgacctgctcaacatccggagggaattcattgagaaatatgacaagtctctccaccaagccattgagggtgacacctccggagacttcctgaaggccttgctggctctctgtggtggtgaggactagggccacagctttggcgggcacttctgccaagaaatggttatcagcaccagccgccatggccaagcctgattgttccagctccagagactaaggaaggggcaggggtggggggaggggttgggttgggctcttatcttcagtggagcttaggaaacgctcccactcccacgggccatcgagggcccagcacggctgagcggctgaaaaaccgtagccatagatcctgtccacctccactcccctctgaccctcaggctttcccagcttcctccccttgctacagcctctgccctggtttgggctatgtcagatccaaaaacatcctgaacctctgtctgt

SEQ ID NO: 107882 - DNA, 553 bp, Homo sapiens
  Payload ID: 1178
  Gene Symbol: ANXA6
  Gene Name: annexin A6
  ENST ID: ENST00000517757
  CDS Start-End: 165-553
gctaacgggctccgatccagcgagcgctgcgtcctcgagtccctgcgcccgtgcgtccgtctgcgacccgaggcctccgctgcgcgggtgccaagtaccggggctccatccatgacttcccaggctttgaccccaaccaggatgccgaggctctgtacactgccatgaagggctttggcagtgacaaggaggccatactggacataatcacctcacggagcaacaggcagaggcaggaggtctgccagagctacaagtccctctacggcaaggacctcattgctgatttaaagtatgaattgacgggcaagtttgaacggttgattgtgggcctgatgaggccacctgcctattgtgatgccaaagaaattaaagatgccatctcgggcattggcactgatgagaagtgcctcattgagatcttggcttcccggaccaatgagcagatgcaccagctggtggcagcatacaaagatgcctacgagcgggacctggaggctgacatcatcggcgacacctctggccacttccagaagatgcttgtggtcctgct

SEQ ID NO: 107883 - DNA, 728 bp, Homo sapiens
  Payload ID: 1178
  Gene Symbol: ANXA6
  Gene Name: annexin A6
  ENST ID: ENST00000519644
  CDS Start-End: 114-401
gggctaacgggctccgatccagcgagcgctgcgtcctcgagtccctgcgcccgtgcgtccgtctgcgacccgaggcctccgctgcgcgtggattctgctgcgaaccggagaccatggccaaaccagcacagggtgccaagtaccggggctccatccatgacttcccaggctttgaccccaaccaggatgccgaggctctgtacactgccatgaagggctttggcagtgacaaggaggccatactggacataatcacctcacggagcaacaggcagaggcaggaggtctgccagagctacaagtccctctacggcaaggacctcattgctgatttaaagtatgaattgacgggcaagtttgaacggttgattgtgggtggcctatcagatgtgggaacttagtgcagtggcccgagtagagctgaagggaactgtgcgcccagccaatgacttcaaccctgacgcagatgccaaagcgctgcggaaagccatgaagggactcgggactgacgaagacacaatcatcgatatcatcacgcaccgcagcaatgtccagcggcagcagatccggcagaccttcaagtctcactttggccgggacttaatgactgacctgaagtctgagatctctggagacctggcaaggctgattctggggctcatgatgccaccggcccattacgatgccaagcagttgaagaaggccatggagggagccggcacagatga

SEQ ID NO: 107884 - DNA, 795 bp, Homo sapiens
  Payload ID: 1178
  Gene Symbol: ANXA6
  Gene Name: annexin A6
  ENST ID: ENST00000517677
  CDS Start-End: 112-501
gctaacgggctccgatccagcgagcgctgcgtcctcgagtccctgcgcccgtgcgtccgtctgcgacccgaggcctccgctgcgcgtggattctgctgcgaaccggagaccatggccaaaccagcacagggtgccaagtaccggggctccatccatgacttcccaggctttgaccccaaccaggatgccgaggctctgtacactgccatgaagggctttggcagtgacaaggaggccatactggacataatcacctcacggagcaacaggcagaggcaggaggtctgccagagctacaagtccctctacggcaaggacctcattgctgatttaaagtatgaattgacgggcaagtttgaacggttgattgtgggcctgatgaggccacctgcctattgtgatgccaaagaaattaaagatgccatctcgggcattggcactgatgagaagtgcctcattgagatcttggcttcccggacctatacgaggcaggggaactgaaatggggaacagatgaagcccagttcatttacatcttgggaaatcgcagcaagcagcatcttcggttggtgttcgatgagtatctgaagaccacagggaagccgattgaagccagcatccgaggggagctgtctggggactttgagaagctaatgctggccgtagtgaagtgtatccggagcaccccggaatattttgctgaaaggctcttcaaggctatgaagggcctggggactcgggacaacaccctgatccgcatcatggtctcccgtagtgagttggacatgctcgaca

SEQ ID NO: 107885 - DNA, 923 bp, Homo sapiens
  Payload ID: 1178
  Gene Symbol: ANXA6
  Gene Name: annexin A6
  ENST ID: ENST00000523164
  CDS Start-End: 593-923
ggacttgttatgatcgagggctgctaggcagagatgttggctgcttcctgggccctggcaagtcactttctctttctgagatgcctttaccccgtctagaaaatgagggacttggagtcatggattattaagggcccttgtgggattcagaaacactagatgtaaaatattcagccaatttgagcagtatggtctaggttgctctgggagggatcagaagccatcttaaagccagggtaaatggtgtgtttatgattagctcaggagcttcccagaaccctcagaggcggggctgtggaatcagcagggggactggccctcagaactgcagtctgaacatctagttctggaaggagcttgctttttacatatgaactgtgcactcacacaaggcacacagaaactgctctcagagctgagaatattttcccaaacagtaagaggcccctccttgaagccatctctccttggaaaggggagctcctccagatgggcctgggctgcagccagcagctgaaattgccagcaacaagcccagaggaaagtgcttcaaggctggagatgcagtggattctgctgcgaaccggagaccatggccaaaccagcacagggtgccaagtaccggggctccatccatgacttcccaggctttgaccccaaccaggatgccgaggctctgtacactgccatgaagggctttggcagtgacaaggaggccatactggacataatcacctcacggagcaacaggcagaggcaggaggtctgccagagctacaagtccctctacggcaaggacctcattgctgatttaaagtatgaattgacgggcaagtttgaacggttgattgtgggcctgatgaggccacctgcctattgtgatgccaaagaaattaaagatgccatctcgggcattggcactg

SEQ ID NO: 107886 - DNA, 451 bp, Homo sapiens
  Payload ID: 1178
  Gene Symbol: ANXA6
  Gene Name: annexin A6
  ENST ID: ENST00000522664
  CDS Start-End: 1-274
tgccgacaaactttacaaatccatgaagggtgctggcacagatgagaagactctgaccaggatcatggtatcccgcagtgagattgacctgctcaacatccggagggaattcattgagaaatatgacaagtctctccaccaagccattgagggtgacacctccggagacttcctgaaggccttgctggctctctgtggtggccgcgctagagtactggaccaggaatttggatgcctgggttcaaatctgcatctgccatgcacttgtttctgaccttaggccagcccctttccctccctgagtctctattttcttatctacaatgagacagttggacaaaaaaatcttggcttcccttctaacattaacttcctaaagtatgcctccgattcattcccttgacactttttatttctaaggaagaaataaaaagagatacacaaacacata

SEQ ID NO: 107887 - DNA, 2174 bp, Homo sapiens
  Payload ID: 1179
  Gene Symbol: ANXA7
  Gene Name: annexin A7
  Uniprot ID: P20073
  ENST ID: ENST00000372919
  CDS Start-End: 58-1524
cccggctccatcttgcgggagaccgggttgggctgtgacgctgctgctggggtcagaatgtcatacccaggctatcccccaacaggctacccacctttccctggatatcctcctgcaggtcaggagtcatcttttcccccttctggtcagtatccttatcctagtggctttcctccaatgggaggaggtgcctacccacaagtgccaagtagtggctacccaggagctggaggctaccctgcgcctggaggttatccagcccctggaggctatcctggtgccccacagccagggggagctccatcctatcccggagttcctccaggccaaggatttggagtcccaccaggtggagcaggcttttctgggtatccacagccaccttcacagtcttatggaggtggtccagcacaggttccactacctggtggctttcctggaggacagatgccttctcagtatcctggaggacaacctacttaccctagtcagatcaatacagattctttttcttcctatcctgttttctctcctgtttctttggattatagcagtgaacctgccacagtgactcaggtcactcaaggaactatccgaccagctgccaacttcgatgctataagagatgcagaaattcttcgtaaggcaatgaagggttttgggacagatgagcaggcaattgtggatgtggtggccaaccgttccaatgatcagaggcaaaaaattaaagcagcatttaagacctcctatggcaaggatttaatcaaagatctcaaatcagagttaagtggaaatatggaagaactgatcctggccctcttcatgcctcctacgtattacgatgcctggagcttacggaaagcaatgcagggagcaggaactcaggaacgtgtattgattgagattttgtgcacaagaacaaatcaggaaatccgagaaattgtcagatgttatcagtcagaatttggacgagaccttgaaaaggacattaggtcagatacatcaggacattttgaacgtttacttgtgtccatgtgccagggaaatcgtgatgagaaccagagtataaaccaccaaatggctcaggaagatgctcagcgtctctatcaagctggtgaggggagactagggaccgatgaatcttgctttaacatgatccttgccacaagaagctttcctcagctgagagctaccatggaggcttattctaggatggctaatcgagacttgttaagcagtgtgagccgtgagttttccggatatgtagaaagtggtttgaagaccatcttgcagtgtgccctgaaccgccctgccttctttgctgagaggctctactatgctatgaaaggtgctggcacagatgactccaccctggtccggattgtggtcactcgaagtgagattgaccttgtacaaataaaacagatgttcgctcagatgtatcagaagactctgggcacaatgattgcaggtgacacgagtggagattaccgaagacttcttctggctattgtgggccagtaggagggatttttttttttttaatgaaaaaaaatttctattcatagcttatccttcagagcaatgacctgcatgcagcaatatcaaacatcagctaaccgaaagagctttctgtcaaggaccgtatcagggtaatgtgcttggtttgcacatgttgttattgccttaattctaattttattttgttctctacatacaatcaatgtaaagccatatcacaatgatacagtaatattgcaatgtttgtaaaccttcattcttactagtttcattctaatcaagatgtcaaattgaataaaaatcacagcaatctctgattctgtgtaataatattgaataattttttagaaggttactgaaagctctgccttccggaatccctctaagtctgcttgatagagtggatagtgtgttaaaactgtgtactttaaaaaaaaattcaacctttacatctagaataatttgcatctcattttgcctaaattggttctgtattcataaacactttccacatagaaaatagattagtattacctgtggcaccttttaagaaagggtcaaatgtttatatgcttaagatacatagcctacttttttttcgcagttgttttctttttttaaattgagttatgacaaataaaaaattgcatata

SEQ ID NO: 107888 - DNA, 2452 bp, Homo sapiens
  Payload ID: 1179
  Gene Symbol: ANXA7
  Gene Name: annexin A7
  Uniprot ID: P20073
  ENST ID: ENST00000372921
  CDS Start-End: 58-1458
cccggctccatcttgcgggagaccgggttgggctgtgacgctgctgctggggtcagaatgtcatacccaggctatcccccaacaggctacccacctttccctggatatcctcctgcaggtcaggagtcatcttttcccccttctggtcagtatccttatcctagtggctttcctccaatgggaggaggtgcctacccacaagtgccaagtagtggctacccaggagctggaggctaccctgcgcctggaggttatccagcccctggaggctatcctggtgccccacagccagggggagctccatcctatcccggagttcctccaggccaaggatttggagtcccaccaggtggagcaggcttttctgggtatccacagccaccttcacagtcttatggaggtggtccagcacaggttccactacctggtggctttcctggaggacagatgccttctcagtatcctggaggacaacctacttaccctagtcagcctgccacagtgactcaggtcactcaaggaactatccgaccagctgccaacttcgatgctataagagatgcagaaattcttcgtaaggcaatgaagggttttgggacagatgagcaggcaattgtggatgtggtggccaaccgttccaatgatcagaggcaaaaaattaaagcagcatttaagacctcctatggcaaggatttaatcaaagatctcaaatcagagttaagtggaaatatggaagaactgatcctggccctcttcatgcctcctacgtattacgatgcctggagcttacggaaagcaatgcagggagcaggaactcaggaacgtgtattgattgagattttgtgcacaagaacaaatcaggaaatccgagaaattgtcagatgttatcagtcagaatttggacgagaccttgaaaaggacattaggtcagatacatcaggacattttgaacgtttacttgtgtccatgtgccagggaaatcgtgatgagaaccagagtataaaccaccaaatggctcaggaagatgctcagcgtctctatcaagctggtgaggggagactagggaccgatgaatcttgctttaacatgatccttgccacaagaagctttcctcagctgagagctaccatggaggcttattctaggatggctaatcgagacttgttaagcagtgtgagccgtgagttttccggatatgtagaaagtggtttgaagaccatcttgcagtgtgccctgaaccgccctgccttctttgctgagaggctctactatgctatgaaaggtgctggcacagatgactccaccctggtccggattgtggtcactcgaagtgagattgaccttgtacaaataaaacagatgttcgctcagatgtatcagaagactctgggcacaatgattgcaggtgacacgagtggagattaccgaagacttcttctggctattgtgggccagtaggagggatttttttttttttaatgaaaaaaaatttctattcatagcttatccttcagagcaatgacctgcatgcagcaatatcaaacatcagctaaccgaaagagctttctgtcaaggaccgtatcagggtaatgtgcttggtttgcacatgttgttattgccttaattctaattttattttgttctctacatacaatcaatgtaaagccatatcacaatgatacagtaatattgcaatgtttgtaaaccttcattcttactagtttcattctaatcaagatgtcaaattgaataaaaatcacagcaatctctgattctgtgtaataatattgaataattttttagaaggttactgaaagctctgccttccggaatccctctaagtctgcttgatagagtggatagtgtgttaaaactgtgtactttaaaaaaaaattcaacctttacatctagaataatttgcatctcattttgcctaaattggttctgtattcataaacactttccacatagaaaatagattagtattacctgtggcaccttttaagaaagggtcaaatgtttatatgcttaagatacatagcctacttttttttcgcagttgttttctttttttaaattgagttatgacaaataaaaaattgcatatatttaaggtgtacaatatggtgttttgatatcagcattccttgtgtaatgattccacaattaaggtcaggctaattacgtatctgtcaccttgacatagttaccattttttcatgtgtggtgaaaacacttaagatctactaccttagcaaattttaagtgttcagtacattattaactatagatactgtgctctacattaaacctctagcatttattcgttttataactgaaagtttataccctttgaccaacatctccccattttccccacctctcacctggacaaccaccactgtgtttaagttcagctattttagattccacgtataaatggtatacaata

SEQ ID NO: 107889 - DNA, 648 bp, Homo sapiens
  Payload ID: 1179
  Gene Symbol: ANXA7
  Gene Name: annexin A7
  ENST ID: ENST00000394847
  CDS Start-End: 215-648
tcagatttttttttcctttattttgaccctgacccttttgcccttggtctatctacttttctttttctttctttttttttttctttttccttgtcttgtcttgtcttttctttcaactggagtgcaatgatgcaaacacgactcactgccgccttgacctcctggcctcaagcaattctcccacctcagcttcctgaatagtttggactacagaatgtcatacccaggctatcccccaacaggctacccacctttccctggatatcctcctgcaggtcaggagtcatcttttcccccttctggtcagtatccttatcctagtggctttcctccaatgggaggaggtgcctacccacaagtgccaagtagtggctacccaggagctggaggctaccctgcgcctggaggttatccagcccctggaggctatcctggtgccccacagccagggggagctccatcctatcccggagttcctccaggccaaggatttggagtcccaccaggtggagcaggcttttctgggtatccacagccaccttcacagtcttatggaggtggtccagcacaggttccactacctggtggctttcctggaggacagatgccttctcagtatcctggaggacaacctacttaccctagtca

SEQ ID NO: 107890 - DNA, 1971 bp, Homo sapiens
  Payload ID: 1180
  Gene Symbol: ANXA8
  Gene Name: annexin A8
  ENST ID: ENST00000583448
  CDS Start-End: 151-216
gtggcgctgccctgggcgggcttgcacccccacacccaagtgagcggcctgctcactcctcagctgcaggagccagacgtgtggagtcccagcagaggccaacctgtgtctcttcatctccctgggaaaggtgcccccgaggtgaaagagatggcctggtggaaatcctgggactcaggaattctcccactccggaatgccttgctgctggggtgaccaggtcttcacttgtgaaacaggagtcggccacctcagccctgcgcctggcctggtggaacatgggtcaccgccccaacctggggcagccgccccatcccaacgcagttgctgccgctctccatgcctccctgtgcccagctaaccgggggacttgtcccctgggaaaacctgggtacccaggctgcctttggtttcagcccctactcctcttcccgggctgcctttgctccccggacggcccctttccccgggctgtgttcacatcggctgggaagggtcccttgcagacagatcttggacgaggtcgcgtcccccctcgtgaccagcaaactcctaaaagccgcccttgccccagagcccctgtagcctccaaccggcagtcaggaggcagcgccgtctcagcgccgcttagtggcgccaggcgtgcctggaaatccgctttcgcagcgccccctcgtagccgcctccgcccgcagaaaggcgttccctggacagagaagcgggcgcgcgggggcgggcgcgcggggccttgccggagaacctgactctccgcagcagcagtggaagccagagtgacgcgttgtgttgaacaccagttttctggagcgctgtgtgttctcatagctgagcagtctgtttctccaatcaggtttcaaagccacttcaactgcactggcccctgtgggtcactgctgcaccgccctggcccatgtgggtccctgaggagcgacctgccggggccacctggctggacgaaaaagacacaccttggacttaagccgtgagaaaaaaaaaacttcatcagtaagaaacaagtcaatagacaagtaaaagactaggagaaaatatgcataaaacataaaaaagtgacttgattcctgattctggagtatttaagaattcctataactcaacaaaaagttcagttttttaaaatgagcaaaaggcttgggtaaactattcacaaaggaacatagacaaatgccagtacacacatgagaagcgcatacacatccacaaacttcaaacaagcccacctcatgtatttctagtgagtaaggaaaagaacgcaaacacttttgaaaattgtttggttgtttcttgtaaatttaaacaaataccctattatattatccagcgagtccatccttaggtttttatccaaggataaagaggtgaaaactcatatctaacaaatagacttctgaaaagatgaaaatagaagctttattcataaaagacaaaaactagaaataacccaaatattcattcacaggagaatgaataaacagactaggttgaatccatacaatggaatggtagcagacaataaaaagaaaatgaactattgatgccccctactgcacagcagaagctctgaatcgtgttcctgaatgaaagaagtcaggtatgaaagaataaacattgtatgattccatttatatgaaaatgaatctgtgatttaaaaatcagactagtattaggttggtgcaaaagtaattgcggtttttgccttttttttttttttttttaaatagttgctttggggtttatggatggagtggcatggtagaggttagctgaagggggcatgaaataactttttgggggtgctagagtgttgtaaatcttacagtgggggagggacaggagtgcaggcatttgacaaaacacattgaattgtgaaatttaagatttttgaatttctttgtatgtaaattacctgccaataaaaacatgacgaatagagca

SEQ ID NO: 107891 - DNA, 1960 bp, Homo sapiens
  Payload ID: 1180
  Gene Symbol: ANXA8
  Gene Name: annexin A8
  Uniprot ID: P13928
  ENST ID: ENST00000585281
  CDS Start-End: 123-1106
cccacacccaagtgagcggcctgctcactcctcagctgcaggagccagacgtgtggagtcccagcagaggccaacctgtgtctcttcatctccctgggaaaggtgcccccgaggtgaaagagatggcctggtggaaatcctggattgaacaggagggtgtcacagtgaagagcagctcccacttcaacccagaccctgatgcagagaccctctacaaagccatgaaggggatcgggaccaacgagcaggctatcatcgatgtgctcaccaagagaagcaacacgcagcggcagcagatcgccaagtccttcaaggctcagttcggcaaggacctcactgagaccttgaagtctgagctcagtggcaagtttgagaggctcattgtggcccttatgtacccgccatacagatacgaagccaaggagctgcatgacgccatgaagggcttaggaaccaaggagggtgtcatcattgagatcctggcctctcggaccaagaaccagctgcgggagataatgaaggcgtatgaggaagactatgggtccagcctggaggaggacatccaagcagacacaagtggctacctggagaggatcctggtgtgcctcctgcagggcagcagggatgatgtgagcagctttgtggacccaggactggccctccaagacgcacaggatctgtatgcggcaggcgagaagattcgtgggactgatgagatgaaattcatcaccatcctgtgcacgcgcagtgccactcacctgctgagagtgtttgaagagtatgagaaaattgccaacaagagcattgaggacagcatcaagagtgagacccatggctcactggaggaggccatgctcactgtggtgaaatgcacccaaaacctccacagctactttgcagagagactctactatgccatgaagggagcagggacgcgtgatgggaccctgataagaaacatcgtttcaaggagcgagattgacttaaatcttatcaaatgtcacttcaagaagatgtacggcaagaccctcagcagcatgatcatggaagacaccagcggtgactacaagaacgccctgctgagcctggtgggcagcgacccctgaggcacagaagaacaagagcaaagaccatgaagccagagtctccaggactcctcactcaacctcggccatggacgcaggttgggtgtgaggggggtcccagcctttcggtcttctatttccctatttccagtgctttccagccgggtttctgacccagagggtggaaccggcctggactcctcttcccaacttcctccaggtcatttcccagtgtgagcacaatgccaaccttagtgtttctccagccagacagatgcctcagcatgaagggcttggggacttgtggatcattccttcctccctgcaggagcttcccaagctggtcacagagtctcctgggcacaggttatacagaccccagccccattcccatctactgaaacagggtctccacaagaggggccagggaatatgggtttttaacaagcgtcttacaaaacacttctctatcatgcagccggagagctggctgggagcccttttgttttagaacacacatccttcagcagctgagaaacgaacacgaatccatcccaaccgagatgccattaacattcatctaaaaatgttaggctctaaatggacgaaaaattctctcgccatcttaataacaaaataaactacaaattcctgacccaaggacactgtgttataagaggcgtgggctcccctggtggctgaccaggtcagctgccctggccttgcacccctctgcatgcagcacagaagggtgtgaccatgccctcagcaccactcttgtccccactgaacggcaactgagactgggtacctggagattctgaagtgcctttgctgtggttttcaaaataataaagatttgtattcaactcaaa

SEQ ID NO: 107892 - DNA, 1874 bp, Homo sapiens
  Payload ID: 1180
  Gene Symbol: ANXA8
  Gene Name: annexin A8
  Uniprot ID: P13928
  ENST ID: ENST00000583911
  CDS Start-End: 226-1023
ctgggtggggcctgggagccacaggagatgcccaaagccaggcagagcccgggggcgaggggacggcaggcaggtgtggcgctgccctgggcgggcttgcacccccacacccaagtgagcggcctgctcactcctcagctgcaggagccagacgtgtggagtcccagcagaggccaacctgtgtctcttcatctccctgggaaaggtgcccccgaggtgaaagagatggcctggtggaaatcctgggacctcactgagaccttgaagtctgagctcagtggcaagtttgagaggctcattgtggcccttatgtacccgccatacagatacgaagccaaggagctgcatgacgccatgaagggcttaggaaccaaggagggtgtcatcattgagatcctggcctctcggaccaagaaccagctgcgggagataatgaaggcgtatgaggaagactatgggtccagcctggaggaggacatccaagcagacacaagtggctacctggagaggatcctggtgtgcctcctgcagggcagcagggatgatgtgagcagctttgtggacccaggactggccctccaagacgcacaggatctgtatgcggcaggcgagaagattcgtgggactgatgagatgaaattcatcaccatcctgtgcacgcgcagtgccactcacctgctgagagtgtttgaagagtatgagaaaattgccaacaagagcattgaggacagcatcaagagtgagacccatggctcactggaggaggccatgctcactgtggtgaaatgcacccaaaacctccacagctactttgcagagagactctactatgccatgaagggagcagggacgcgtgatgggaccctgataagaaacatcgtttcaaggagcgagattgacttaaatcttatcaaatgtcacttcaagaagatgtacggcaagaccctcagcagcatgatcatggaagacaccagcggtgactacaagaacgccctgctgagcctggtgggcagcgacccctgaggcacagaagaacaagagcaaagaccatgaagccagagtctccaggactcctcactcaacctcggccatggacgcaggttgggtgtgaggggggtcccagcctttcggtcttctatttccctatttccagtgctttccagccgggtttctgacccagagggtggaaccggcctggactcctcttcccaacttcctccaggtcatttcccagtgtgagcacaatgccaaccttagtgtttctccagccagacagatgcctcagcatgaagggcttggggacttgtggatcattccttcctccctgcaggagcttcccaagctggtcacagagtctcctgggcacaggttatacagaccccagccccattcccatctactgaaacagggtctccacaagaggggccagggaatatgggtttttaacaagcgtcttacaaaacacttctctatcatgcagccggagagctggctgggagcccttttgttttagaacacacatccttcagcagctgagaaacgaacacgaatccatcccaaccgagatgccattaacattcatctaaaaatgttaggctctaaatggacgaaaaattctctcgccatcttaataacaaaataaactacaaattcctgacccaaggacactgtgttataagaggcgtgggctcccctggtggctgaccaggtcagctgccctggccttgcacccctctgcatgcagcacagaagggtgtgaccatgccctcagcaccactcttgtccccactgaacggcaactgagactgggtacctggagattctgaagtgcctttgctgtggttttcaaaataataaagatttgtattcaactc

SEQ ID NO: 107893 - DNA, 1171 bp, Homo sapiens
  Payload ID: 1180
  Gene Symbol: ANXA8
  Gene Name: annexin A8
  Uniprot ID: P13928
  ENST ID: ENST00000577813
  CDS Start-End: 84-509
aggagccagacgtgtggagtcccagcagaggccaacctgtgtctcttcatctccctgggaaaggtgcccccgaggtgaaagagatggcctggtggaaatcctggattgaacaggagggtgtcacagtgaagagcagctcccacttcaacccagaccctgatgcagagaccctctacaaagccatgaaggggatcgggaccaacgagcaggctatcatcgatgtgctcaccaagagaagcaacacgcagcggcagcagatcgccaagtccttcaaggctcagttcggcaaggacctcactgagaccttgaagtctgagctcagtggcaagtttgagaggctcattgtggcccttatgtacccgccatacagatacgaagccaaggagctgcatgacgccatgaagggcttaggaaccaaggagggtgtcatcattgagatcctggcctctcggaccaagaaccagctgcgggagataatgaaggcgtatgaggaagggcagcagggatgatgtgagcagctttgtggacccaggactggccctccaagacgcacaggatctgtatgcggcaggcgagaagattcgtgggactgatgagatgaaattcatcaccatcctgtgcacgcgcagtgccactcacctgctgagagtgtttgaagagtatgagaaaattgccaacaagagcattgaggacagcatcaagagtgagacccatggctcactggaggaggccatgctcactgtggtgaaatgcacccaaaacctccacagctactttgcagagagactctactatgccatgaagggagcagggacgcgtgatgggaccctgataagaaacatcgtttcaaggagcgagattgacttaaatcttatcaaatgtcacttcaagaagatgtacggcaagaccctcagcagcatgatcatggaagacaccagcggtgactacaagaacgccctgctgagcctggtgggcagcgacccctgaggcacagaagaacaagagcaaagaccatgaagccagagtctccaggactcctcactcaacctcggccatggacgcaggtcatttcccagtgtgagcacaatgccaaccttagtgtttctccagccagacagatgcctcagcatgaagggcttggggacttgtggatcattccttcctccctgca

SEQ ID NO: 107894 - DNA, 1860 bp, Homo sapiens
  Payload ID: 1180
  Gene Symbol: ANXA8
  Gene Name: annexin A8
  ENST ID: ENST00000583874
  CDS Start-End: 176-1006
gggggcgaggggacggcaggcaggtgtggcgctgccctgggcgggcttgcacccccacacccaagtgagcggcctgctcactcctcagctgcaggagccagacgtgtggagtcccagcagaggccaacctgtgtctcttcatctccctgggaaaggtgcccccgaggtgaaagagatggcctggtggaaatcctggattgaacaggagggtgtcacagtgaagagcagctcccacttcaacccagaccctgatgcagagaccctctacaaagccatgaaggggatcggtgtcgggtcccaactgctcagccaccaagcagctgccttcgccttcccctcctccgccctcaccagtgtgtcaccctgggggcagcagggtcacttgtgctgtaaccctgcagggaccaacgagcaggctatcatcgatgtgctcaccaagagaagcaacacgcagcggcagcagatcgccaagtccttcaaggctcagttcggcaaggacctcactgagaccttgaagtctgagctcagtggcaagtttgagaggctcattgtggcccttatgtacccgccatacagatacgaagccaaggagctgcatgacgccatgaagggcagcagggatgatgtgagcagctttgtggacccaggactggccctccaagacgcacaggatctgtatgcggcaggcgagaagattcgtgggactgatgagatgaaattcatcaccatcctgtgcacgcgcagtgccactcacctgctgagagtgaaatgcacccaaaacctccacagctactttgcagagagactctactatgccatgaagggagcagggacgcgtgatgggaccctgataagaaacatcgtttcaaggagcgagattgacttaaatcttatcaaatgtcacttcaagaagatgtacggcaagaccctcagcagcatgatcatggaagacaccagcggtgactacaagaacgccctgctgagcctggtgggcagcgacccctgaggcacagaagaacaagagcaaagaccatgaagccagagtctccaggactcctcactcaacctcggccatggacgcaggttgggtgtgaggggggtcccagcctttcggtcttctatttccctatttccagtgctttccagccgggtttctgacccagagggtggaaccggcctggactcctcttcccaacttcctccaggtcatttcccagtgtgagcacaatgccaaccttagtgtttctccagccagacagatgcctcagcatgaagggcttggggacttgtggatcattccttcctccctgcaggagcttcccaagctggtcacagagtctcctgggcacaggttatacagaccccagccccattcccatctactgaaacagggtctccacaagaggggccagggaatatgggtttttaacaagcgtcttacaaaacacttctctatcatgcagccggagagctggctgggagcccttttgttttagaacacacatccttcagcagctgagaaacgaacacgaatccatcccaaccgagatgccattaacattcatctaaaaatgttaggctctaaatggacgaaaaattctctcgccatcttaataacaaaataaactacaaattcctgacccaaggacactgtgttataagaggcgtgggctcccctggtggctgaccaggtcagctgccctggccttgcacccctctgcatgcagcacagaagggtgtgaccatgccctcagcaccactcttgtccccactgaacggcaactgagactgggtacctggagattctgaagtgcctttgctgtggttttcaaaataataaagatttgtattcaactcaaa

SEQ ID NO: 107895 - DNA, 2174 bp, Homo sapiens
  Payload ID: 1180
  Gene Symbol: ANXA8
  Gene Name: annexin A8
  ENST ID: ENST00000611843
  CDS Start-End: 226-1323
ctgggtggggcctgggagccacaggagatgcccaaagccaggcagagcccgggggcgaggggacggcaggcaggtgtggcgctgccctgggcgggcttgcacccccacacccaagtgagcggcctgctcactcctcagctgcaggagccagacgtgtggagtcccagcagaggccaacctgtgtctcttcatctccctgggaaaggtgcccccgaggtgaaagagatggcctggtggaaatcctggattgaacaggagggtgtcacagtgaagagcagctcccacttcaacccagaccctgatgcagagaccctctacaaagccatgaaggggatcggtgtcgggtcccaactgctcagccaccaagcagctgccttcgccttcccctcctccgccctcaccagtgtgtcaccctgggggcagcagggtcacttgtgctgtaaccctgcagggaccaacgagcaggctatcatcgatgtgctcaccaagagaagcaacacgcagcggcagcagatcgccaagtccttcaaggctcagttcggcaaggacctcactgagaccttgaagtctgagctcagtggcaagtttgagaggctcattgtggcccttatgtacccgccatacagatacgaagccaaggagctgcatgacgccatgaagggcttaggaaccaaggagggtgtcatcattgagatcctggcctctcggaccaagaaccagctgcgggagataatgaaggcgtatgaggaagactatgggtccagcctggaggaggacatccaagcagacacaagtggctacctggagaggatcctggtgtgcctcctgcagggcagcagggatgatgtgagcagctttgtggacccaggactggccctccaagacgcacaggatctgtatgcggcaggcgagaagattcgtgggactgatgagatgaaattcatcaccatcctgtgcacgcgcagtgccactcacctgctgagagtgtttgaagagtatgagaaaattgccaacaagagcattgaggacagcatcaagagtgagacccatggctcactggaggaggccatgctcactgtggtgaaatgcacccaaaacctccacagctactttgcagagagactctactatgccatgaagggagcagggacgcgtgatgggaccctgataagaaacatcgtttcaaggagcgagattgacttaaatcttatcaaatgtcacttcaagaagatgtacggcaagaccctcagcagcatgatcatggaagacaccagcggtgactacaagaacgccctgctgagcctggtgggcagcgacccctgaggcacagaagaacaagagcaaagaccatgaagccagagtctccaggactcctcactcaacctcggccatggacgcaggttgggtgtgaggggggtcccagcctttcggtcttctatttccctatttccagtgctttccagccgggtttctgacccagagggtggaaccggcctggactcctcttcccaacttcctccaggtcatttcccagtgtgagcacaatgccaaccttagtgtttctccagccagacagatgcctcagcatgaagggcttggggacttgtggatcattccttcctccctgcaggagcttcccaagctggtcacagagtctcctgggcacaggttatacagaccccagccccattcccatctactgaaacagggtctccacaagaggggccagggaatatgggtttttaacaagcgtcttacaaaacacttctctatcatgcagccggagagctggctgggagcccttttgttttagaacacacatccttcagcagctgagaaacgaacacgaatccatcccaaccgagatgccattaacattcatctaaaaatgttaggctctaaatggacgaaaaattctctcgccatcttaataacaaaataaactacaaattcctgacccaaggacactgtgttataagaggcgtgggctcccctggtggctgaccaggtcagctgccctggccttgcacccctctgcatgcagcacagaagggtgtgaccatgccctcagcaccactcttgtccccactgaacggcaactgagactgggtacctggagattctgaagtgcctttgctgtggttttcaaaataataaagatttgtattcaactc

SEQ ID NO: 107896 - DNA, 2174 bp, Homo sapiens
  Payload ID: 1181
  Gene Symbol: ANXA8L1
  Gene Name: annexin A8-like 1
  ENST ID: ENST00000584982
  CDS Start-End: 226-1323
ctgggtggggcctgggagccacaggagacgcccaaagccaggcagagcccgggggcgagggggcggcaggcaggtgtagcgctgccctgggagggcttgcacccccacacccaagtgagcggcctgctcactcctcagctgcaggagccagacgtgtggagtcccagcagaggccaacctgtgtctcttcatctccgtgagaaaggtgcccccgaagtgaaagagatggcctggtggaaagcctggattgaacaggagggtgtcacagtgaagagcagctcccacttcaacccagaccctgatgcagagaccctctacaaagccatgaaggggatcggtgtcgggtcccaactgctcagccaccaagcagctgccttcgccttcccctcctccgccctcaccagtgtgtcaccctgggggcagcagggtcacttgtgctgtaaccctgcagggaccaacgagcaggctatcatcgatgtgctcaccaagagaagcaacacgcagcggcagcagatcgccaagtccttcaaggctcagttcggcaaggacctcactgagaccttgaagtctgagctcagtggcaagtttgagaggctcattgtggcccttatgtatccgccatacagatacgaagccaaggagctgcatgacgccatgaagggcttaggaaccaaggagggtgtcatcattgagatcctggcctctcggaccaagaaccagctgcgggagataatgaaggcgtatgaggaagactatgggtccagcctggaggaggacatccaagcagacacaagtggctacctggagaggatcctggtgtgcctcctgcagggcagcagggatgatgtgagcagctttgtggacccggcactggccctccaagacgcacaggatctgtatgcggcaggcgagaagattcgtgggactgatgagatgaaattcatcaccatcctgtgcacgcgcagtgccactcacctgctgagagtgtttgaagagtatgagaaaattgccaacaagagcattgaggacagcatcaagagtgagacccatggctcactggaggaggccatgctcactgtggtgaaatgcacccaaaacctccacagctactttgcagagagactctactatgccatgaagggagcagggacgcgtgatgggaccctgataagaaacatcgtttcaaggagcgagattgacttaaatcttatcaaatgtcacttcaagaagatgtacggcaagaccctcagcagcatgatcatggaagacaccagcggcgactacaagaacgccctgctgagcctggtgggcagcgacccctgaggcacagaagaacaagagcaaagaccatgaagccagagtctccaggactcctcactcaacctcggccatggacgcaggttgggtgtgaggggggtcccagcctttcggtcttctatttccctatttccagtgctttccagccgggtttctgacccagagggtggaaccggcctggactcctcttcccaacttcctccaggtcatttcccagtgtgagcacaatgccaaccttagtgtttctccagccagacagatgcctcagcatgaagggcttggggacttgtggatcattccttcctccctgcaggagcttcccaagctggtcacagagtctcctgggcacaggttatacagaccccagccccattcccatctactgaaacagggtctccacaagaggggccagggaatatgggtttttaacaagcgtcttacaaaacacttctctatcatgcagccggagagctggctgggagcccttttgttttagaacacacatccttcagcagctgagaaatgaacacgaatccatcccaaccgagatgccattaacattcatctaaaaatgttaggctctaaatggacgaaaaattctctcgccatcttaataacaaaataaactacaaattcctgacccaaggacactgtgttataagaggcgtgggctcccctggtggctgaccaggtcagctgccctggccttgcacccctctgcatgcagcacagaagggtgtgaccatgccctcagcaccactcttgtccccactgaacggcaactgagactgggtacctggagattctgaagtgcctttgctgtggttttcaaaataataaagatttgtattcaactc

SEQ ID NO: 107897 - DNA, 1874 bp, Homo sapiens
  Payload ID: 1181
  Gene Symbol: ANXA8L1
  Gene Name: annexin A8-like 1
  ENST ID: ENST00000613703
  CDS Start-End: 226-1023
ctgggtggggcctgggagccacaggagacgcccaaagccaggcagagcccgggggcgagggggcggcaggcaggtgtagcgctgccctgggagggcttgcacccccacacccaagtgagcggcctgctcactcctcagctgcaggagccagacgtgtggagtcccagcagaggccaacctgtgtctcttcatctccgtgagaaaggtgcccccgaagtgaaagagatggcctggtggaaagcctgggacctcactgagaccttgaagtctgagctcagtggcaagtttgagaggctcattgtggcccttatgtatccgccatacagatacgaagccaaggagctgcatgacgccatgaagggcttaggaaccaaggagggtgtcatcattgagatcctggcctctcggaccaagaaccagctgcgggagataatgaaggcgtatgaggaagactatgggtccagcctggaggaggacatccaagcagacacaagtggctacctggagaggatcctggtgtgcctcctgcagggcagcagggatgatgtgagcagctttgtggacccggcactggccctccaagacgcacaggatctgtatgcggcaggcgagaagattcgtgggactgatgagatgaaattcatcaccatcctgtgcacgcgcagtgccactcacctgctgagagtgtttgaagagtatgagaaaattgccaacaagagcattgaggacagcatcaagagtgagacccatggctcactggaggaggccatgctcactgtggtgaaatgcacccaaaacctccacagctactttgcagagagactctactatgccatgaagggagcagggacgcgtgatgggaccctgataagaaacatcgtttcaaggagcgagattgacttaaatcttatcaaatgtcacttcaagaagatgtacggcaagaccctcagcagcatgatcatggaagacaccagcggcgactacaagaacgccctgctgagcctggtgggcagcgacccctgaggcacagaagaacaagagcaaagaccatgaagccagagtctccaggactcctcactcaacctcggccatggacgcaggttgggtgtgaggggggtcccagcctttcggtcttctatttccctatttccagtgctttccagccgggtttctgacccagagggtggaaccggcctggactcctcttcccaacttcctccaggtcatttcccagtgtgagcacaatgccaaccttagtgtttctccagccagacagatgcctcagcatgaagggcttggggacttgtggatcattccttcctccctgcaggagcttcccaagctggtcacagagtctcctgggcacaggttatacagaccccagccccattcccatctactgaaacagggtctccacaagaggggccagggaatatgggtttttaacaagcgtcttacaaaacacttctctatcatgcagccggagagctggctgggagcccttttgttttagaacacacatccttcagcagctgagaaatgaacacgaatccatcccaaccgagatgccattaacattcatctaaaaatgttaggctctaaatggacgaaaaattctctcgccatcttaataacaaaataaactacaaattcctgacccaaggacactgtgttataagaggcgtgggctcccctggtggctgaccaggtcagctgccctggccttgcacccctctgcatgcagcacagaagggtgtgaccatgccctcagcaccactcttgtccccactgaacggcaactgagactgggtacctggagattctgaagtgcctttgctgtggttttcaaaataataaagatttgtattcaactc

SEQ ID NO: 107898 - DNA, 1109 bp, Homo sapiens
  Payload ID: 1181
  Gene Symbol: ANXA8L1
  Gene Name: annexin A8-like 1
  Uniprot ID: Q5VT79
  ENST ID: ENST00000619162
  CDS Start-End: 126-1109
acccccacacccaagtgagcggcctgctcactcctcagctgcaggagccagacgtgtggagtcccagcagaggccaacctgtgtctcttcatctccgtgagaaaggtgcccccgaagtgaaagagatggcctggtggaaagcctggattgaacaggagggtgtcacagtgaagagcagctcccacttcaacccagaccctgatgcagagaccctctacaaagccatgaaggggatcgggaccaacgagcaggctatcatcgatgtgctcaccaagagaagcaacacgcagcggcagcagatcgccaagtccttcaaggctcagttcggcaaggacctcactgagaccttgaagtctgagctcagtggcaagtttgagaggctcattgtggcccttatgtatccgccatacagatacgaagccaaggagctgcatgacgccatgaagggcttaggaaccaaggagggtgtcatcattgagatcctggcctctcggaccaagaaccagctgcgggagataatgaaggcgtatgaggaagactatgggtccagcctggaggaggacatccaagcagacacaagtggctacctggagaggatcctggtgtgcctcctgcagggcagcagggatgatgtgagcagctttgtggacccggcactggccctccaagacgcacaggatctgtatgcggcaggcgagaagattcgtgggactgatgagatgaaattcatcaccatcctgtgcacgcgcagtgccactcacctgctgagagtgtttgaagagtatgagaaaattgccaacaagagcattgaggacagcatcaagagtgagacccatggctcactggaggaggccatgctcactgtggtgaaatgcacccaaaacctccacagctactttgcagagagactctactatgccatgaagggagcagggacgcgtgatgggaccctgataagaaacatcgtttcaaggagcgagattgacttaaatcttatcaaatgtcacttcaagaagatgtacggcaagaccctcagcagcatgatcatggaagacaccagcggcgactacaagaacgccctgctgagcctggtgggcagcgacccctga

SEQ ID NO: 107899 - DNA, 1861 bp, Homo sapiens
  Payload ID: 1181
  Gene Symbol: ANXA8L1
  Gene Name: annexin A8-like 1
  Uniprot ID: Q5VT79
  ENST ID: ENST00000622769
  CDS Start-End: 177-1007
cgggggcgagggggcggcaggcaggtgtagcgctgccctgggagggcttgcacccccacacccaagtgagcggcctgctcactcctcagctgcaggagccagacgtgtggagtcccagcagaggccaacctgtgtctcttcatctccgtgagaaaggtgcccccgaagtgaaagagatggcctggtggaaagcctggattgaacaggagggtgtcacagtgaagagcagctcccacttcaacccagaccctgatgcagagaccctctacaaagccatgaaggggatcggtgtcgggtcccaactgctcagccaccaagcagctgccttcgccttcccctcctccgccctcaccagtgtgtcaccctgggggcagcagggtcacttgtgctgtaaccctgcagggaccaacgagcaggctatcatcgatgtgctcaccaagagaagcaacacgcagcggcagcagatcgccaagtccttcaaggctcagttcggcaaggacctcactgagaccttgaagtctgagctcagtggcaagtttgagaggctcattgtggcccttatgtatccgccatacagatacgaagccaaggagctgcatgacgccatgaagggcagcagggatgatgtgagcagctttgtggacccggcactggccctccaagacgcacaggatctgtatgcggcaggcgagaagattcgtgggactgatgagatgaaattcatcaccatcctgtgcacgcgcagtgccactcacctgctgagagtgaaatgcacccaaaacctccacagctactttgcagagagactctactatgccatgaagggagcagggacgcgtgatgggaccctgataagaaacatcgtttcaaggagcgagattgacttaaatcttatcaaatgtcacttcaagaagatgtacggcaagaccctcagcagcatgatcatggaagacaccagcggcgactacaagaacgccctgctgagcctggtgggcagcgacccctgaggcacagaagaacaagagcaaagaccatgaagccagagtctccaggactcctcactcaacctcggccatggacgcaggttgggtgtgaggggggtcccagcctttcggtcttctatttccctatttccagtgctttccagccgggtttctgacccagagggtggaaccggcctggactcctcttcccaacttcctccaggtcatttcccagtgtgagcacaatgccaaccttagtgtttctccagccagacagatgcctcagcatgaagggcttggggacttgtggatcattccttcctccctgcaggagcttcccaagctggtcacagagtctcctgggcacaggttatacagaccccagccccattcccatctactgaaacagggtctccacaagaggggccagggaatatgggtttttaacaagcgtcttacaaaacacttctctatcatgcagccggagagctggctgggagcccttttgttttagaacacacatccttcagcagctgagaaatgaacacgaatccatcccaaccgagatgccattaacattcatctaaaaatgttaggctctaaatggacgaaaaattctctcgccatcttaataacaaaataaactacaaattcctgacccaaggacactgtgttataagaggcgtgggctcccctggtggctgaccaggtcagctgccctggccttgcacccctctgcatgcagcacagaagggtgtgaccatgccctcagcaccactcttgtccccactgaacggcaactgagactgggtacctggagattctgaagtgcctttgctgtggttttcaaaataataaagatttgtattcaactcaaa

SEQ ID NO: 107900 - DNA, 1398 bp, Homo sapiens
  Payload ID: 1181
  Gene Symbol: ANXA8L1
  Gene Name: annexin A8-like 1
  ENST ID: ENST00000611655
  CDS Start-End: 97-909
actcctcagctgcaggagccagacgtgtggagtcccagcagaggccaacctgtgtctcttcatctccgtgagaaaggtgcccccgaagtgaaagagatggcctggtggaaagcctggattgaacaggagggtgtcacagtgaagagcagctcccacttcaacccagaccctgatgcagagaccctctacaaagccatgaaggggatcgggaccaacgagcaggctatcatcgatgtgctcaccaagagaagcaacacgcagcggcagcagatcgccaagtccttcaaggctcagttcggcaaggacctcactgagaccttgaagtctgagctcagtggcaagtttgagaggctcattgtggcccttatgtatccgccatacagatacgaagccaaggagctgcatgacgccatgaagggcagcagggatgatgtgagcagctttgtggacccggcactggccctccaagacgcacaggatctgtatgcggcaggcgagaagattcgtgggactgatgagatgaaattcatcaccatcctgtgcacgcgcagtgccactcacctgctgagagtgtttgaagagtatgagaaaattgccaacaagagcattgaggacagcatcaagagtgagacccatggctcactggaggaggccatgctcactgtggtgaaatgcacccaaaacctccacagctactttgcagagagactctactatgccatgaagggagcagggacgcgtgatgggaccctgataagaaacatcgtttcaaggagcgagattgacttaaatcttatcaaatgtcacttcaagaagatgtacggcaagaccctcagcagcatgatcatggaagacaccagcggcgactacaagaacgccctgctgagcctggtgggcagcgacccctgaggcacagaagaacaagagcaaagaccatgaagccagagtctccaggactcctcactcaacctcggccatggacgcaggttgggtgtgaggggggtcccagcctttcggtcttctatttccctatttccagtgctttccagccgggtttctgacccagagggtggaaccggcctggactcctcttcccaacttcctccaggtcatttcccagtgtgagcacaatgccaaccttagtgtttctccagccagacagatgcctcagcatgaagggcttggggacttgtggatcattccttcctccctgcaggagcttcccaagctggtcacagagtctcctgggcacaggttatacagaccccagccccattcccatctactgaaacagggtctccacaagaggggccagggaatatgggtttttaacaagcgtcttacaaaacacttctctatcatgcagccggagagctggctgggagcccttttgtttta

SEQ ID NO: 107901 - DNA, 1826 bp, Homo sapiens
  Payload ID: 1182
  Gene Symbol: ANXA9
  Gene Name: annexin A9
  Uniprot ID: O76027
  ENST ID: ENST00000368947
  CDS Start-End: 477-1514
ggtcccacctggacccacagggaaggcagtgcataaaagcctcctgtgtttgaggctgagccgctgagaggctgagtggagttcactcacatggattgaggcccagttcctgggagaagagatgctgggcaggaaggtgtctgcatgtgggactctgtacagcccggtcctctcccacgtctgggaggggccagagtcagacaactgctgggttcgtccctaagagaggtcatctgactggctgttcagcctaggctgcacacacccccactttcctctaccaggccacaccggaggcagtgctcacacaggcaagctaccaggccacaacaacgacacccacctcacctctggcacctctgagcatccacgtacttgcaagaactcttgctcacatcagctaagagattgcacctgctgacctagagattccggcctgtgctcctgtgctgctgagcagggcaaccagtagcaccatgtctgtgactggcgggaagatggcaccgtccctcacccaggagatcctcagccacctgggcctggccagcaagactgcagcgtgggggaccctgggcaccctcaggaccttcttgaacttcagcgtggacaaggatgcgcagaggctactgagggccattactggccaaggcgtggaccgcagtgccattgtggacgtgctgaccaaccggagcagagagcaaaggcagctcatctcacgaaacttccaggagcgcacccaacaggacctgatgaagtctctacaggcagcactttccggcaacctggagaggattgtgatggctctgctgcagcccacagcccagtttgacgcccaggaattgaggacagctctgaaggcctcagattctgctgtggacgtggccattgaaattcttgccactcgaaccccaccccagctgcaggagtgcctggcagtctacaaacacaatttccaggtggaggctgtggatgacatcacatctgagaccagtggcatcttgcaggacctgctgttggccctggccaaggggggccgtgacagctactctggaatcattgactataatctggcagaacaagatgtccaggcactgcagcgggcagaaggacctagcagagaggaaacatgggtcccagtcttcacccagcgaaatcctgaacacctcatccgagtgtttgatcagtaccagcggagcactgggcaagagctggaggaggctgtccagaaccgtttccatggagatgctcaggtggctctgctcggcctagcttcggtgatcaagaacacaccgctgtactttgctgacaaacttcatcaagccctccaggaaactgagcccaattaccaagtcctgattcgcatccttatctctcgatgtgagactgaccttctgagtatcagagctgagttcaggaagaaatttgggaagtccctctactcttctctccaggatgcagtgaaaggggattgccagtcagccctcctggccttgtgcagggctgaagacatgtgagacttccctgccccaccccacatgacatccgaggatctgagatttccgtgtttggctgaacctgggagaccagctgggcctccaagtaggataacccctcactgagcaccacattctctagcttcttgttgaggctggaactgtttctttaaaatcccttaattttcccatctcaaaattatatctgtacctgggtcatccagctccttcttgggtgtggggaaatgagttttctttgatagtttctgcctcactcatccctcctgtaccctggccagaacatctcactgatactcgaattcttttggcaaa

SEQ ID NO: 107902 - DNA, 2118 bp, Homo sapiens
  Payload ID: 1183
  Gene Symbol: ANO1
  Gene Name: anoctamin 1, calcium activated chloride channel
  Uniprot ID: Q5XXA6
  ENST ID: ENST00000316296
  CDS Start-End: 106-2034
acgcacactgagtccaggtcctcctgaaggtcaccagcacagcggggccctgtgttactgtagagagaagtcagttgcttagtttcagcctcctgccggcaccagatgctgaccaggccctcccaggtgctgctgaactccttatctgtggaccctgatgccgagtgcaagtatggcctgtacttcagggacggccggcgcaaggtggactacatcctggtgtaccatcacaagaggccctcgggcaaccggaccctggtcaggagggtgcagcacagcgacaccccctctggggctcgcagcgtcaagcaggaccaccccctgccgggcaagggggcgtcgctggatgcaggctcgggggagcccccgatggactaccacgaggatgacaagcgcttccgcagggaggagtacgagggcaacctcctggaggcgggcctggagctggagcgggacgaggacactaaaatccacggagtcgggtttgtgaaaatccatgccccctggaacgtgctgtgcagagaggccgagtttctgaaactgaagatgccgacgaagaagatgtaccacattaatgagacccgtggcctcctgaaaaaaatcaactctgtgctccagaaaatcacagatcccatccagcccaaagtggctgagcacaggccccagaccatgaagagactctcctatcccttctcccgggagaagcagcatctatttgacttgtctgataaggattcctttttcgacagcaaaacccggagcacgattgtctatgagatcttgaagagaacgacgtgtacaaaggccaagtacagcatgggcatcacgagcctgctggccaatggtgtgtacgcggctgcatacccactgcacgatggagactacaacggtgaaaacgtcgagttcaacgacagaaaactcctgtacgaagagtgggcacgctatggagttttctataagtaccagcccatcgacctggtcaggaagtattttggggagaagatcggcctgtacttcgcctggctgggcgtgtacacccagatgctcatccctgcctccatcgtgggaatcattgtcttcctgtacggatgcgccaccatggatgaaaacatccccagcatggagatgtgtgaccagagacacaatatcaccatgtgcccgctttgcgacaagacctgcagctactggaagatgagctcagcctgcgccacggcccgcgccagccacctcttcgacaaccccgccacggtcttcttctctgtcttcatggccctctgggctgccaccttcatggagcactggaagcggaaacagatgcgactcaactaccgctgggacctcacgggctttgaagaggaagaggatcatcctagagctgaatacgaagccagagtcttggagaagtctctgaagaaagagtccagaaacaaagagactgacaaagtgaagctgacatggagagatcggttcccagcctacctcactaacttggtctccatcatcttcatgattgcagtgacgtttgccatcgtcctcggcgtcatcatctacagaatctccatggccgccgccttggccatgaactcctccccctccgtgcggtccaacatccgggtcacagtcacagccaccgcagtcatcatcaacctagtggtcatcatcctcctggacgaggtgtatggctgcatagcccgatggctcaccaagatcgaggtcccaaagacggagaaaagctttgaggagaggctgatcttcaaggctttcctgctgaagtttgtgaattcctacacccccatcttttacgtggcgttcttcaaaggccggtttgttggacgcccgggcgactacgtgtacattttccgttccttccgaatggaagaggtaaccgaaattttattcatctctggcagccccttctgtcttgcttacgatttgtctacaccatgcacttgggagaagcagctgcagcacatttgttcagcaaagagcagcaggtttctttccttcttgctggaaacttttctgttcccctgatgtggtggggtgggctttaatcttatctggtgtgttcatatagaatcacctagaaggataaagtcgctgtagagttaatgaaag

SEQ ID NO: 107903 - DNA, 4790 bp, Homo sapiens
  Payload ID: 1183
  Gene Symbol: ANO1
  Gene Name: anoctamin 1, calcium activated chloride channel
  Uniprot ID: Q5XXA6
  ENST ID: ENST00000355303
  CDS Start-End: 306-3266
aaaggcgggccggctggcgtccaagttcctgaccaggcgcgggccggcccgcgggaccagcagccgggtggcggcgcgatcggccccgagaggctcaggcgccccccgcatcgagcgcgcgggccgggcgggccagggcggcgggcggagcgggaggcggccacgtccccggcgggcctgggcgcggggaggcccggccccctgcgagcgcgccgcgaacgctgcggtctccgcccgcagaggccgccggggccgtggatggggagggcgcgccgcccggcggtcccagcgcacaggcggccacgatgagggtcaacgagaagtactcgacgctcccggccgaggaccgcagcgtccacatcatcaacatctgcgccatcgaggacatcggctacctgccgtccgagggcacgctgctgaactccttatctgtggaccctgatgccgagtgcaagtatggcctgtacttcagggacggccggcgcaaggtggactacatcctggtgtaccatcacaagaggccctcgggcaaccggaccctggtcaggagggtgcagcacagcgacaccccctctggggctcgcagcgtcaagcaggaccaccccctgccgggcaagggggcgtcgctggatgcaggctcgggggagcccccgatggactaccacgaggatgacaagcgcttccgcagggaggagtacgagggcaacctcctggaggcgggcctggagctggagcgggacgaggacactaaaatccacggagtcgggtttgtgaaaatccatgccccctggaacgtgctgtgcagagaggccgagtttctgaaactgaagatgccgacgaagaagatgtaccacattaatgagacccgtggcctcctgaaaaaaatcaactctgtgctccagaaaatcacagatcccatccagcccaaagtggctgagcacaggccccagaccatgaagagactctcctatcccttctcccgggagaagcagcatctatttgacttgtctgataaggattcctttttcgacagcaaaacccggagcacgattgtctatgagatcttgaagagaacgacgtgtacaaaggccaagtacagcatgggcatcacgagcctgctggccaatggtgtgtacgcggctgcatacccactgcacgatggagactacaacggtgaaaacgtcgagttcaacgacagaaaactcctgtacgaagagtgggcacgctatggagttttctataagtaccagcccatcgacctggtcaggaagtattttggggagaagatcggcctgtacttcgcctggctgggcgtgtacacccagatgctcatccctgcctccatcgtgggaatcattgtcttcctgtacggatgcgccaccatggatgaaaacatccccagcatggagatgtgtgaccagagacacaatatcaccatgtgcccgctttgcgacaagacctgcagctactggaagatgagctcagcctgcgccacggcccgcgccagccacctcttcgacaaccccgccacggtcttcttctctgtcttcatggccctctgggctgccaccttcatggagcactggaagcggaaacagatgcgactcaactaccgctgggacctcacgggctttgaagaggaagaggaggctgtcaaggatcatcctagagctgaatacgaagccagagtcttggagaagtctctgaagaaagagtccagaaacaaagagaagcgccggcatattccagaggagtcaacaaacaaatggaagcagagggttaagacagccatggcgggggtgaaattgactgacaaagtgaagctgacatggagagatcggttcccagcctacctcactaacttggtctccatcatcttcatgattgcagtgacgtttgccatcgtcctcggcgtcatcatctacagaatctccatggccgccgccttggccatgaactcctccccctccgtgcggtccaacatccgggtcacagtcacagccaccgcagtcatcatcaacctagtggtcatcatcctcctggacgaggtgtatggctgcatagcccgatggctcaccaagatcgaggtcccaaagacggagaaaagctttgaggagaggctgatcttcaaggctttcctgctgaagtttgtgaattcctacacccccatcttttacgtggcgttcttcaaaggccggtttgttggacgcccgggcgactacgtgtacattttccgttccttccgaatggaagagtgtgcgccagggggctgcctgatggagctatgcatccagctcagcatcatcatgctggggaaacagctgatccagaacaacctgttcgagatcggcatcccgaagatgaagaagctcatccgctacctgaagctgaagcagcagagcccccctgaccacgaggagtgtgtgaagaggaaacagcggtacgaggtggattacaacctggagcccttcgcgggcctcaccccagagtacatggaaatgatcatccagtttggcttcgtcaccctgtttgtcgcctccttccccctggccccactgtttgcgctgctgaacaacatcatcgagatccgcctggacgccaaaaagtttgtcactgagctccgaaggccggtagctgtcagagccaaagacatcggaatctggtacaatatcctcagaggcattgggaagcttgctgtcatcatcaatgccttcgtgatctccttcacgtctgacttcatcccgcgcctggtgtacctctacatgtacagtaagaacgggaccatgcacggcttcgtcaaccacaccctctcctccttcaacgtcagtgacttccagaacggcacggcccccaatgaccccctggacctgggctacgaggtgcagatctgcaggtataaagactaccgagagccgccgtggtcggaaaacaagtacgacatctccaaggacttctgggccgtcctggcagcccggctggcgtttgtcatcgtcttccagaacctggtcatgttcatgagcgactttgtggactgggtcatcccggacatccccaaggacatcagccagcagatccacaaggagaaggtgctcatggtggagctgttcatgcgggaggagcaagacaagcagcagctgctggaaacctggatggagaaggagcggcagaaggacgagccgccgtgcaaccaccacaacaccaaagcctgcccagacagcctcggcagcccagcccccagccatgcctaccacgggggcgtcctgtagctatgccagcggggctgggcaggccagccgggcatcctgaccgatgggcaccctctcccagggcaggcggcttcccgctcccaccagggcccggtgggtcctgggttttctgcaaacatggaggaccactttctgataggacattttcctttcttctttctgttttctttcccttgtttttgcacaaagccattatgcagggaatattttttaatctgtagtattcaagatgaatcaaaatgatggctggtaatacggcaataaggtagcaaaggcaggtgctttgcagaaagaatgcttggaaacttgagtctccctagaggtgaaaagtgagcagaggcccgtagaaaccctcctctgaatcctcctaattccttaagatagatgcaaaatggtaagccgaggcatcgcgcaaaagctggtgcgatgcttcagggaaaatggaaaacccacgcaagaataatgattgattccggttccaaaaggtgtcacctacctgtttcagaaaagttagactttccatcgccttttccttccatcagttgagtggctgagagagaagtgcctcatccctgagccacacagggggcgtgggagcatcccagttatccctggaaagctagaaggggacagaggtgtccctgattaagcaggaaacagcacccttggcgtccccagcaggctccccactgtcagccacacacctgcccccatcacaccaagccgacctcagagttgttcatcttccttatgggacaaaaccggttgaccagaaaatgggcagagagagatgacctcggaagcatttccacagatggtgtcagggtttcaagaagtcttagggcttccaggggtcccctggaagctttagaatatttatgggttttttttcaaatatcaattatatggtagattgaggattttttttctgtagctcaaaggtggagggagtttattagttaaccaaatatcgttgagaggaatttaaaatactgttactaccaaagatttttattaataaaggcttatattttggtaacacttctctatatttttactcacaggaatgtcactgttggacaattattttaaaagtgtataaaaccaagtctcataaatgatatgagtgatctaaatttgcagcaatgatactaaacaactctctgaaatttctcaagcaccaagagaaacatcattttagcaaaggccaggaggaaaaatagaaataaatttgtcttgaagatctcattgatgtgatgttacattccctttaatctgccaactgtggtcaaagttcataggtgtcgtacatttccattatttgctaaaatcatgcaatctgatgcttctcttttctcttgtacagtaagtagtttgaagtgggttttgtatataaatactgtattaaaaattaggcaattaccaaaaatccttttatggaaaccatttttttaaaaagtgaatgtacacaaatccacagaggactgtggctggacattcatctaaataaatttgaatatacga

SEQ ID NO: 107904 - DNA, 3552 bp, Homo sapiens
  Payload ID: 1183
  Gene Symbol: ANO1
  Gene Name: anoctamin 1, calcium activated chloride channel
  ENST ID: ENST00000531349
  CDS Start-End: 217-2304
tgggtcaaccctccctgaataaatgccattgtctttccttggaagatagcaccaaggaggtcttcatgcgtaacgtgtgaccaggtcctctccagccacagcagactgtttctgctcgtggaaggtgccttaagtaactgctcaccccccttcttgtctctgcaataggtctatgagatcttgaagagaacgacgtgtacaaaggccaagtacagcatgggcatcacgagcctgctggccaatggtgtgtacgcggctgcatacccactgcacgatggagactacaacggtgaaaacgtcgagttcaacgacagaaaactcctgtacgaagagtgggcacgctatggagttttctataagtaccagcccatcgacctggtcaggaagtattttggggagaagatcggcctgtacttcgcctggctgggcgtgtacacccagatgctcatccctgcctccatcgtgggaatcattgtcttcctgtacggatgcgccaccatggatgaaaacatccccagcatggagatgtgtgaccagagacacaatatcaccatgtgcccgctttgcgacaagacctgcagctactggaagatgagctcagcctgcgccacggcccgcgccagccacctcttcgacaaccccgccacggtcttcttctctgtcttcatggccctctgggctgccaccttcatggagcactggaagcggaaacagatgcgactcaactaccgctgggacctcacgggctttgaagaggaagaggaggctgtcaaggatcatcctagagctgaatacgaagccagagtcttggagaagtctctgaagaaagagtccagaaacaaagagactgacaaagtgaagctgacatggagagatcggttcccagcctacctcactaacttggtctccatcatcttcatgattgcagtgacgtttgccatcgtcctcggcgtcatcatctacagaatctccatggccgccgccttggccatgaactcctccccctccgtgcggtccaacatccgggtcacagtcacagccaccgcagtcatcatcaacctagtggtcatcatcctcctggacgaggtgtatggctgcatagcccgatggctcaccaagatcgaggtcccaaagacggagaaaagctttgaggagaggctgatcttcaaggctttcctgctgaagtttgtgaattcctacacccccatcttttacgtggcgttcttcaaaggccggtttgttggacgcccgggcgactacgtgtacattttccgttccttccgaatggaagagtgtgcgccagggggctgcctgatggagctatgcatccagctcagcatcatcatgctggggaaacagctgatccagaacaacctgttcgagatcggcatcccgaagatgaagaagctcatccgctacctgaagctgaagcagcagagcccccctgaccacgaggagtgtgtgaagaggaaacagcggtacgaggtggattacaacctggagcccttcgcgggcctcaccccagagtacatggaaatgatcatccagtttggcttcgtcaccctgtttgtcgcctccttccccctggccccactgtttgcgctgctgaacaacatcatcgagatccgcctggacgccaaaaagtttgtcactgagctccgaaggccggtagctgtcagagccaaagacatcggaatctggtacaatatcctcagaggcattgggaagcttgctgtcatcatcaatgccttcgtgatctccttcacgtctgacttcatcccgcgcctggtgtacctctacatgtacagtaagaacgggaccatgcacggcttcgtcaaccacaccctctcctccttcaacgtcagtgacttccagaacggcacggcccccaatgaccccctggacctgggctacgaggtgcagatctgcaggtataaagactaccgagagccgccgtggtcggaaaacaagtacgacatctccaaggacttctgggccgtcctggcagcccggctggcgtttgtcatcgtcttccagaacctggtcatgttcatgagcgactttgtggactgggtcatcccggacatccccaaggacatcagccagcagatccacaaggagaaggtgctcatggtggagctgttcatgcgggaggagcaagacaagcagcagctgctggaaacctggatggagaaggagcggcagaaggacgagccgccgtgcaaccaccacaacaccaaagcctgcccagacagcctcggcagcccagcccccagccatgcctaccacgggggcgtcctgtagctatgccagcggggctgggcaggccagccgggcatcctgaccgatgggcaccctctcccagggcaggcggcttcccgctcccaccagggcccggtgggtcctgggttttctgcaaacatggaggaccactttctgataggacattttcctttcttctttctgttttctttcccttgtttttgcacaaagccattatgcagggaatattttttaatctgtagtattcaagatgaatcaaaatgatggctggtaatacggcaataaggtagcaaaggcaggtgctttgcagaaagaatgcttggaaacttgagtctccctagaggtgaaaagtgagcagaggcccgtagaaaccctcctctgaatcctcctaattccttaagatagatgcaaaatggtaagccgaggcatcgcgcaaaagctggtgcgatgcttcagggaaaatggaaaacccacgcaagaataatgattgattccggttccaaaaggtgtcacctacctgtttcagaaaagttagactttccatcgccttttccttccatcagttgagtggctgagagagaagtgcctcatccctgagccacacagggggcgtgggagcatcccagttatccctggaaagctagaaggggacagaggtgtccctgattaagcaggaaacagcacccttggcgtccccagcaggctccccactgtcagccacacacctgcccccatcacaccaagccgacctcagagttgttcatcttccttatgggacaaaaccggttgaccagaaaatgggcagagagagatgacctcggaagcatttccacagatggtgtcagggtttcaagaagtcttagggcttccaggggtcccctggaagctttagaatatttatgggttttttttcaaatatcaattatatggtagattgaggattttttttctgtagctcaaaggtggagggagtttattagttaaccaaatatcgttgagaggaatttaaaatactgttactaccaaagatttttattaataaaggcttatattttggtaacacttctctatatttttactcacaggaatgtcactgttggacaattattttaaaagtgtataaaaccaagtctcataaatgatatgagtgatctaaatttgcagcaatgatactaaacaactctctgaaatttctcaagcaccaagagaaacatcattttagcaaaggccaggaggaaaaatagaaataaatttgtcttgaagatctca

SEQ ID NO: 107905 - DNA, 806 bp, Homo sapiens
  Payload ID: 1183
  Gene Symbol: ANO1
  Gene Name: anoctamin 1, calcium activated chloride channel
  ENST ID: ENST00000530480
  CDS Start-End: 1-806
tccatgccccctggaacgtgctgtgcagagaggccgagtttctgaaactgaagatgccgacgaagaagatgtaccacattaatgagacccgtggcctcctgaaaaaaatcaactctgtgctccagaaaatcacagatcccatccagcccaaagtggctgagcacaggccccagaccatgaagagactctcctatcccttctcccgggagaagcagcatctatttgacttgtctgataaggattcctttttcgacagcaaaacccggagcacgattgtctatgagatcttgaagagaacgacgtgtacaaaggccaagtacagcatggggcaaggcgagggaagaaagaaggactccgcccttctaagtaaaaggcggaaatgtgggaagtatggcatcacgagcctgctggccaatggtgtgtacgcggctgcatacccactgcacgatggagactacaacggtgaaaacgtcgagttcaacgacagaaaactcctgtacgaagagtgggcacgctatggagttttctataagtaccagcccatcgacctggtcaggaagtattttggggagaagatcggcctgtacttcgcctggctgggcgtgtacacccagatgctcatccctgcctccatcgtgggaatcattgtcttcctgtacggatgcgccaccatggatgaaaacatccccagcatggagatgtgtgaccagagacacaatatcaccatgtgcccgctttgcgacaagacctgcagctactggaagatgagctcagcctgcgccacggcccgcgccagccacctcttc

SEQ ID NO: 107906 - DNA, 3289 bp, Homo sapiens
  Payload ID: 1183
  Gene Symbol: ANO1
  Gene Name: anoctamin 1, calcium activated chloride channel
  Uniprot ID: Q5XXA6
  ENST ID: ENST00000530676
  CDS Start-End: 490-3012
tgagtccaggtcctcctgaaggtcaccagcacagcggggccctgtgttactgtagagagaagtcagttgcttagtttcagcctcctgccggcaccagatgctgaccaggccctcccaggtggtgagcaatgctgtttccaggagaggcatcctagggccagagaggccaaggtgccagggacatggccccaactgtcccctaaccaggggtagaggagtctagacccttgacatcaacacctatgaaagctgctgaactccttatctgtggaccctgatgccgagtgcaagtatggcctgtacttcagggacggccggcgcaaggtggactacatcctggtgtaccatcacaagaggccctcgggcaaccggaccctggtcaggagggtgcagcacagcgacaccccctctggggctcgcagcgtcaagcaggaccaccccctgccgggcaagggggcgtcgctggatgcaggctcgggggagcccccgatggactaccacgaggatgacaagcgcttccgcagggaggagtacgagggcaacctcctggaggcgggcctggagctggagcgggacgaggacactaaaatccacggagtcgggtttgtgaaaatccatgccccctggaacgtgctgtgcagagaggccgagtttctgaaactgaagatgccgacgaagaagatgtaccacattaatgagacccgtggcctcctgaaaaaaatcaactctgtgctccagaaaatcacagatcccatccagcccaaagtggctgagcacaggccccagaccatgaagagactctcctatcccttctcccgggagaagcagcatctatttgacttgtctgataaggattcctttttcgacagcaaaacccggagcacgattgtctatgagatcttgaagagaacgacgtgtacaaaggccaagtacagcatgggcatcacgagcctgctggccaatggtgtgtacgcggctgcatacccactgcacgatggagactacaacggtgaaaacgtcgagttcaacgacagaaaactcctgtacgaagagtgggcacgctatggagttttctataagtaccagcccatcgacctggtcaggaagtattttggggagaagatcggcctgtacttcgcctggctgggcgtgtacacccagatgctcatccctgcctccatcgtgggaatcattgtcttcctgtacggatgcgccaccatggatgaaaacatccccagcatggagatgtgtgaccagagacacaatatcaccatgtgcccgctttgcgacaagacctgcagctactggaagatgagctcagcctgcgccacggcccgcgccagccacctcttcgacaaccccgccacggtcttcttctctgtcttcatggccctctgggctgccaccttcatggagcactggaagcggaaacagatgcgactcaactaccgctgggacctcacgggctttgaagaggaagaggatcatcctagagctgaatacgaagccagagtcttggagaagtctctgaagaaagagtccagaaacaaagagactgacaaagtgaagctgacatggagagatcggttcccagcctacctcactaacttggtctccatcatcttcatgattgcagtgacgtttgccatcgtcctcggcgtcatcatctacagaatctccatggccgccgccttggccatgaactcctccccctccgtgcggtccaacatccgggtcacagtcacagccaccgcagtcatcatcaacctagtggtcatcatcctcctggacgaggtgtatggctgcatagcccgatggctcaccaagatcgaggtcccaaagacggagaaaagctttgaggagaggctgatcttcaaggctttcctgctgaagtttgtgaattcctacacccccatcttttacgtggcgttcttcaaaggccggtttgttggacgcccgggcgactacgtgtacattttccgttccttccgaatggaagagtgtgcgccagggggctgcctgatggagctatgcatccagctcagcatcatcatgctggggaaacagctgatccagaacaacctgttcgagatcggcatcccgaagatgaagaagctcatccgctacctgaagctgaagcagcagagcccccctgaccacgaggagtgtgtgaagaggaaacagcggtacgaggtggattacaacctggagcccttcgcgggcctcaccccagagtacatggaaatgatcatccagtttggcttcgtcaccctgtttgtcgcctccttccccctggccccactgtttgcgctgctgaacaacatcatcgagatccgcctggacgccaaaaagtttgtcactgagctccgaaggccggtagctgtcagagccaaagacatcggaatctggtacaatatcctcagaggcattgggaagcttgctgtcatcatcaatgccttcgtgatctccttcacgtctgacttcatcccgcgcctggtgtacctctacatgtacagtaagaacgggaccatgcacggcttcgtcaaccacaccctctcctccttcaacgtcagtgacttccagaacggcacggcccccaatgaccccctggacctgggctacgaggtgcagatctgcaggtataaagactaccgagagccgccgtggtcggaaaacaagtacgacatctccaaggacttctgggccgtcctggcagcccggctggcgtttgtcatcgtcttccagaacctggtcatgttcatgagcgactttgtggactgggtcatcccggacatccccaaggacatcagccagcagatccacaaggagaaggtgctcatggtggagctgttcatgcgggaggagcaagacaagcagcagctgctggaaacctggatggagaaggagcggcagaaggacgagccgccgtgcaaccaccacaacaccaaagcctgcccagacagcctcggcagcccagcccccagccatgcctaccacgggggcgtcctgtagctatgccagcggggctgggcaggccagccgggcatcctgaccgatgggcaccctctcccagggcaggcggcttcccgctcccaccagggcccggaatgtcactgttggacaattattttaaaagtgtataaaaccaagtctcataaatgatatgagtgatctaaatttgcagcaatgatactaaacaactctctgaaatttctcaagcaccaagagaaacatcattttagcaaaggccaggaggaaaaatagaaataaatttgtcttgaagatctca

SEQ ID NO: 107907 - DNA, 577 bp, Homo sapiens
  Payload ID: 1183
  Gene Symbol: ANO1
  Gene Name: anoctamin 1, calcium activated chloride channel
  ENST ID: ENST00000531300
  CDS Start-End: 124-577
tctaaatcaagacaggagcaacaggaaagaacctactgcggctgagaggtgtgagcggagaggggagggacaaagcccccatcccgggcccttttcacactggctgtcaaggctgccaccttcatggagcactggaagcggaaacagatgcgactcaactaccgctgggacctcacgggctttgaagaggaagaggaggctgtcaaggatcatcctagagctgaatacgaagccagagtcttggagaagtctctgaagaaagagtccagaaacaaagagactgacaaagtgaagctgacatggagagatcggttcccagcctacctcactaacttggtctccatcatcttcatgattgcagtgacgtttgccatcgtcctcggcgtcatcatctacagaatctccatggccgccgccttggccatgaactcctccccctccgtgcggtccaacatccgggtcacagtcacagccaccgcagtcatcatcaacctagtggtcatcatcctcctggacgaggtgtatggctgcatagcccgatggctcaccaagatcgaggtcccaaagacggagaaaa

SEQ ID NO: 107908 - DNA, 789 bp, Homo sapiens
  Payload ID: 1183
  Gene Symbol: ANO1
  Gene Name: anoctamin 1, calcium activated chloride channel
  ENST ID: ENST00000531604
  CDS Start-End: 35-789
gccgcccggcggtcccagcgcacaggcggccacgatgagggtcaacgagaagtactcgacgctcccggccgaggaccgcagcgtccacatcatcaacatctgcgccatcgaggacatcggctacctgccgtccgagggcacgctgctgaactccttatctgtggaccctgatgccgagtgcaagtatggcctgtacttcagggacggccggcgcaaggtggactacatcctggtgtaccatcacaagaggccctcgggcaaccggaccctggtcaggagggtgcagcacagcgacaccccctctggggctcgcagcgtcaagcaggaccaccccctgccgggcaagggggcgtcgctggatgcaggctcgggggagcccccgatggactaccacgaggatgacaagcgcttccgcagggaggagtacgagggcaacctcctggaggcgggcctggagctggagcgggacgaggacatgtaccacattaatgagacccgtggcctcctgaaaaaaatcaactctgtgctccagaaaatcacagatcccatccagcccaaagtggctgagcacaggccccagaccatgaagagactctcctatcccttctcccgggagaagcagcatctatttgacttgtctgataaggattcctttttcgacagcaaaacccggagcacgattgtctatgagatcttgaagagaacgacgtgtacaaaggccaagtacagcatgggcatcacgagcctgctggccaatggtgtgtacgcggctgcatacccactgcacga

SEQ ID NO: 107909 - DNA, 3212 bp, Homo sapiens
  Payload ID: 1184
  Gene Symbol: ANO10
  Gene Name: anoctamin 10
  Uniprot ID: Q9NW15
  ENST ID: ENST00000292246
  CDS Start-End: 172-2154
gaccgcatctaggccccgccgcgtccgccacgcccagcgctcggcggcgcccgccccactggcctggcccgccccccgcaccgagcactctttcgcccggcctccggttctcgccggctctcggacccgcctccgaagacgtggagcgctgcggcggctgatttgtcaaagatgaaagtgaccttatcagctttggatacttctgagagttctttcacacctttggtggtcatagaacttgctcaggatgtcaaagaagaaaccaaagaatggctgaaaaacagaattatagctaaaaaaaaagatggaggtgcccagttgttgtttagaccattgttaaataaatatgaacaagaaacactagaaaatcagaacttatatcttgttggtgcctccaagattagaatgttactaggggcagaagcagtgggattggtaaaagagtgcaatgataacaccatgagagccttcacatacagaaccagacagaacttcaaaggttttgatgataacaatgatgatttcctgacaatggcagaatgtcaattcattatcaaacatgaacttgaaaatcttagagctaaagatgaaaaaatgatccctggttaccctcaggcaaagttgtatccaggaaaatcattgttgagaagattgctcacgtctggcatcgtgattcaggtgtttccactgcatgacagtgaagccctgaagaagcttgaggacacctggtacactcggtttgctttgaagtatcagcccatagacagtattcgtggctactttggggaaacaattgctctgtactttggatttttggagtatttcacttttgcattaatccccatggctgtcattgggttaccttactacttgtttgtgtgggaagactatgacaagtacgtgatctttgcctcgttcaacctcatctggtccacggtgattctggaactgtggaagcgtggctgtgccaacatgacctacaggtgggggacactgctcatgaagagaaagtttgaggagccccggccaggatttcatggtgtcttgggtatcaattccatcactgggaaggaggagcctctgtaccccagctacaagagacagttgcgcatttacctggtctccctgccattcgtgtgcctctgcctctatttctcactgtatgtcatgatgatttacttcgacatggaggtttgggccttgggtctacatgagaacagcgggtctgagtggaccagtgtcctgttgtatgtgcccagcatcatctatgccattgtgattgagatcatgaatcgtctctatcgatatgctgccgagtttttaacttcatgggagaatcacagattggaatctgcctatcagaaccatctaattctgaaagttttagtgttcaacttcctcaattgctttgcctcactcttctatattgcctttgtcttgaaagatatgaagcttttgcgccagagcttggccactctcctaattacctcccagatcctcaaccaaattatggaatcttttcttccttattggctccaaaggaagcatggtgtgcgggtgaagaggaaggtgcaggctttaaaggcagacattgatgctacattatatgaacaagtcatcctggaaaaagaaatgggaacttatttgggcacctttgatgattacttggagttattcctgcagtttggttatgtgagccttttctcctgtgtttacccattagcagctgcctttgctgtgttaaataacttcactgaagtaaattcagatgccttaaaaatgtgcagggtcttcaaacgtccattctcagaaccttcagccaatattggtgtgtggcagttggcttttgaaacgatgagtgttatatctgtggtcactaactgtgcgctgattggaatgtcaccacaagtgaatgcagtctttccagaatcaaaagcagacctcattttgattgtagtagcagtggagcacgcactcctggctttaaagtttatacttgcatttgccatacctgataagccacggcatatccagatgaaactagccagactggaatttgagtctttggaggcactcaagcagcagcaaatgaagctcgtgaccgagaacctgaaggaggaaccaatggaaagcgggaaggagaaggcaacctgagtgcccagcgtgcccagctgccctgttggcagaggcctgtgtctgtgccacacctgccacggtggcagggggggtacccggggcagcatcgtggctcctgaacccagacccaatgcttagccaaacgaagtggctcccatgtggcaagcacccttctcagtttcgcagtggcttggctcgggatccttggcagttcccccagccccaccctgtctgctccttcccagttccttcccgggccccacacgctgctccagctgccaactttgctgcagagccactgccgcccttgagcctctcaccatgagtgagccaccagctctccacgttcccctcatagcagtgtcactcccaaccccaccatggcccagggacccgtggacaggttggggatggggtgtgtgcccactgtgctcatcacaggagcctcagttgagagtgagcggggtacagtaaggcagtgcttcccacactggacctctttcctggttctcttttgcaatacattaacagaccctttatcaacataaacaatagtaactgagctattaaaggcaacctctctgactccttctgcctacataggtaccgcaatgggcttcccttttctgaagcacttggtgaggtcactgaaggtggagcggtgagatcaggagcccagggtgaggggcttggctggaggccaggcaccaaagcttgtagctgaaggctgggccatttttgagaactgctgctggtggtgcccacctacagggacactagggctgctttcacatgcagggtgtacccatggtgccaagccaagggccagcagccactcctggtgccctggcctgggcttgggcttgcagagaaaagggccctccttgcccagtggtgctgcccacctccctagctgtgtccatggactgccctgcattcacaggcacaagaatgccatgtaggccagtgctgcccacgtatacagcccttcccaccagcgctggccgtcctgctgtagccaagacactacagacccgtgggcacctccactcggacagcagcagatgccctggccc

SEQ ID NO: 107910 - DNA, 2039 bp, Homo sapiens
  Payload ID: 1184
  Gene Symbol: ANO10
  Gene Name: anoctamin 10
  Uniprot ID: Q9NW15
  ENST ID: ENST00000350459
  CDS Start-End: 69-1481
ccggttctcgccggctctcggacccgcctccgaagacgtggagcgctgcggcggctgatttgtcaaagatgaaagtgaccttatcagctttggatacttctgagagttctttcacacctttggtggtcatagaacttgctcaggatgtcaaagaagaaaccaaagaatggctgaaaaacagaattatagctaaaaaaaaagatggaggtgcccagttgttgtttagaccattgttaaataaatatgaacaagaaacactagaaaatcagaacttatatcttgttggtgcctccaagattagaatgttactaggggcagaagcagtgggattggtaaaagagtgcaatgataacaccatgagagccttcacatacagaaccagacagaacttcaaaggttttgatgataacaatgatgatttcctgacaatggcagaatgtcaattcattatcaaacatgaacttgaaaatcttagagctaaagatgaaaaaatgatccctggttaccctcaggcaaagttgtatccaggaaaatcattgttgagaagattgctcacgtctggcatcgtgattcaggtgtttccactgcatgacagtgaagccctgaagaagcttgaggacacctggtacactcggtttgctttgaagtatcagcccatagagaatcacagattggaatctgcctatcagaaccatctaattctgaaagttttagtgttcaacttcctcaattgctttgcctcactcttctatattgcctttgtcttgaaagatatgaagcttttgcgccagagcttggccactctcctaattacctcccagatcctcaaccaaattatggaatcttttcttccttattggctccaaaggaagcatggtgtgcgggtgaagaggaaggtgcaggctttaaaggcagacattgatgctacattatatgaacaagtcatcctggaaaaagaaatgggaacttatttgggcacctttgatgattacttggagttattcctgcagtttggttatgtgagccttttctcctgtgtttacccattagcagctgcctttgctgtgttaaataacttcactgaagtaaattcagatgccttaaaaatgtgcagggtcttcaaacgtccattctcagaaccttcagccaatattggtgtgtggcagttggcttttgaaacgatgagtgttatatctgtggtcactaactgtgcgctgattggaatgtcaccacaagtgaatgcagtctttccagaatcaaaagcagacctcattttgattgtagtagcagtggagcacgcactcctggctttaaagtttatacttgcatttgccatacctgataagccacggcatatccagatgaaactagccagactggaatttgagtctttggaggcactcaagcagcagcaaatgaagctcgtgaccgagaacctgaaggaggaaccaatggaaagcgggaaggagaaggcaacctgagtgcccagcgtgcccagctgccctgttggcagaggcctgtgtctgtgccacacctgccacggtggcagggggggtacccggggcagcatcgtggctcctgaacccagacccaatgcttagccaaacgaagtggctcccatgtggcaagcacccttctcagtttcgcagtggcttggctcgggatccttggcagttcccccagccccaccctgtctgctccttcccagttccttcccgggccccacacgctgctccagctgccaactttgctgcagagccactgccgcccttgagcctctcaccatgagtgagccaccagctctccacgttcccctcatagcagtgtcactcccaaccccaccatggcccagggacccgtggacaggttggggatggggtgtgtgcccactgtgctcatcacaggagcctcagttgagagtgagcggggtacagtaaggcagtgcttcccacactggacctctttcctggttctcttttgcaatacattaacagaccctttatcaacataaacaatagtaactgagctattaaaggcaa

SEQ ID NO: 107911 - DNA, 2419 bp, Homo sapiens
  Payload ID: 1184
  Gene Symbol: ANO10
  Gene Name: anoctamin 10
  Uniprot ID: Q9NW15
  ENST ID: ENST00000396091
  CDS Start-End: 88-1872
gcactctttcgcccggcctccggttctcgccggctctcggacccgcctccgaagacgtggagcgctgcggcggctgatttgtcaaagatgaaagtgaccttatcagctttggatacttctgagagttctttcacacctttggtggtcatagaacttgctcaggatgtcaaagaagaaaccaaagaatggctgaaaaacagaattatagctaaaaaaaaagatggagataacaatgatgatttcctgacaatggcagaatgtcaattcattatcaaacatgaacttgaaaatcttagagctaaagatgaaaaaatgatccctggttaccctcaggcaaagttgtatccaggaaaatcattgttgagaagattgctcacgtctggcatcgtgattcaggtgtttccactgcatgacagtgaagccctgaagaagcttgaggacacctggtacactcggtttgctttgaagtatcagcccatagacagtattcgtggctactttggggaaacaattgctctgtactttggatttttggagtatttcacttttgcattaatccccatggctgtcattgggttaccttactacttgtttgtgtgggaagactatgacaagtacgtgatctttgcctcgttcaacctcatctggtccacggtgattctggaactgtggaagcgtggctgtgccaacatgacctacaggtgggggacactgctcatgaagagaaagtttgaggagccccggccaggatttcatggtgtcttgggtatcaattccatcactgggaaggaggagcctctgtaccccagctacaagagacagttgcgcatttacctggtctccctgccattcgtgtgcctctgcctctatttctcactgtatgtcatgatgatttacttcgacatggaggtttgggccttgggtctacatgagaacagcgggtctgagtggaccagtgtcctgttgtatgtgcccagcatcatctatgccattgtgattgagatcatgaatcgtctctatcgatatgctgccgagtttttaacttcatgggagaatcacagattggaatctgcctatcagaaccatctaattctgaaagttttagtgttcaacttcctcaattgctttgcctcactcttctatattgcctttgtcttgaaagatatgaagcttttgcgccagagcttggccactctcctaattacctcccagatcctcaaccaaattatggaatcttttcttccttattggctccaaaggaagcatggtgtgcgggtgaagaggaaggtgcaggctttaaaggcagacattgatgctacattatatgaacaagtcatcctggaaaaagaaatgggaacttatttgggcacctttgatgattacttggagttattcctgcagtttggttatgtgagccttttctcctgtgtttacccattagcagctgcctttgctgtgttaaataacttcactgaagtaaattcagatgccttaaaaatgtgcagggtcttcaaacgtccattctcagaaccttcagccaatattggtgtgtggcagttggcttttgaaacgatgagtgttatatctgtggtcactaactgtgcgctgattggaatgtcaccacaagtgaatgcagtctttccagaatcaaaagcagacctcattttgattgtagtagcagtggagcacgcactcctggctttaaagtttatacttgcatttgccatacctgataagccacggcatatccagatgaaactagccagactggaatttgagtctttggaggcactcaagcagcagcaaatgaagctcgtgaccgagaacctgaaggaggaaccaatggaaagcgggaaggagaaggcaacctgagtgcccagcgtgcccagctgccctgttggcagaggcctgtgtctgtgccacacctgccacggtggcagggggggtacccggggcagcatcgtggctcctgaacccagacccaatgcttagccaaacgaagtggctcccatgtggcaagcacccttctcagtttcgcagtggcttggctcgggatccttggcagttcccccagccccaccctgtctgctccttcccagttccttcccgggccccacacgctgctccagctgccaactttgctgcagagccactgccgcccttgagcctctcaccatgagtgagccaccagctctccacgttcccctcatagcagtgtcactcccaaccccaccatggcccagggacccgtggacaggttggggatggggtgtgtgcccactgtgctcatcacaggagcctcagttgagagtgagcggggtacagtaaggcagtgcttcccacactggacctctttcctggttctcttttgcaatacattaacagaccctttatcaacataaacaatagtaactgagct

SEQ ID NO: 107912 - DNA, 2019 bp, Homo sapiens
  Payload ID: 1184
  Gene Symbol: ANO10
  Gene Name: anoctamin 10
  Uniprot ID: Q9NW15
  ENST ID: ENST00000451430
  CDS Start-End: 107-1756
ggcccgccccccgcaccgagcactctttcgcccggcctccggttctcgccggctctcggacccgcctccgaagacgtggagcgctgcggcggctgatttgtcaaagatgaaagtgaccttatcagctttggatacttctgagagttctttcacacctttggtggtcatagaacttgctcaggatgtcaaagaagaaaccaaagaatggctgaaaaacagaattatagctaaaaaaaaagatggagtgagaagattgctcacgtctggcatcgtgattcaggtgtttccactgcatgacagtgaagccctgaagaagcttgaggacacctggtacactcggtttgctttgaagtatcagcccatagacagtattcgtggctactttggggaaacaattgctctgtactttggatttttggagtatttcacttttgcattaatccccatggctgtcattgggttaccttactacttgtttgtgtgggaagactatgacaagtacgtgatctttgcctcgttcaacctcatctggtccacggtgattctggaactgtggaagcgtggctgtgccaacatgacctacaggtgggggacactgctcatgaagagaaagtttgaggagccccggccaggatttcatggtgtcttgggtatcaattccatcactgggaaggaggagcctctgtaccccagctacaagagacagttgcgcatttacctggtctccctgccattcgtgtgcctctgcctctatttctcactgtatgtcatgatgatttacttcgacatggaggtttgggccttgggtctacatgagaacagcgggtctgagtggaccagtgtcctgttgtatgtgcccagcatcatctatgccattgtgattgagatcatgaatcgtctctatcgatatgctgccgagtttttaacttcatgggagaatcacagattggaatctgcctatcagaaccatctaattctgaaagttttagtgttcaacttcctcaattgctttgcctcactcttctatattgcctttgtcttgaaagatatgaagcttttgcgccagagcttggccactctcctaattacctcccagatcctcaaccaaattatggaatcttttcttccttattggctccaaaggaagcatggtgtgcgggtgaagaggaaggtgcaggctttaaaggcagacattgatgctacattatatgaacaagtcatcctggaaaaagaaatgggaacttatttgggcacctttgatgattacttggagttattcctgcagtttggttatgtgagccttttctcctgtgtttacccattagcagctgcctttgctgtgttaaataacttcactgaagtaaattcagatgccttaaaaatgtgcagggtcttcaaacgtccattctcagaaccttcagccaatattggtgtgtggcagttggcttttgaaacgatgagtgttatatctgtggtcactaactgtgcgctgattggaatgtcaccacaagtgaatgcagtctttccagaatcaaaagcagacctcattttgattgtagtagcagtggagcacgcactcctggctttaaagtttatacttgcatttgccatacctgataagccacggcatatccagatgaaactagccagactggaatttgagtctttggaggcactcaagcagcagcaaatgaagctcgtgaccgagaacctgaaggaggaaccaatggaaagcgggaaggagaaggcaacctgagtgcccagcgtgcccagctgccctgttggcagaggcctgtgtctgtgccacacctgccacggtggcagggggggtacccggggcagcatcgtggctcctgaacccagacccaatgcttagccaaacgaagtggctcccatgtggcaagcacccttctcagtttcgcagtggcttggctcgggatccttggcagttcccccagccccaccctgtctgctccttcccagttccttcccgggccccacacgctgctccagctgcca

SEQ ID NO: 107913 - DNA, 2450 bp, Homo sapiens
  Payload ID: 1184
  Gene Symbol: ANO10
  Gene Name: anoctamin 10
  Uniprot ID: Q9NW15
  ENST ID: ENST00000414522
  CDS Start-End: 115-1998
actggcctggcccgccccccgcaccgagcactctttcgcccggcctccggttctcgccggctctcggacccgcctccgaagacgtggagcgctgcggcggctgatttgtcaaagatgaaagtgaccttatcagctttggatacttctgagagttctttcacacctttggtggtcatagaacttgctcaggatgtcaaagaagaaaccaaagaatggctgaaaaacagaattatagctaaaaaaaaagatggaggtgcccagttgttgtttagaccattgttaaataaatatgaacaagaaacactagaaaatcagaacttatatcttgttggtgcctccaagattagaatgttactaggggcagaagcagtgggattggtaaaagagtgcaatgataacaccatgagagccttcacatacagaaccagacagaacttcaaaggttttgatgataacaatgatgatttcctgacaatggcagaatgtcaattcattatcaaacatgaacttgaaaatcttagagctaaagatgaaaaaatgatccctggttaccctcaggcaaagttgtatccaggaaaatcattgttgagaagattgctcacgtctggcatcgtgattcaggtgtttccactgcatgacagtgaagccctgaagaagcttgaggacacctggtacactcggtttgctttgaagtatcagcccatagacagtattcgtggctactttggggaaacaattgctctgtactttggatttttggagtatttcacttttgcattaatccccatggctgtcattgggttaccttactacttgtttgtgtgggaagactatgacaagtacgtgatctttgcctcgttcaacctcatctggtccacggtgattctggaactgtggaagcgtggctgtgccaacatgacctacaggtgggggacactgctcatgaagagaaagtttgaggagccccggccaggatttcatggtgtcttgggtatcaattccatcactgggaaggaggagcctctgtaccccagctacaagagacagttgcgcatttacctggtctccctgccattcgtgtgcctctgcctctatttctcactgtatgtcatgatgatttacttcgacatggaggtttgggccttgggtctacatgagaacagcgggtctgagtggaccagtgtcctgttgtatgtgcccagcatcatctatgccattgtgattgagatcatgaatcgtctctatcgatatgctgccgagtttttaacttcatgggagaatcacagattggaatctgcctatcagaaccatctaattctgaaagttttagtgttcaacttcctcaattgctttgcctcactcttctatattgcctttgtcttgaaagatatgaagcttttgcgccagagcttggccactctcctaattacctcccagatcctcaaccaaattatggaatcttttcttccttattggctccaaaggaagcatggtgtgcgggtgaagaggaaggtgcaggctttaaaggcagacattgatgctacattatatgaacaagtcatcctggaaaaagaaatgggaacttatttgggcacctttgatgattacttggagttattcctgcagtttggttatgtgagccttttctcctgtgtttacccattagcagctgcctttgctgtgttaaataacttcactgaagtaaattcagatgccttaaaaatgtgcagggtcttcaaacgtccattctcagaaccttcagccaatattggtgtgtggcagttggcttttgaaacgatgagtgttatatctgtggtcactaactgtgcgctgattggaatgtcaccacaagtgaatgcagtctttccagaatcaaaagcagacctcattttgattgtagtagcagtggaggctgcaagctgcaagctggtctctcttccacggtattcatggagcaccaactcagtgccaggcactgtcataggtcctggggtctagtcatggccctgctctctggagaccacataccagcaaatgaagctcgtgaccgagaacctgaaggaggaaccaatggaaagcgggaaggagaaggcaacctgagtgcccagcgtgcccagctgccctgttggcagaggcctgtgtctgtgccacacctgccacggtggcagggggggtacccggggcagcatcgtggctcctgaacccagacccaatgcttagccaaacgaagtggctcccatgtggcaagcacccttctcagtttcgcagtggcttggctcgggatccttggcagttcccccagccccaccctgtctgctccttcccagttccttcccgggccccacacgctgctccagctgccaactttgctgcagagccactgccgcccttgagcctctcaccatgagtgagccaccagctctccacgttcccctcatagcagtgtcact

SEQ ID NO: 107914 - DNA, 560 bp, Homo sapiens
  Payload ID: 1184
  Gene Symbol: ANO10
  Gene Name: anoctamin 10
  ENST ID: ENST00000439141
  CDS Start-End: 159-560
ttcctacggctacgggaaggatcgtccagtggctgaggctggacagagcacagtagagatggggtttcaccatgttggccaggatggtctcaatcttctgacctcatgatccgcccacctcggcctcccaaggtgctgggattacagatttgtcaaagatgaaagtgaccttatcagctttggatacttctgagagttctttcacacctttggtggtcatagaacttgctcaggatgtcaaagaagaaaccaaagaatggctgaaaaacagaattatagctaaaaaaaaagatggaggtgcccagttgttgtttagaccattgttaaataaatatgaacaagaaacactagaaaatcagaacttatatcttgttggtgcctccaagattagaatgttactaggggcagaagcagtgggattggtaaaagagtgcaatgataacaccatgagagccttcacatacagaaccagacagaacttcaaaggttttgatgataacaatgatgatttcctgacaatggcagaatgtcaattcattatcaaacatgaacttgaaaat

SEQ ID NO: 107915 - DNA, 511 bp, Homo sapiens
  Payload ID: 1184
  Gene Symbol: ANO10
  Gene Name: anoctamin 10
  ENST ID: ENST00000413397
  CDS Start-End: 90-511
atcccctccaaggaagcgccgccccttcctacggctacgggaaggatcgtccagtggctgaggctggacagagcacagatttgtcaaagatgaaagtgaccttatcagctttggatacttctgagagttctttcacacctttggtggtcatagaacttgctcaggatgtcaaagaagaaaccaaagaatggctgaaaaacagaattatagctaaaaaaaaagatggaggtgcccagttgttgtttagaccattgttaaataaatatgaacaagaaacactagaaaatcagaacttatatcttgttggtgcctccaagattagaatgttactaggggcagaagcagtgggattggtaaaagagtgcaatgataacaccatgagagccttcacatacagaaccagacagaacttcaaaggttttgatgataacaatgatgatttcctgacaatggcagaatgtcaattcattatcaaacatgaacttgaaaatcttagagctaaagatgaaaa

SEQ ID NO: 107916 - DNA, 575 bp, Homo sapiens
  Payload ID: 1184
  Gene Symbol: ANO10
  Gene Name: anoctamin 10
  ENST ID: ENST00000444344
  CDS Start-End: 137-575
agggcacctcggaccccccagctgtccgcagcagagcccggccccttgcagccacagagccccggccgctgcaggctccaggagctccgcctggtcgccgccctgcgttcccgggccgcctcccgatttgtcaaagatgaaagtgaccttatcagctttggatacttctgagagttctttcacacctttggtggtcatagaacttgctcaggatgtcaaagaagaaaccaaagaatggctgaaaaacagaattatagctaaaaaaaaagatggaggtgcccagttgttgtttagaccattgttaaataaatatgaacaagaaacactagaaaatcagaacttatatcttgttggtgcctccaagattagaatgttactaggggcagaagcagtgggattggtaaaagagtgcaatgataacaccatgagagccttcacatacagaaccagacagaacttcaaaggttttgatgataacaatgatgatttcctgacaatggcagaatgtcaattcattatcaaacatgaacttgaaaatcttagagctaaagatgaaaaaatgatccctggttacc

SEQ ID NO: 107917 - DNA, 545 bp, Homo sapiens
  Payload ID: 1184
  Gene Symbol: ANO10
  Gene Name: anoctamin 10
  ENST ID: ENST00000456438
  CDS Start-End: 123-545
gctctcggacccgcctccgaagacgtggagcgctgcggcggctggcagctgccctaggtacaaggagggaggctcccacaattgctctcaccattaactgcctgcctgtagatttgtcaaagatgaaagtgaccttatcagctttggatacttctgagagttctttcacacctttggtggtcatagaacttgctcaggatgtcaaagaagaaaccaaagaatggctgaaaaacagaattatagctaaaaaaaaagatggaggtgcccagttgttgtttagaccattgttaaataaatatgaacaagaaacactagaaaatcagaacttatatcttgttggtgcctccaagattagaatgttactaggggcagaagcagtgggattggtaaaagagtgcaatgataacaccatgagagccttcacatacagaaccagacagaacttcaaaggttttgatgataacaatgatgatttcctgacaatggcagaatgtcaattcattatcaaacatgaacttgaaaatcttagagctaaagatgaaaaa

SEQ ID NO: 107918 - DNA, 497 bp, Homo sapiens
  Payload ID: 1184
  Gene Symbol: ANO10
  Gene Name: anoctamin 10
  ENST ID: ENST00000436073
  CDS Start-End: 382-497
ggctttgcgtccgccatccccagccagcatgcactagttctcccgcccgacgctcccgggtgtaagcgcggggcgggacagtcagcccagagggactggcgagactcacccgaatgagttaggtgttttagctaatttgaataatgactgtattcatgcatcaccccgtcggtgttggctgtcaggtggcaccttggggacggaggtgcgtccggtcctggaagagcctagctagtgtccgatagatggtgcagtggcaaatgaaatggcgtaatcgagagatggggtttcaccatgttggccaggatggtctcaatcttctgacctcatgatccgcccacctcggcctcccaaggtgctgggattacagatttgtcaaagatgaaagtgaccttatcagctttggatacttctgagagttctttcacacctttggtggtcatagaacttgctcaggatgtcaaagaagaaaccaaagaatggctgaaaaacagaat

SEQ ID NO: 107919 - DNA, 746 bp, Homo sapiens
  Payload ID: 1184
  Gene Symbol: ANO10
  Gene Name: anoctamin 10
  ENST ID: ENST00000427171
  CDS Start-End: 170-746
ccgcatctaggccccgccgcgtccgccacgcccagcgctcggcggcgcccgccccactggcctggcccgccccccgcaccgagcactctttcgcccggcctccggttctcgccggctctcggacccgcctccgaagacgtggagcgctgcggcggctgatttgtcaaagatgaaagtgaccttatcagctttggatacttctgagagttctttcacacctttggtggtcatagaacttgctcaggatgtcaaagaagaaaccaaagaatggctgaaaaacagaattatagctaaaaaaaaagatggaggtgcccagttgttgtttagaccattgttaaataaatatgaacaagaaacactagaaaatcagaacttatatcttgttggtgcctccaagattagaatgttactaggggcagaagcagtgggattggtaaaagagtgcaatgataacaccatgagagccttcacatacagaaccagacagaacttcaaaggttttgatgataacaatgatgatttcctgacaatggcagaatgtcaattcattatcaaacatgaacttgaaaatcttagagctaaagatgaaaaaatgatccctggttaccctcaggcaaagttgtatccaggaaaatcattgtttcaacttcctcaattgctttgcctcactcttctatattgcctttgtcttgaaagatatgaagcttttgcgccagagcttggccactctcctaattacctcccag

SEQ ID NO: 107920 - DNA, 641 bp, Homo sapiens
  Payload ID: 1184
  Gene Symbol: ANO10
  Gene Name: anoctamin 10
  ENST ID: ENST00000428831
  CDS Start-End: 305-641
gcgtccgccatccccagccagcatgcactagttctcccgcccgacgctcccgggtgtaagcgcggggcgggacagtcagcccagagggactggcgagactcacccgaatgagttaggtgttttagctaatttgaataatgactgtattcatgcatcaccccgtcggtgttggctgtcaggtggcaccttggggacggagtagagatggggtttcaccatgttggccaggatggtctcaatcttctgacctcatgatccgcccacctcggcctcccaaggtgctgggattacagatttgtcaaagatgaaagtgaccttatcagctttggatacttctgagagttctttcacacctttggtggtcatagaacttgctcaggatgtcaaagaagaaaccaaagaatggctgaaaaacagaattatagctaaaaaaaaagatggaggtgcccagttgttgtttagaccattgttaaataaatatgaacaagaaacactagaaaatcagaacttatatcttgttggtgcctccaagattagaatgttactaggggcagaagcagtgggattggtaaaagagtgcaatgataacaccatgagagccttcacatacagaaccagacagaacttcaaaggttttgatg

SEQ ID NO: 107921 - DNA, 583 bp, Homo sapiens
  Payload ID: 1184
  Gene Symbol: ANO10
  Gene Name: anoctamin 10
  ENST ID: ENST00000448045
  CDS Start-End: 1-566
cctgtgtttacccattagcagctgcctttgctgtgttaaataacttcactgaagtaaattcagatgccttaaaaatgtgcagggtcttcaaacgtccattctcagaaccttcagccaatattggtgtgtggcagatcatattttgtttggacacaggtgtaaagagagggctgaattgcaaggtcatgaggaatcttttgggggaaatggaaatgtcctgtgtcttgtttgtggtggtggtggtttcacagttggcttttgaaacgatgagtgttatatctgtggtcactaactgtgcgctgattggaatgtcaccacaagtgaatgcagtctttccagaatcaaaagcagacctcattttgattgtagtagcagtggagcacgcactcctggctttaaagtttatacttgcatttgccatacctgataagccacggcatatccagatgaaactagccagactggaatttgagtctttggaggcactcaagcagcagcaaatgaagctcgtgaccgagaacctgaaggaggaaccaatggaaagcgggaaggagaaggcaacctgagtgcccagcgtgcccag

SEQ ID NO: 107922 - DNA, 592 bp, Homo sapiens
  Payload ID: 1184
  Gene Symbol: ANO10
  Gene Name: anoctamin 10
  ENST ID: ENST00000428472
  CDS Start-End: 107-592
ggcccgccccccgcaccgagcactctttcgcccggcctccggttctcgccggctctcggacccgcctccgaagacgtggagcgctgcggcggctgatttgtcaaagatgaaagtgaccttatcagctttggatacttctgagagttctttcacacctttggtggtcatagaacttgctcaggatgtcaaagaagaaaccaaagaatggctgaaaaacagaattatagctaaaaaaaaagatggagtgagaagattgctcacgtctggcatcgtgattcaggtgtttccactgcatgacagtgaagccctgaagaagcttgaggacacctggtacactcggtttgctttgaagtatcagcccatagacagtattcgtggctactttggggaaacaattgctctgtactttggatttttggagtatttcacttttgcattaatccccatggctgtcattgggttaccttactacttgtttgtgtgggaagactatgacaagtacgtgatctttgcctcgttcaacctcatctggtccacggtgattctggaactgtggaagcgtggctgtgccaacatgacctacaggtggggg

SEQ ID NO: 107923 - DNA, 3720 bp, Homo sapiens
  Payload ID: 1185
  Gene Symbol: ANO2
  Gene Name: anoctamin 2, calcium activated chloride channel
  Uniprot ID: Q9NQ90
  ENST ID: ENST00000327087
  CDS Start-End: 73-3072
ccaggctccttctctataaagtgggatctatcatgaccagcctaccttatcaatataggagagaaaatcttcatgcctgaagatatacccctgctccctggctccccacgccggctgagccctcaggcagggtccagagggggccagggccccaaacatggacagcagtgtctcaagatgccaggtccccgggccccaggtctgcagggcggttccaacagagatcctggccagccctgcggtggagagagcacccgcagcagctctgtcatcaacaactatctggatgccaatgagcctgtgtccttggaggcccgtcttagccgcatgcacttccatgacagtcagaggaaggtcgactatgtacttgcctaccactaccggaaacgcggggtgcacctggcccaaggcttccctggccactcgctggctatcgtctccaatggggagacaggcaaggagcctcatgctgggggcccaggtgacattgagctgggaccgctcgatgccctggaggaggagaggaaggagcagcgggaggaatttgagcacaatctgatggaggctggactggagcttgagaaggacttggagaataaaagccagggatccatctttgtccggatacacgccccgtggcaggtgctggccagagaggcagaattcttgaagatcaaagttcctaccaagaaagaaatgtacgagatcaaagcaggaggcagcattgcaaagaagttcagcgcggctctgcagaagctgagctcgcacctgcagccccgagttccagaacacagcaacaacaagatgaaaaacctctcctacccattctccagggagaagatgtacctgtacaacatccaggaaaaggacaccttctttgataatgccacccgcagccgcattgtgcacgagatcctgaagcgcacagcctgctcccgagccaacaacacgatgggtattaactctctgatcgcaaacaatatctatgaggctgcctaccctcttcatgacggtgaatacgatagtccagaggacgatatgaatgacaggaagctgctatatcaagaatgggcgcgctatggagtgttctataagttccaacctattgacctcatcagaaagtattttggagaaaaaattggactgtattttgcctggctgggattatatacatcattcctcatcccatcttctgtaattggagtgattgtgtttctttatggatgtgcaacaattgaagaagatattcccagcagagagatgtgtgaccagcagaatgccttcaccatgtgtcccctgtgtgacaagtcctgtgattactggaacctcagctcagcctgtgggaccgcgcaggccagccacctgtttgacaaccctgccaccgtcttcttctctatcttcatggctctgtgggctaccatgttcctggaaaactggaagaggctacagatgcgactgggctacttttgggacctgactggcatagaagaggaagaagaacgtgcccaggaacattccaggcctgagtatgaaaccaaagttcgagagaaaatgctaaaggagagcaaccagtctgctgtccagaaattggaaacaaacacgacggagtgtggcgatgaggatgatgaagataaactgacctggaaggatcgtttcccaggttacctgatgaactttgcctccatcttattcatgattgccctgacattctcaatcgtctttggggtgatagtgtatcgaataacaactgcagccgctctgtctctcaataaggctacacgctccaatgtccgggtgacagtgacagcaacagcagtcatcatcaacctcgtggtcatcctcatcctggacgagatctacggcgctgtggccaagtggctcaccaaaattgaggttccgaaaacagaacagacttttgaagagcgcctgatcctcaaagctttcttgctcaagtttgtcaatgcctactcccccatcttctatgtggcctttttcaaagggaggtttgtgggcaggcctggaagctacgtctatgtattcgatggttaccgcatggaagagtgtgctccagggggctgtctcatggagctctgcattcagctcagcatcatcatgttggggaagcagttgatccagaacaacatctttgagattggagtcccgaagctaaagaaactatttcgaaagctgaaagatgagaccgaagctggagaaactgactctgcccattcgaaacatccagagcagtgggacctagactacagcttggaaccatacacaggactgactccggagtacatggaaatgatcatccagtttggttttgtcaccctcttcgtggcctcctttcccctggcacctgtgtttgccctcctcaacaacgtcattgaagtgcggctcgatgcaaagaagtttgttacagagctgagacggccggatgctgtaagaaccaaagatatcggaatctggtttgacattctctctggaattggcaagttctctgttatcagcaacgcttttgtcattgcgatcacctccgactttatcccccgcctggtgtaccagtactcctacagtcacaatgggactctgcacggctttgtcaaccacaccctctcctttttcaacgtcagccagctgaaggaggggacgcagccagaaaactcacagtttgaccaggaggttcagttctgcaggtttaaggattaccgagagccgccatgggccccgaacccttatgagttttcgaaacagtactggtttattctgtccgcccgtctggcttttgtcataatcttccagaacctcgtgatgttcctgagcgtcctcgtggactggatgattccagacatccccacggacatcagcgaccagatcaagaaagagaagagcttattagtggatttcttcctgaaagaggagcatgagaagctcaagctgatggatgagccggctctgaggagcccaggaggtggggatcgaagcaggagccgggcagccagctcagcaccttcaggccaaagccagctgggcagcatgatgtcgtcaggctctcagcacaccaatgtgtgagcagttcagcctgcagcagaggagggcacggcagcagagacacgcacatgcacgtaagcatgttcctacacccacatggcgtgctgtctgtctgcaggggcctggcttgatggggtcttgaagagggggcagtgtgtaaaaagaaagagcctgacagaatgagtgtaggaaggaagagaaatgatgctacatctcagaaacttcaagcttaagtttcttttaggtccccttttaagctgcatccttttgagggattggaaccccactggggtctctccaccccagagtctcaggcaccgcgagcattcccatgtaccctggggcaccctcttgtacttcaccatcatttctgactttgaccagctgtaagagaaatgcagtcaggagcacagcatcccctacttactatcactacaagaaaactgagtcacttgcagtggggctgccacagtctcagcagatgcaaattaagttacaaggctgaatggtgcagccgctggacctgatagtaaggtgcaaaggtccaaacctgggcttgtctccacttcacgtcacaaaaacgtttggagctaaatgcagataaccatcattttatgaaagttcagatttaaaataataaaataaatggacacattctttataaagatg

SEQ ID NO: 107924 - DNA, 3717 bp, Homo sapiens
  Payload ID: 1185
  Gene Symbol: ANO2
  Gene Name: anoctamin 2, calcium activated chloride channel
  Uniprot ID: Q9NQ90
  ENST ID: ENST00000356134
  CDS Start-End: 73-3072
ccaggctccttctctataaagtgggatctatcatgaccagcctaccttatcaatataggagagaaaatcttcatgcctgaagatatacccctgctccctggctccccacgccggctgagccctcaggcagggtccagagggggccagggccccaaacatggacagcagtgtctcaagatgccaggtccccgggccccaggtctgcagggcggttccaacagagatcctggccagccctgcggtggagagagcacccgcagcagctctgtcatcaacaactatctggatgccaatgagcctgtgtccttggaggcccgtcttagccgcatgcacttccatgacagtcagaggaaggtcgactatgtacttgcctaccactaccggaaacgcggggtgcacctggcccaaggcttccctggccactcgctggctatcgtctccaatggggagacaggcaaggagcctcatgctgggggcccaggtgacattgagctgggaccgctcgatgccctggaggaggagaggaaggagcagcgggaggaatttgagcacaatctgatggaggctggactggagcttgagaaggacttggagaataaaagccagggatccatctttgtccggatacacgccccgtggcaggtgctggccagagaggcagaattcttgaagatcaaagttcctaccaagaaagagatgtacgagatcaaagcaggaggcagcattgcaaagaagttcagcgcggctctgcagaagctgagctcgcacctgcagccccgagttccagaacacagcaacaacaagatgaaaaacctctcctacccattctccagggagaagatgtacctgtacaacatccaggaaaaggacaccttctttgataatgccacccgcagccgcattgtgcacgagatcctgaagcgcacagcctgctcccgagccaacaacacgatgggtattaactctctgatcgcaaacaatatctatgaggctgcctaccctcttcatgacggtgaatacgatagtccagaggacgatatgaatgacaggaagctgctatatcaagaatgggcgcgctatggagtgttctataagttccaacctattgacctcatcagaaagtattttggagaaaaaattggactgtattttgcctggctgggattatatacatcattcctcatcccatcttctgtaattggagtgattgtgtttctttatggatgtgcaacaattgaagaagatattcccagcagagagatgtgtgaccagcagaatgccttcaccatgtgtcccctgtgtgacaagtcctgtgattactggaacctcagctcagcctgtgggaccgcgcaggccagccacctgtttgacaaccctgccaccgtcttcttctctatcttcatggctctgtgggctaccatgttcctggaaaactggaagaggctacagatgcgactgggctacttttgggacctgactggcatagaagaggaagaagaacgtgcccaggaacattccaggcctgagtatgaaaccaaagttcgagagaaaatgctaaaggagagcaaccagtctgctgtccagaaattggaaacaaacacgacggagtgtggcgatgaggatgatgaagataaactgacctggaaggatcgtttcccaggttacctgatgaactttgcctccatcttattcatgattgccctgacattctcaatcgtctttggggtgatagtgtatcgaataacaactgcagccgctctgtctctcaataaggctacacgctccaatgtccgggtgacagtgacagcaacagcagtcatcatcaacctcgtggtcatcctcatcctggacgagatctacggcgctgtggccaagtggctcaccaaaattgaggttccgaaaacagaacagacttttgaagagcgcctgatcctcaaagctttcttgctcaagtttgtcaatgcctactcccccatcttctatgtggcctttttcaaagggaggtttgtgggcaggcctggaagctacgtctatgtattcgatggttaccgcatggaagagtgtgctccagggggctgtctcatggagctctgcattcagctcagcatcatcatgttggggaagcagttgatccagaacaacatctttgagattggagtcccgaagctaaagaaactatttcgaaagctgaaagatgagaccgaagctggagaaactgactctgcccattcgaaacatccagagcagtgggacctagactacagcttggaaccatacacaggactgactccggagtacatggaaatgatcatccagtttggttttgtcaccctcttcgtggcctcctttcccctggcacctgtgtttgccctcctcaacaacgtcattgaagtgcggctcgatgcaaagaagtttgttacagagctgagacggccggatgctgtaagaaccaaagatatcggaatctggtttgacattctctctggaattggcaagttctctgttatcagcaacgcttttgtcattgcgatcacctccgactttatcccccgcctggtgtaccagtactcctacagtcacaatgggactctgcacggctttgtcaaccacaccctctcctttttcaacgtcagccagctgaaggaggggacgcagccagaaaactcacagtttgaccaggaggttcagttctgcaggtttaaggattaccgagagccgccatgggccccgaacccttatgagttttcgaaacagtactggtttattctgtccgcccgtctggcttttgtcataatcttccagaacctcgtgatgttcctgagcgtcctcgtggactggatgattccagacatccccacggacatcagcgaccagatcaagaaagagaagagcttattagtggatttcttcctgaaagaggagcatgagaagctcaagctgatggatgagccggctctgaggagcccaggaggtggggatcgaagcaggagccgggcagccagctcagcaccttcaggccaaagccagctgggcagcatgatgtcgtcaggctctcagcacaccaatgtgtgagcagttcagcctgcagcagaggagggcacggcagcagagacacgcacatgcacgtaagcatgttcctacacccacatggcgtgctgtctgtctgcaggggcctggcttgatggggtcttgaagagggggcagtgtgtaaaaagaaagagcctgacagaatgagtgtaggaaggaagagaaatgatgctacatctcagaaacttcaagcttaagtttcttttaggtccccttttaagctgcatccttttgagggattggaaccccactggggtctctccaccccagagtctcaggcaccgcgagcattcccatgtaccctggggcaccctcttgtacttcaccatcatttctgactttgaccagctgtaagagaaatgcagtcaggagcacagcatcccctacttactatcactacaagaaaactgagtcacttgcagtggggctgccacagtctcagcagatgcaaattaagttacaaggctgaatggtgcagccgctggacctgatagtaaggtgcaaaggtccaaacctgggcttgtctccacttcacgtcacaaaaacgtttggagctaaatgcagataaccatcattttatgaaagttcagatttaaaataataaaataaatggacacattctttataaag

SEQ ID NO: 107925 - DNA, 3702 bp, Homo sapiens
  Payload ID: 1185
  Gene Symbol: ANO2
  Gene Name: anoctamin 2, calcium activated chloride channel
  ENST ID: ENST00000546188
  CDS Start-End: 43-3054
agaagcgcgcggccgcgggccggcggggtctgcgtccacatcatggcgactcccgggccgcgcgatatacccctgctccctggctccccacgccggctgagccctcaggcagggtccagagggggccagggccccaaacatggacagcagtgtctcaagatgccaggtccccgggccccaggtctgcagggcggttccaacagagatcctggccagccctgcggtggagagagcacccgcagcagctctgtcatcaacaactatctggatgccaatgagcctgtgtccttggaggcccgtcttagccgcatgcacttccatgacagtcagaggaaggtcgactatgtacttgcctaccactaccggaaacgcggggtgcacctggcccaaggcttccctggccactcgctggctatcgtctccaatggggagacaggcaaggagcctcatgctgggggcccaggtgacattgagctgggaccgctcgatgccctggaggaggagaggaaggagcagcgggaggaatttgagcacaatctgatggaggctggactggagcttgagaaggacttggagaataaaagccagggatccatctttgtccggatacacgccccgtggcaggtgctggccagagaggcagaattcttgaagatcaaagttcctaccaagaaagagatgtacgagatcaaagcaggaggcagcattgcaaagaagttcagcgcggctctgcagaagctgagctcgcacctgcagccccgagttccagaacacagcaacaacaagatgaaaaacctctcctacccattctccagggagaagatgtacctgtacaacatccaggaaaaggacaccttctttgataatgccacccgcagccgcattgtgcacgagatcctgaagcgcacagcctgctcccgagccaacaacacgatgggtattaactctctgatcgcaaacaatatctatgaggctgcctaccctcttcatgacggtgaatacgatagtccagaggacgatatgaatgacaggaagctgctatatcaagaatgggcgcgctatggagtgttctataagttccaacctattgacctcatcagaaagtattttggagaaaaaattggactgtattttgcctggctgggattatatacatcattcctcatcccatcttctgtaattggagtgattgtgtttctttatggatgtgcaacaattgaagaagatattcccagcagagagatgtgtgaccagcagaatgccttcaccatgtgtcccctgtgtgacaagtcctgtgattactggaacctcagctcagcctgtgggaccgcgcaggccagccacctgtttgacaaccctgccaccgtcttcttctctatcttcatggctctgtgggctaccatgttcctggaaaactggaagaggctacagatgcgactgggctacttttgggacctgactggcatagaagaggaagaagtgagttctcaggaacattccaggcctgagtatgaaaccaaagttcgagagaaaatgctaaaggagagcaaccagtctgctgtccagaaattggaaacaaacacgacggagtgtggcgatgaggatgatgaagataaactgacctggaaggatcgtttcccaggttacctgatgaactttgcctccatcttattcatgattgccctgacattctcaatcgtctttggggtgatagtgtatcgaataacaactgcagccgctctgtctctcaataaggctacacgctccaatgtccgggtgacagtgacagcaacagcagtcatcatcaacctcgtggtcatcctcatcctggacgagatctacggcgctgtggccaagtggctcaccaaaattgaggttccgaaaacagaacagacttttgaagagcgcctgatcctcaaagctttcttgctcaagtttgtcaatgcctactcccccatcttctatgtggcctttttcaaagggaggtttgtgggcaggcctggaagctacgtctatgtattcgatggttaccgcatggaagagtgtgctccagggggctgtctcatggagctctgcattcagctcagcatcatcatgttggggaagcagttgatccagaacaacatctttgagattggagtcccgaagctaaagaaactatttcgaaagctgaaagatgagaccgaagctggagaaactgactctgcccattcgaaacatccagagcagtgggacctagactacagcttggaaccatacacaggactgactccggagtacatggaaatgatcatccagtttggttttgtcaccctcttcgtggcctcctttcccctggcacctgtgtttgccctcctcaacaacgtcattgaagtgcggctcgatgcaaagaagtttgttacagagctgagacggccggatgctgtaagaaccaaagatatcggaatctggtttgacattctctctggaattggcaagttctctgttatcagcaacgcttttgtcattgcgatcacctccgactttatcccccgcctggtgtaccagtactcctacagtcacaatgggactctgcacggctttgtcaaccacaccctctcctttttcaacgtcagccagctgaaggaggggacgcagccagaaaactcacagtttgaccaggaggttcagttctgcaggtttaaggattaccgagagccgccatgggccccgaacccttatgagttttcgaaacagtactggtttattctgtccgcccgtctggcttttgtcataatcttccagaacctcgtgatgttcctgagcgtcctcgtggactggatgattccagacatccccacggacatcagcgaccagatcaagaaagagaagagcttattagtggatttcttcctgaaagaggagcatgagaagctcaagctgatggatgagccggctctgaggagcccaggaggtggggatcgaagcaggagccgggcagccagctcagcaccttcaggccaaagccagctgggcagcatgatgtcgtcaggctctcagcacaccaatgtgtgagcagttcagcctgcagcagaggagggcacggcagcagagacacgcacatgcacgtaagcatgttcctacacccacatggcgtgctgtctgtctgcaggggcctggcttgatggggtcttgaagagggggcagtgtgtaaaaagaaagagcctgacagaatgagtgtaggaaggaagagaaatgatgctacatctcagaaacttcaagcttaagtttcttttaggtccccttttaagctgcatccttttgagggattggaaccccactggggtctctccaccccagagtctcaggcaccgcgagcattcccatgtaccctggggcaccctcttgtacttcaccatcatttctgactttgaccagctgtaagagaaatgcagtcaggagcacagcatcccctacttactatcactacaagaaaactgagtcacttgcagtggggctgccacagtctcagcagatgcaaattaagttacaaggctgaatggtgcagccgctggacctgatagtaaggtgcaaaggtccaaacctgggcttgtctccacttcacgtcacaaaaacgtttggagctaaatgcagataaccatcattttatgaaagttcagatttaaaataataaaataaatggacacattctttataaagatg

SEQ ID NO: 107926 - DNA, 640 bp, Homo sapiens
  Payload ID: 1185
  Gene Symbol: ANO2
  Gene Name: anoctamin 2, calcium activated chloride channel
  ENST ID: ENST00000545860
  CDS Start-End: 31-640
acagagattattctatcagctacatgcaggatgggttggaaggctgaaagtctggagtcagctaccatgttcctggaaaactggaagaggctacagatgcgactgggctacttttgggacctgactggcatagaagaggaagaagaacattccaggcctgagtatgaaaccaaagttcgagagaaaatgctaaaggagagcaaccagtctgctgtccagaaattggaaacaaacacgacggagtgtggcgatgaggatgatgaagataaactgacctggaaggatcgtttcccaggttacctgatgaactttgcctccatcttattcatgattgccctgacattctcaatcgtctttggggtgatagtgtatcgaataacaactgcagccgctctgtctctcaataaggctacacgctccaatgtccgggtgacagtgacagcaacagcagtcatcatcaacctcgtggtcatcctcatcctggacgagatctacggcgctgtggccaagtggctcaccaaaattgaggttccgaaaacagaacagacttttgaagagcgcctgatcctcaaagctttcttgctcaagtttgtcaatgcctactcccccatcttctatgtggcctttttcaaagggaggt

SEQ ID NO: 107927 - DNA, 1087 bp, Homo sapiens
  Payload ID: 1185
  Gene Symbol: ANO2
  Gene Name: anoctamin 2, calcium activated chloride channel
  ENST ID: ENST00000612575
  CDS Start-End: 186-446
ggaagagtgtgtgacttggtgaagcagctcccaagcacccaagatgcccaggagcctctggaagcagcagttggtccccagtgtcttcccctgaacccctaggaacatgtagggttcaagggctcagtcccagtctcagaggggaaaaggcatgtgagcgtgcaactggcagccagaacctcgtgatgttcctgagcgtcctcgtggactggatgattccagacatccccacggacatcagcgaccagatcaagaaagagaagagcttattagtggatttcttcctgaaagaggagcatgagaagctcaagctgatggatgagccggctctgaggagcccaggaggtggggatcgaagcaggagccgggcagccagctcagcaccttcaggccaaagccagctgggcagcatgatgtcgtcaggctctcagcacaccaatgtgtgagcagttcagcctgcagcagaggagggcacggcagcagagacacgcacatgcacgtaagcatgttcctacacccacatggcgtgctgtctgtctgcaggggcctggcttgatggggtcttgaagagggggcagtgtgtaaaaagaaagagcctgacagaatgagtgtaggaaggaagagaaatgatgctacatctcagaaacttcaagcttaagtttcttttaggtccccttttaagctgcatccttttgagggattggaaccccactggggtctctccaccccagagtctcaggcaccgcgagcattcccatgtaccctggggcaccctcttgtacttcaccatcatttctgactttgaccagctgtaagagaaatgcagtcaggagcacagcatcccctacttactatcactacaagaaaactgagtcacttgcagtggggctgccacagtctcagcagatgcaaattaagttacaaggctgaatggtgcagccgctggacctgatagtaaggtgcaaaggtccaaacctgggcttgtctccacttcacgtcacaaaaacgtttggagctaaatgcagataaccatcattttatgaaagttcagatttaaaataataaaataaatggacacattctttat

SEQ ID NO: 107928 - DNA, 6642 bp, Homo sapiens
  Payload ID: 1186
  Gene Symbol: ANO3
  Gene Name: anoctamin 3
  Uniprot ID: Q9BYT9
  ENST ID: ENST00000256737
  CDS Start-End: 853-3798
ctttcaaataaggtgttgatttatgtggtcttgagaaatctttgttgctctgatcttaagtttctttttataatattagaatcatagtttacctacattacagggcttttatgaagattaaatcgagcatcgtgggtagtgttttttcagcccctgtgactaagtaggttataaatggtcctcagtcatcatcatcataaatgattcaaggcctgaatggcagaagaagaagaggaaaactcaagtgaaaagtgctagacatagaacacagcttacctaataaaacatgctactggctaactaagctggggtggctttctgccccctctacttaaatttaagaaagaaaaacagaaacgtctctgcatctgccactgcataccctctcagagcacagaccaactttgcccttccttaaaagtcccagggtttacctaccaacttttaggaaataaataaccagcctcaaagcttggcaaagagggcatcagtatcagctctagaggtttgctccgatttatatctcctcctccagtaaagtcttctgctcccactcccagccaaccccgctcaacgcccacccctcactgtggcactggacgcgcgggggatgcggggttgttcccagagtagccgctaaggggagccggacgctagaccgccctcccgcgttcccatgacaacgacaccggcgggcgcgtagcctggagagcgaagtgccggctacagcaggtgtcggattgcagtgcgctcgctgaggctccggaccttggagcgtctagagtctggctactgttcctccgcctccctctcgggcagctccctaagccggctgggacgcgcagagtgaaaatggtccaccattcaggctccattcagtcctttaaacagcaaaaaggtatgaatataagcaagagtgagataacaaaagaaacttcgttaaaaccgtctcggagatccctgccttgcctcgcccagagctacgcttactcaaagagcttgagccagtctacttccctcttccagtcaaccgagagtgaatctcaggctcccacatctataaccttaatctccactgacaaagcagagcaagttaatactgaggagaataaaaacgactctgtgctgagatgttcatttgctgacctcagcgatttttgtttggccctaggaaaagataaggattacacggatgaatcagaacacgctacttatgaccgatctcgtctcattaatgactttgttatcaaagataaatctgaattcaagacaaaattatctaagaatgacatgaattacatagcatccagtggacctctgttcaaagatggcaaaaagagaattgattacatcttggtttatagaaagacaaatatacaatatgataaaagaaacacatttgaaaagaacctcagagcagaaggcttgatgttggagaaggagccagctattgcaagccccgatatcatgtttattaaaattcacattccatgggacacgctgtgcaagtatgcagagaggctgaatatcaggatgcccttcaggaaaaaatgctattacactgacgggaggagcaaatcaatgggcaggatgcaaacttattttagaagaatcaaaaactggatggcccaaaacccaatggttcttgacaagtcagcttttccagacctagaggagtcagactgctatactggccccttcagccgtgcacggattcaccacttcataataaataataaagacaccttcttcagcaatgctactcgaagcagaatagtctatcacatgctggaacgcaccaaatatgaaaatggaatatcaaaagtgggtatccgtaaacttataaacaatggctcatacatagcagcgtttccaccacatgagggagcctacaaaagtagccagcccattaaaacccatggacctcagaataacagacatctattatatgagcgctgggcacgctggggaatgtggtataagcatcagcctctggatttaatcaggctatactttggtgagaagattggactatactttgcttggctgggatggtatactggaatgttgattcctgcagcaattgttggtttgtgcgttttcttctatggattatttacaatgaataatagtcaagtaagccaagaaatttgtaaagccactgaagtctttatgtgccctctctgtgacaagaactgctccctgcagagactcaacgacagctgtatctatgccaaggtgacatatttgttcgataatggagggacagtcttctttgctatttttatggcaatatgggccacagtcttcctggagttttggaaaaggagaaggagtatactgacctatacttgggaccttatcgaatgggaagaagaggaggaaacacttcgtccccagtttgaagccaagtattacaagatggagattgtaaatcccatcacgggaaaacctgaaccacatcagccttcctcagacaaagtcactcgtcttcttgtttctgtctcaggaatattcttcatgatatccttggtgatcactgcagtgtttggagttgtggtgtaccgcctggttgtcatggaacagtttgcatcattcaagtggaatttcatcaaacaatactggcagtttgcaacatctgctgctgctgtctgtatcaatttcataatcattatgttgctgaatcttgcttatgaaaaaattgcttacctcctcaccaatttagaatatcctcgaacagaatcagagtgggaaaacagcttcgccctgaagatgttcctcttccagtttgtcaatttaaacagttccatcttctatatcgctttctttttgggaagattcgtaggccacccaggaaaatacaataaactttttgaccggtggagactggaggaatgtcatcctagtggctgtttgatagacctctgcctccagatgggtgtcatcatgtttttgaagcaaatatggaacaacttcatggaactaggatacccgttgatccagaactggtggtcacgacataaaatcaagcggggaatacatgatgcttccatacctcagtgggaaaatgattggaatctgcagcccatgaaccttcatggactgatggatgagtacttagaaatggttttgcaatttggttttaccaccatctttgttgcggcttttcctctagcccctcttttggctttgttaaacaatatcattgaaatcaggctggatgcatacaaatttgtcactcaatggcggaggcctttgccagcccgagcaactgacataggtatctggcttggaattctcgaaggaatcggtatattggctgtgatcaccaatgcatttgtaattgctattacttctgattacatcccacgttttgtttatgaatacaaatatggcccctgtgcaaatcatgtagaaccaagtgaaaattgcttgaagggatatgtcaacaatagcctatccttctttgacctgagtgagcttggtatgggaaaatctggttattgcaggtacagagactacagaggcccgccctggagttccaaaccctatgagtttactttacaatactggcatatccttgctgctagattggccttcattattgtgtttgagcaccttgtttttgggattaagtcattcatcgcatacctgattccagacgtaccaaagggtctacatgaccgaatacgacgagagaagtacttagttcaagaaatgatgtatgaggctgaactggaacatttgcaacaacaacggagaaaaagtggtcagcctgttcaccatgaatggccttagttgacacctgttacccattaggggtgataacattaatgggaagaaatgatggcaactttgaatgctaggtgaaatctaggaggaaggcatacttggcaaaccacatgtataatatgctacttggaaatgtatcacagccatctctgggatttgaaatatccagacttgtagggaagaaaacaatgacttgacgaccttaaaaagggttagattgacattgcaggaagccaggatgtaattctcagaaccagtctcagggagatatatgcttggagaactctgccttccatcaactgcagtgtaatgggaaagagggtggtgaggttttgaaagacagatttccatgtaaatgtgcacaagccaggcatggcttaaaatatcatgcagtcttcactcacatactaatttgactttggaaagtatggttgagttcagatacttataagaaatgacttaaacaaatccttgccttggctgccagaactctacatcccttcagtttacaggttggtaggaattgcccatgtctcttgctgagattatggatctgtgccacaggggatttatgctgctttacattgactatgcagttgaagagttgcacatcacctttagtagtcaaaccaaaaatctaagattccaaaaagaacagcattcattgaaataatattccattgcattggctacttcaagtctcttttacccctggcagagccagttgcagtgcaattttttgtactaaatgccaataaagccacatacttataaactatgaatggctattcttatatagtttagaacacaactaatccatactttattgtggaaggctgttttatagtttatttaattttttctctatgatttattacaactctcacggaatattaacttgaaatgctgtaaatacgttggttttccttgtccctttgcaccttgacagtacgtagtatacattgtggtttatgcagctctgacaccagtttttgctattgtaatatgtttattcgggaaaactgaggccagatgctctgcaacacttacgctttttcaacaatgtgcactcttactcatgaactaatgaaaataatgcatgaatataaatctatattatttgctaaaaaaagaaaaaacatttgtgttttagtttcttttttcatgactgaagggagttttatgttattatttcttccatagttttgttttggtttatttttaacaacgctctagaaacaaagtcaaattaatcacaaaagacataattttgctttgttgtggaatttctatttcaacgtcaactctgtatctatgagtatgtctgttccacagacagatgaggcaggagtgatggggcactcaagaaagttcagaggaggcataagctatggaggttggaaaggaagaaagagaagagctgaagtaaatgtatggtagaaattaagacgtttctttgcaaaacaaggaaatcacacatatgcacacatacatatttatggttactatgattgttattatttgtccaatcaagcaaagcaccattatttctaacatataaaagaccagatcaaacacaatggaaataaagctactacatatatatgccagtatttctctagtaagattatgtttctcttactagaaaactattttctaaatattaacactgaaaatgttttgttagcttttccttctttctctccagaagaaacatggatagatgatagctgtttcattgtttgtttttgtcaagcatattcactttcctccttgtcctctgattctgagcaaagggcctcagactctgaacttccctcaagtgccgttgttatgtgaaactcttccattcagattccagagaggttctcatgctcccccccctccttatttgtagcaatcgtagcaactaattccactaagtacaagggagttttttacactcctccatttttatagcatctgcatttctttttctttgttaggtacatgtatacacctgcctgagtataaatactctctctacctaataataacatcaaccaacatcttttccaaattagggccacagaacagcaacatttgtctgacagtagtataaagaataatgatagctctatccttaagaagtatttcctttcctttttatatagtcccgttagggtttaaaaccatattgatcaactagaaagaaaaatatgaaaagagaaaaatattttaatttaaaaattgtaatacattgatttataaaatgccttctctgatacttttgaaacagatgtgaaaaacagaaaaagaaaaaattgtctgaaatgtttattttgcaaaacagtgcaatagaatctagttatgccttcatcactgttgacagtaaatactgacagccccttgcagtgtgttagttttagatcactctgttttagttgagagaaatgttttatatcatggtttttatatgaatacaaattatttctcaaagatttatagcacacactattctcaggaattctgtattacatgaatgctgcttatatattttcatattctaacttgtcttttcaagcaaataactaatatatatgtgcatgcagtctgccttgacaagttgttccaagctgaagagctttcactgtacaatgtgtggaaaatcaccatagatcatggctgaaatagtttgtaattgtctgagtctgtgcacgtacttttagataaaatgctgctgagtgactgcatgatgagatacaacttctgaatgctgcacattcttccaaaatgatccttagcacaatctattgtatgatggaatgaatagaaaactttttcactcaataaattattatttgatatggt

SEQ ID NO: 107929 - DNA, 3117 bp, Homo sapiens
  Payload ID: 1186
  Gene Symbol: ANO3
  Gene Name: anoctamin 3
  Uniprot ID: Q9BYT9
  ENST ID: ENST00000531568
  CDS Start-End: 234-2741
aaatgattattcaaactctggcatttagagagtaggctaaaaaccctccagtcaaatgctttgtgtagcactcagtatgtaacattctagttaatggaaaaagcaggcggtgaaagggagaactttcagttgtcacactgaagagtgctttaaagaagattgtcatttgagactgttgtcagcaatgaaggattccaaatgcagctgaactcagaattctgactgtgaatgacatgaattacatagcatccagtggacctctgttcaaagatggcaaaaagagaattgattacatcttggtttatagaaagacaaatatacaatatgataaaagaaacacatttgaaaagaacctcagagcagaaggcttgatgttggagaaggagccagctattgcaagccccgatatcatgtttattaaaattcacattccatgggacacgctgtgcaagtatgcagagaggctgaatatcaggatgcccttcaggaaaaaatgctattacactgacgggaggagcaaatcaatgggcaggatgcaaacttattttagaagaatcaaaaactggatggcccaaaacccaatggttcttgacaagtcagcttttccagacctagaggagtcagactgctatactggccccttcagccgtgcacggattcaccacttcataataaataataaagacaccttcttcagcaatgctactcgaagcagaatagtctatcacatgctggaacgcaccaaatatgaaaatggaatatcaaaagtgggtatccgtaaacttataaacaatggctcatacatagcagcgtttccaccacatgagggagcctacaaaagtagccagcccattaaaacccatggacctcagaataacagacatctattatatgagcgctgggcacgctggggaatgtggtataagcatcagcctctggatttaatcaggctatactttggtgagaagattggactatactttgcttggctgggatggtatactggaatgttgattcctgcagcaattgttggtttgtgcgttttcttctatggattatttacaatgaataatagtcaagtaagccaagaaatttgtaaagccactgaagtctttatgtgccctctctgtgacaagaactgctccctgcagagactcaacgacagctgtatctatgccaaggtgacatatttgttcgataatggagggacagtcttctttgctatttttatggcaatatgggccacagtcttcctggagttttggaaaaggagaaggagtatactgacctatacttgggaccttatcgaatgggaagaagaggaggaaacacttcgtccccagtttgaagccaagtattacaagatggagattgtaaatcccatcacgggaaaacctgaaccacatcagccttcctcagacaaagtcactcgtcttcttgtttctgtctcaggaatattcttcatgatatccttggtgatcactgcagtgtttggagttgtggtgtaccgcctggttgtcatggaacagtttgcatcattcaagtggaatttcatcaaacaatactggcagtttgcaacatctgctgctgctgtctgtatcaatttcataatcattatgttgctgaatcttgcttatgaaaaaattgcttacctcctcaccaatttagaatatcctcgaacagaatcagagtgggaaaacagcttcgccctgaagatgttcctcttccagtttgtcaatttaaacagttccatcttctatatcgctttctttttgggaagattcgtaggccacccaggaaaatacaataaactttttgaccggtggagactggaggaatgtcatcctagtggctgtttgatagacctctgcctccagatgggtgtcatcatgtttttgaagcaaatatggaacaacttcatggaactaggatacccgttgatccagaactggtggtcacgacataaaatcaagcggggaatacatgatgcttccatacctcagtgggaaaatgattggaatctgcagcccatgaaccttcatggactgatggatgagtacttagaaatggttttgcaatttggttttaccaccatctttgttgcggcttttcctctagcccctcttttggctttgttaaacaatatcattgaaatcaggctggatgcatacaaatttgtcactcaatggcggaggcctttgccagcccgagcaactgacataggtatctggcttggaattctcgaaggaatcggtatattggctgtgatcaccaatgcatttgtaattgctattacttctgattacatcccacgttttgtttatgaatacaaatatggcccctgtgcaaatcatgtagaaccaagtgaaaattgcttgaagggatatgtcaacaatagcctatccttctttgacctgagtgagcttggtatgggaaaatctggttattgcaggtacagagactacagaggcccgccctggagttccaaaccctatgagtttactttacaatactggcatatccttgctgctagattggccttcattattgtgtttgagcaccttgtttttgggattaagtcattcatcgcatacctgattccagacgtaccaaagggtctacatgaccgaatacgacgagagaagtacttagttcaagaaatgatgtatgaggctgaactggaacatttgcaacaacaacggagaaaaagtggtcagcctgttcaccatgaatggccttagttgacacctgttacccattaggggtgataacattaatgggaagaaatgatggcaactttgaatgctaggtgaaatctaggaggaaggcatacttggcaaaccacatgtataatatgctacttggaaatgtatcacagccatctctgggatttgaaatatccagacttgtagggaagaaaacaatgacttgacgaccttaaaaagggttagattgacattgcaggaagccaggatgtaattctcagaaccagtctcagggagatatatgcttggagaactctgccttccatcaactgcagtgtaatgggaaagagggtggtgaggttttgaaagacagatttccatgtaaatgtgcacaagccaggcatggcttaaa

SEQ ID NO: 107930 - DNA, 3257 bp, Homo sapiens
  Payload ID: 1186
  Gene Symbol: ANO3
  Gene Name: anoctamin 3
  ENST ID: ENST00000525139
  CDS Start-End: 124-3021
gagtttctgagcaatttttatttttctcttttgttctctctcacaggtctgcaaaagttgtgcttttctcatcgtgagcttgagaagagtgtgtgggctgccaaaggcaaatataatgaaggtatgaatataagcaagagtgagataacaaaagaaacttcgttaaaaccgtctcggagatccctgccttgcctcgcccagagctacgcttactcaaagagcttgagccagtctacttccctcttccagtcaaccgagagtgaatctcaggctcccacatctataaccttaatctccactgacaaagcagagcaagttaatactgaggagaataaaaacgactctgtgctgagatgttcatttgctgacctcagcgatttttgtttggccctaggaaaagataaggattacacggatgaatcagaacacgctacttatgaccgatctcgtctcattaatgactttgttatcaaagataaatctgaattcaagacaaaattatctaagaatgacatgaattacatagcatccagtggacctctgttcaaagatggcaaaaagagaattgattacatcttggtttatagaaagacaaatatacaatatgataaaagaaacacatttgaaaagaacctcagagcagaaggcttgatgttggagaaggagccagctattgcaagccccgatatcatgtttattaaaattcacattccatgggacacgctgtgcaagtatgcagagaggctgaatatcaggatgcccttcaggaaaaaatgctattacactgacgggaggagcaaatcaatgggcaggatgcaaacttattttagaagaatcaaaaactggatggcccaaaacccaatggttcttgacaagtcagcttttccagacctagaggagtcagactgctatactggccccttcagccgtgcacggattcaccacttcataataaataataaagacaccttcttcagcaatgctactcgaagcagaatagtctatcacatgctggaacgcaccaaatatgaaaatggaatatcaaaagtgggtatccgtaaacttataaacaatggctcatacatagcagcgtttccaccacatgagggagcctacaaaagtagccagcccattaaaacccatggacctcagaataacagacatctattatatgagcgctgggcacgctggggaatgtggtataagcatcagcctctggatttaatcaggctatactttggtgagaagattggactatactttgcttggctgggatggtatactggaatgttgattcctgcagcaattgttggtttgtgcgttttcttctatggattatttacaatgaataatagtcaagtaagccaagaaatttgtaaagccactgaagtctttatgtgccctctctgtgacaagaactgctccctgcagagactcaacgacagctgtatctatgccaaggtgacatatttgttcgataatggagggacagtcttctttgctatttttatggcaatatgggccacagtcttcctggagttttggaaaaggagaaggagtatactgacctatacttgggaccttatcgaatgggaagaagaggaggaaacacttcgtccccagtttgaagccaagtattacaagatggagattgtaaatcccatcacgggaaaacctgaaccacatcagccttcctcagacaaagtcactcgtcttcttgtttctgtctcaggaatattcttcatgatatccttggtgatcactgcagtgtttggagttgtggtgtaccgcctggttgtcatggaacagtttgcatcattcaagtggaatttcatcaaacaatactggcagtttgcaacatctgctgctgctgtctgtatcaatttcataatcattatgttgctgaatcttgcttatgaaaaaattgcttacctcctcaccaatttagaatatcctcgaacagaatcagagtgggaaaacagcttcgccctgaagatgttcctcttccagtttgtcaatttaaacagttccatcttctatatcgctttctttttgggaagattcgtaggccacccaggaaaatacaataaactttttgaccggtggagactggaggaatgtcatcctagtggctgtttgatagacctctgcctccagatgggtgtcatcatgtttttgaagcaaatatggaacaacttcatggaactaggatacccgttgatccagaactggtggtcacgacataaaatcaagcggggaatacatgatgcttccatacctcagtgggaaaatgattggaatctgcagcccatgaaccttcatggactgatggatgagtacttagaaatggttttgcaatttggttttaccaccatctttgttgcggcttttcctctagcccctcttttggctttgttaaacaatatcattgaaatcaggctggatgcatacaaatttgtcactcaatggcggaggcctttgccagcccgagcaactgacataggtatctggcttggaattctcgaaggaatcggtatattggctgtgatcaccaatgcatttgtaattgctattacttctgattacatcccacgttttgtttatgaatacaaatatggcccctgtgcaaatcatgtagaaccaagtgaaaattgcttgaagggatatgtcaacaatagcctatccttctttgacctgagtgagcttggtatgggaaaatctggttattgcaggtacagagactacagaggcccgccctggagttccaaaccctatgagtttactttacaatactggcatatccttgctgctagattggccttcattattgtgtttgagcaccttgtttttgggattaagtcattcatcgcatacctgattccagacgtaccaaagggtctacatgaccgaatacgacgagagaagtacttagttcaagaaatgatgtatgaggctgaactggaacatttgcaacaacaacggagaaaaagtggtcagcctgttcaccatgaatggccttagttgacacctgttacccattaggggtgataacattaatgggaagaaatgatggcaactttgaatgctaggtgaaatctaggaggaaggcatacttggcaaaccacatgtataatatgctacttggaaatgtatcacagccatctctgggatttgaaatatccagacttgtagggaagaaaacaatgacttgacgaccttaaaaagggttagattgacattgcaggaagccaggatgt

SEQ ID NO: 107931 - DNA, 1264 bp, Homo sapiens
  Payload ID: 1186
  Gene Symbol: ANO3
  Gene Name: anoctamin 3
  ENST ID: ENST00000531646
  CDS Start-End: 156-776
gcgtagcctggagagcgaagtgccggctacagcaggtgtcggattgcagtgcgctcgctgaggctccggaccttggagcgtctagagtctggctactgttcctccgcctccctctcgggcagctccctaagccggctgggacgcgcagagtgaaaatggtccaccattcaggctccattcagtcctttaaacagcaaaaaggtatgaatataagcaagagtgagataacaaaagaaacttcgttaaaaccgtctcggagatccctgccttgcctcgcccagagctacgcttactcaaagagcttgagccagtctacttccctcttccagtcaaccgagagtgaatctcaggctcccacatctataaccttaatctccactgacaaagcagagcaagttaatactgaggagaataaaaacgactctgtgctgagatgttcatttgctgacctcagcgatttttgtttggccctaggaaaagataaggattacacggatgaatcagaacacgctacttatgaccgatctcgtctcattaatgactttgttatcaaagataaatctgaattcaagacaaaattatctaagaatgacatgaattacatagcatccagtggacctctgttcaaagatggcaaaaagagaattgattacatcttggtttatagaaagacaaatatacaatatgataaaagaaacacatttgaaaagaacctcagagcagaaggcttgatgttggagaaggaggtaggtgctttactattattagttatgtgataaaatgtgttggaacagatataatcacttatggtttagaaagaaaaatatgtatcacatgactttataaaatacatagtttttttctaacaaatgttaaataaatacatgcacatagccctattaaatatgtattcactttttaatctatataattctgtacaatttaagtattttcaaagggcatgactatttttgcaattttaaaaactgaataaggaatgattatagttatgtcaagtagaaaactttatgaaaaggaaaataacattttgaaagaaaagaatttgccaaacgattaatgtctgttttttagtgctggaactatgagtggttttcttcccaaatctttttcttttgtgagtttttaaaaaaatgttcttggaagaatttattttttgtagtgaaacaataaaagtagcaagactcactagaaaaaaaatagaaagaaggaaaagcgtatcctccataatcctagtatcagagaa

SEQ ID NO: 107932 - DNA, 3509 bp, Homo sapiens
  Payload ID: 1187
  Gene Symbol: ANO4
  Gene Name: anoctamin 4
  Uniprot ID: Q32M45
  ENST ID: ENST00000392977
  CDS Start-End: 211-3078
tttctgccgaagacaccaaggcactgaggaaggatcccttctccttctgttgactctttctatttttatggtttaagtttatctattcatggggctgaaaagcgtttgcaaatccatcaacggcgaagtgtggcaagccgcccagcgtcacgtcgtcgcctgcctgtggtcaggcattcctcactcccaccaggcagaaggtcaataaaaatggaggcaagctcttctggaatcactaatggaaaaaccaaagtcttccacccagaaggaggtgtggatttgcaaggctaccagctggatatgcaaatactacctgacgggccaaagagtgatgtggacttttcagagattcttaatgcaatacaagaaatggccaaggatgtcaatattctttttgatgaattagaagctgtcagcagtccttgcaaagatgacgattctcttcttcaccctggaaacctgactagtacttcagatgatgccagcagattggaagccgggggagagacagtgccagaaagaaacaaatcaaatggactttactttcgagatggaaagtgtcgaattgactacatccttgtgtacagaaaatccaacccccagactgaaaagagagaagtatttgaaagaaacattagagcagaaggattgcaaatggagaaagagtcctctctaataaatagtgacattatctttgtgaagttgcatgccccatgggaagtccttggaagatatgcagaacaaatgaatgtaagaatgcctttcaggagaaaaatctattacctgccccgccgttacaagttcatgagcaggatcgataaacaaataagcaggtttcggagatggttacctaagaagccaatgaggctggacaaggagacactgccagacctggaggagaatgactgctacactgcccctttcagccagcaaaggatccatcacttcatcatacacaacaaagaaacgttcttcaacaatgccacaagaagtagaatcgtgcatcacattttacaaagaataaaatatgaagaaggaaaaaacaagattggtctgaatcgtttgcttaccaatggctcctatgaagctgcgtttcccctgcatgagggaagttatagaagtaaaaactccattcgaacccatggagcagaaaaccaccgacatctactctatgagtgctgggcctcctggggcgtgtggtataaataccaacctttggatcttgtaaggcggtactttggagagaagattgggttatattttgcctggttgggctggtacaccggcatgctcttcccagctgccttcattggattgtttgtctttttgtatggcgtcaccactctggatcacagccaagtcagtaaagaagtctgccaagctacagatatcatcatgtgtcctgtgtgtgataaatactgtccattcatgaggctgtcagacagctgtgtatatgccaaggtaacccacctttttgacaatggagccactgtcttctttgctgttttcatggcagtctgggcaacagttttcctggagttttggaaaagacggcgagcagtaattgcttatgactgggatttgatagactgggaagaagaggaggaagaaatacgaccccagtttgaagccaagtattccaagaaagagcggatgaatccaatttctggaaagccagaaccttatcaagcatttacagataaatgcagcagacttatcgtttctgcatctggaatattttttatgatctgcgtggtgattgctgccgtgttcgggatcgtcatttaccgggtggtgactgtcagcactttcgctgcctttaagtgggcgttaatcaggaataactctcaggttgcaaccacagggactgctgtgtgcatcaacttctgtatcattatgttgctgaatgtgctctatgaaaaagttgccctgcttctgacgaatttagaacagcctcgcacagagtctgagtgggagaacagcttcaccctgaaaatgtttctttttcagtttgtcaatctgaacagctccacattttacatcgcattcttcctcggaagatttacaggacacccaggtgcctacttgaggctgataaacaggtggagactagaagagtgccaccctagtggatgccttattgatctgtgtatgcaaatgggtattataatggtgctaaagcagacctggaataatttcatggaacttggctacccgttaattcagaattggtggactagaagaaaagtacgacaagaacatggacctgaaaggaaaataagtttcccacaatgggaaaaggactataaccttcagccgatgaatgcctatggactcttcgatgaatacttagaaatgattcttcagtttggattcacaactatctttgtggcagcttttcccctagcaccacttctggccttactgaataacataattgaaattcgacttgatgcttacaaatttgtcacacagtggaggagacctttagcttcaagggccaaagacataggaatttggtatggaattcttgaaggcattggaattctctctgttatcacaaatgcatttgtcatagcgataacatctgactttatccctcgcttggtgtatgcttataagtatggaccttgtgcaggccaaggagaagctgggcaaaagtgcatggttggctatgtgaatgccagcttgtctgtatttcgaatttctgactttgagaaccgatctgagcctgaatctgatggcagtgagttctcggggactcctcttaagtactgcagataccgggactaccgtgacccgcctcattcactggtgccctatggctacacactgcagttttggcatgtcctagctgctcgattagcttttatcattgtctttgagcacctcgtgttttgtataaagcacctcatttcatatctgatcccagacctcccaaaagacctaagggatcgaatgagaagagagaagtacttgattcaggagatgatgtatgaagcagaactggaacgtctccagaaggaacgaaaggagaggaagaagaatggaaaagcacaccacaacgagtggccgtgaccataaaatagtccctttccaggccaaggacctgaattctgtttacttcttctggctgtgcaaaagcacactcaagtgaatgactaaaaatgcaaccacagtgcatgttgcagataccggcggccgcaggaggggcagcatccagtagaggactggcgttggagtcacactgctgtgaaatcacgttgcagtccagcgcacaattgctatctatccatagaccattcttgaccaagcaagcatgcacattatgggcagttacattctcaagtttttaaaatcaaggggaacttgtatactgggcctgtttttcagcctgtttgctaccttttttgcattctatcccatgtgaattttacagacactgggctaaaaagggtattcagacacatggacacacattcctagaatgtcatcatatggtcctaatt

SEQ ID NO: 107933 - DNA, 3909 bp, Homo sapiens
  Payload ID: 1187
  Gene Symbol: ANO4
  Gene Name: anoctamin 4
  Uniprot ID: Q32M45
  ENST ID: ENST00000392979
  CDS Start-End: 362-3124
ctgttccagacttctcagggtttttacagcacaaacaactgcatacggcccgaggggaggctgaaaaggacttgtgtgtggtggttttattgcctgtcatcactttgctggcctcctcccgactggagcctggaggttcacagtggatttctttctgccgaagacaccaaggcactgaggaaggatcccttctccttctgttgactctttctatttttatggtttaagtttatctattcatggggctgaaaagcgtttgcaaatccatcaacggcgaagtgtggcaagccgcccagcgtcacgtcgtcgcctgcctgtggtcaggcattcctcactcccaccaggcagaaggtcaataaaaatggaggcaagctcttctggaatcactaatggaaaaaccaaagtcttccacccagtggccaaggatgtcaatattctttttgatgaattagaagctgtcagcagtccttgcaaagatgacgattctcttcttcaccctggaaacctgactagtacttcagatgatgccagcagattggaagccgggggagagacagtgccagaaagaaacaaatcaaatggactttactttcgagatggaaagtgtcgaattgactacatccttgtgtacagaaaatccaacccccagactgaaaagagagaagtatttgaaagaaacattagagcagaaggattgcaaatggagaaagagtcctctctaataaatagtgacattatctttgtgaagttgcatgccccatgggaagtccttggaagatatgcagaacaaatgaatgtaagaatgcctttcaggagaaaaatctattacctgccccgccgttacaagttcatgagcaggatcgataaacaaataagcaggtttcggagatggttacctaagaagccaatgaggctggacaaggagacactgccagacctggaggagaatgactgctacactgcccctttcagccagcaaaggatccatcacttcatcatacacaacaaagaaacgttcttcaacaatgccacaagaagtagaatcgtgcatcacattttacaaagaataaaatatgaagaaggaaaaaacaagattggtctgaatcgtttgcttaccaatggctcctatgaagctgcgtttcccctgcatgagggaagttatagaagtaaaaactccattcgaacccatggagcagaaaaccaccgacatctactctatgagtgctgggcctcctggggcgtgtggtataaataccaacctttggatcttgtaaggcggtactttggagagaagattgggttatattttgcctggttgggctggtacaccggcatgctcttcccagctgccttcattggattgtttgtctttttgtatggcgtcaccactctggatcacagccaagtcagtaaagaagtctgccaagctacagatatcatcatgtgtcctgtgtgtgataaatactgtccattcatgaggctgtcagacagctgtgtatatgccaaggtaacccacctttttgacaatggagccactgtcttctttgctgttttcatggcagtctgggcaacagttttcctggagttttggaaaagacggcgagcagtaattgcttatgactgggatttgatagactgggaagaagaggaggaagaaatacgaccccagtttgaagccaagtattccaagaaagagcggatgaatccaatttctggaaagccagaaccttatcaagcatttacagataaatgcagcagacttatcgtttctgcatctggaatattttttatgatctgcgtggtgattgctgccgtgttcgggatcgtcatttaccgggtggtgactgtcagcactttcgctgcctttaagtgggcgttaatcaggaataactctcaggttgcaaccacagggactgctgtgtgcatcaacttctgtatcattatgttgctgaatgtgctctatgaaaaagttgccctgcttctgacgaatttagaacagcctcgcacagagtctgagtgggagaacagcttcaccctgaaaatgtttctttttcagtttgtcaatctgaacagctccacattttacatcgcattcttcctcggaagatttacaggacacccaggtgcctacttgaggctgataaacaggtggagactagaagagtgccaccctagtggatgccttattgatctgtgtatgcaaatgggtattataatggtgctaaagcagacctggaataatttcatggaacttggctacccgttaattcagaattggtggactagaagaaaagtacgacaagaacatggacctgaaaggaaaataagtttcccacaatgggaaaaggactataaccttcagccgatgaatgcctatggactcttcgatgaatacttagaaatgattcttcagtttggattcacaactatctttgtggcagcttttcccctagcaccacttctggccttactgaataacataattgaaattcgacttgatgcttacaaatttgtcacacagtggaggagacctttagcttcaagggccaaagacataggaatttggtatggaattcttgaaggcattggaattctctctgttatcacaaatgcatttgtcatagcgataacatctgactttatccctcgcttggtgtatgcttataagtatggaccttgtgcaggccaaggagaagctgggcaaaagtgcatggttggctatgtgaatgccagcttgtctgtatttcgaatttctgactttgagaaccgatctgagcctgaatctgatggcagtgagttctcggggactcctcttaagtactgcagataccgggactaccgtgacccgcctcattcactggtgccctatggctacacactgcagttttggcatgtcctagctgctcgattagcttttatcattgtctttgagcacctcgtgttttgtataaagcacctcatttcatatctgatcccagacctcccaaaagacctaagggatcgaatgagaagagagaagtacttgattcaggagatgatgtatgaagcagaactggaacgtctccagaaggaacgaaaggagaggaagaagaatggaaaagcacaccacaacgagtggccgtgaccataaaatagtccctttccaggccaaggacctgaattctgtttacttcttctggctgtgcaaaagcacactcaagtgaatgactaaaaatgcaaccacagtgcatgttgcagataccggcggccgcaggaggggcagcatccagtagaggactggcgttggagtcacactgctgtgaaatcacgttgcagtccagcgcacaattgctatctatccatagaccattcttgaccaagcaagcatgcacattatgggcagttacattctcaagtttttaaaatcaaggggaacttgtatactgggcctgtttttcagcctgtttgctaccttttttgcattctatcccatgtgaattttacagacactgggctaaaaagggtattcagacacatggacacacattcctagaatgtcatcatatggtcctaattccatgtcaccaacaacacagacaagaccctgtttacaactttttctttccttttttttaattttagacctttctgagaagattattatatatgacatatctatagctatgtgtatggccatagatgtatttctgtgtgtacatatgtatagtcatgtattcctgcatatgtacatacaaatacagagatatataaagtacatagaaattccttacttgtaaatagccaaaaagtactgacatgagtgaattttcacatttaaatagtcatcaatatgaagccatgattaatgcttgtataatgtgatgcaataaaatttaaaataaatttctgcacatggaatattttcagctg

SEQ ID NO: 107934 - DNA, 571 bp, Homo sapiens
  Payload ID: 1187
  Gene Symbol: ANO4
  Gene Name: anoctamin 4
  ENST ID: ENST00000546991
  CDS Start-End: 539-571
tttcactccggctcgctctccggagagtcctgttccagacttctcagggtttttacagcacaaacaactgcatacggcccgaggggaggctgaaaaggacttgtgtgtggtggttttattgcctgtcatcactttgctggcctcctcccgactggagcctggaggttcacagtggatttctttctgccgaagacaccaaggcactgaggaaggatcccttctccttctgttgactctttctatttttatggctccagctcattcctggctttagttgaacttttctgacattcttcatatagcatgcagtccagtggaccttcttctgctgagagcagtattgctggccaggctgtctgggttcaaagctaggctgtgcctcataaacatgacctttggtttaagtttatctattcatggggctgaaaagcgtttgcaaatccatcaacggcgaagtgtggcaagccgcccagcgtcacgtcgtcgcctgcctgtggtcaggcattcctcactcccaccaggcagaaggtcaataaaaatggaggcaagctcttctggaatcactaatgga

SEQ ID NO: 107935 - DNA, 1385 bp, Homo sapiens
  Payload ID: 1187
  Gene Symbol: ANO4
  Gene Name: anoctamin 4
  ENST ID: ENST00000549155
  CDS Start-End: 499-1071
atggcctccctcaccgcatacgacaaagatgtgagcagcggaagttataacctttcctctgcaacgacgggcagctactacagttgtgtcagccagatcaccataggttatgacgttgcggggcctgtggcaattgggcttacccactggaaaaatccatacgtacaaggcagaccaaccctcccatcagatctgcctctcttcgtctccaaagatgcaggcatccctgtgtaccaccgatccttcacccgcaagactgaccaggccacacctttgtcctgtccagcctcactgtctatcactccagtgccttcttacagcagtagcagccaggaaaccctgagtcaagacacaacaggtttaagtttatctattcatggggctgaaaagcgtttgcaaatccatcaacggcgaagtgtggcaagccgcccagcgtcacgtcgtcgcctgcctgtggtcaggcattcctcactcccaccaggcagaaggtcaataaaaatggaggcaagctcttctggaatcactaatggaaaaaccaaagtcttccacccagaaggaggtgtggatttgcaaggctaccagctggatatgcaaatactacctgacgggccaaagagtgatgtggacttttcagagattcttaatgcaatacaagaaatggccaaggatgtcaatattctttttgatgaattagaagctgtcagcagtccttgcaaagatgacgattctcttcttcaccctggaaacctgactagtacttcagatgatgccagcagattggaagccgggggagagacagtgccagaaagaaacaaatcaaatggactttactttcgagatggaaagtgtcgaattgactacatccttgtgtacagaaaatccaacccccagactgaaaagagagaagtatttgaaagaaacattagagcagaaggattgcaaatggagaaagagtcctctctaataaatagtgacattatctttgtgaagttgcatgccccatgggaagtccttggaagatatgcagaacaaatgaatgtaagaatgcctttcagttcaaactgtaactgacgatgggttttcttctcgactggcttcatttttgctgttcttccaggagaaaaatctattacctgccccgccgttacaagttcatgagcaggatcgataaacaaataagcaggtttcggagatggttacctaagaagccaatgaggctggacaaggagacactgccagacctggaggagaatgactgctacactgcccctttcagccagcaaaggatccatcacttcatcatacacaacaaagaaacgttcttcaacaatgccacaagaagtagaatcgtgcatcacattttacaaagaataaaatatgaagaa

SEQ ID NO: 107936 - DNA, 2293 bp, Homo sapiens
  Payload ID: 1187
  Gene Symbol: ANO4
  Gene Name: anoctamin 4
  Uniprot ID: Q32M45
  ENST ID: ENST00000550015
  CDS Start-End: 95-1522
aacaataccttcctggtcctaaatataactatatccatacacatatgtaacccacctttttgacaatggagccactgtcttctttgctgttttcatggcagtctgggcaacagttttcctggagttttggaaaagacggcgagcagtaattgcttatgactgggatttgatagactgggaagaagaggagatctgcgtggtgattgctgccgtgttcgggatcgtcatttaccgggtggtgactgtcagcactttcgctgcctttaagtgggcgttaatcaggaataactctcaggttgcaaccacagggactgctgtgtgcatcaacttctgtatcattatgttgctgaatgtgctctatgaaaaagttgccctgcttctgacgaatttagaacagcctcgcacagagtctgagtgggagaacagcttcaccctgaaaatgtttctttttcagtttgtcaatctgaacagctccacattttacatcgcattcttcctcggaagatttacaggacacccaggtgcctacttgaggctgataaacaggtggagactagaagagtgccaccctagtggatgccttattgatctgtgtatgcaaatgggtattataatggtgctaaagcagacctggaataatttcatggaacttggctacccgttaattcagaattggtggactagaagaaaagtacgacaagaacatggacctgaaaggaaaataagtttcccacaatgggaaaaggactataaccttcagccgatgaatgcctatggactcttcgatgaatacttagaaatgattcttcagtttggattcacaactatctttgtggcagcttttcccctagcaccacttctggccttactgaataacataattgaaattcgacttgatgcttacaaatttgtcacacagtggaggagacctttagcttcaagggccaaagacataggaatttggtatggaattcttgaaggcattggaattctctctgttatcacaaatgcatttgtcatagcgataacatctgactttatccctcgcttggtgtatgcttataagtatggaccttgtgcaggccaaggagaagctgggcaaaagtgcatggttggctatgtgaatgccagcttgtctgtatttcgaatttctgactttgagaaccgatctgagcctgaatctgatggcagtgagttctcggggactcctcttaagtactgcagataccgggactaccgtgacccgcctcattcactggtgccctatggctacacactgcagttttggcatgtcctagctgctcgattagcttttatcattgtctttgagcacctcgtgttttgtataaagcacctcatttcatatctgatcccagacctcccaaaagacctaagggatcgaatgagaagagagaagtacttgattcaggagatgatgtatgaagcagaactggaacgtctccagaaggaacgaaaggagaggaagaagaatggaaaagcacaccacaacgagtggccgtgaccataaaatagtccctttccaggccaaggacctgaattctgtttacttcttctggctgtgcaaaagcacactcaagtgaatgactaaaaatgcaaccacagtgcatgttgcagataccggcggccgcaggaggggcagcatccagtagaggactggcgttggagtcacactgctgtgaaatcacgttgcagtccagcgcacaattgctatctatccatagaccattcttgaccaagcaagcatgcacattatgggcagttacattctcaagtttttaaaatcaaggggaacttgtatactgggcctgtttttcagcctgtttgctaccttttttgcattctatcccatgtgaattttacagacactgggctaaaaagggtattcagacacatggacacacattcctagaatgtcatcatatggtcctaattccatgtcaccaacaacacagacaagaccctgtttacaactttttctttccttttttttaattttagacctttctgagaagattattatatatgacatatctatagctatgtgtatggccatagatgtatttctgtgtgtacatatgtatagtcatgtattcctgcatatgtacatacaaatacagagatatataaagtacatagaaattccttacttgtaaatagccaaaaagtactgacatgagtgaattttcacatttaaatagtcatcaatatgaagccatgattaatgcttgtataatgtgatgcaataaaatttaaaataaatttctgcacatgg

SEQ ID NO: 107937 - DNA, 961 bp, Homo sapiens
  Payload ID: 1187
  Gene Symbol: ANO4
  Gene Name: anoctamin 4
  Uniprot ID: Q32M45
  ENST ID: ENST00000573650
  CDS Start-End: 1-530
tctctgttatcacaaatgcatttgtcatagcgataacatctgactttatccctcgcttggtgtatgcttataagtatggaccttgtgcaggccaaggagaagctgggcaaaagtgcatggttggctatgtgaatgccagcttgtctgtatttcgaatttctgactttgagaaccgatctgagcctgaatctgatggcagtgagttctcggggactcctcttaagtactgcagataccgggactaccgtgacccgcctcattcactggtgccctatggctacacactgcagttttggcatgtcctagctgctcgattagcttttatcattgtctttgagcacctcgtgttttgtataaagcacctcatttcatatctgatcccagacctcccaaaagacctaagggatcgaatgagaagagagaagtacttgattcaggagatgatgtatgaagcagaactggaacgtctccagaaggaacgaaaggagaggaagaagaatggaaaagcacaccacaacgagtggccgtgaccataaaatagtccctttccaggccaaggacctgaattctgtttacttcttctggctgtgcaaaagcacactcaagtgaatgactaaaaatgcaaccacagtgcatgttgcagataccggcggccgcaggaggggcagcatccagtagaggactggcgttggagtcacactgctgtgaaatcacgttgcagtccagcgcacaattgctatctatccatagaccattcttgaccaagcaagcatgcacattatgggcagttacattctcaagtttttaaaatcaaggggaacttgtatactgggcctgtttttcagcctgtttgctaccttttttgcattctatcccatgtgaattttacagacactgggctaaaaagggtattcagacacatggacacacattcctagaatgtcatcatatggtcctaatt

SEQ ID NO: 107938 - DNA, 1301 bp, Homo sapiens
  Payload ID: 1187
  Gene Symbol: ANO4
  Gene Name: anoctamin 4
  Uniprot ID: Q32M45
  ENST ID: ENST00000575847
  CDS Start-End: 1-530
tctctgttatcacaaatgcatttgtcatagcgataacatctgactttatccctcgcttggtgtatgcttataagtatggaccttgtgcaggccaaggagaagctgggcaaaagtgcatggttggctatgtgaatgccagcttgtctgtatttcgaatttctgactttgagaaccgatctgagcctgaatctgatggcagtgagttctcggggactcctcttaagtactgcagataccgggactaccgtgacccgcctcattcactggtgccctatggctacacactgcagttttggcatgtcctagctgctcgattagcttttatcattgtctttgagcacctcgtgttttgtataaagcacctcatttcatatctgatcccagacctcccaaaagacctaagggatcgaatgagaagagagaagtacttgattcaggagatgatgtatgaagcagaactggaacgtctccagaaggaacgaaaggagaggaagaagaatggaaaagcacaccacaacgagtggccgtgaccataaaatagtccctttccaggccaaggacctgaattctgtttacttcttctggctgtgcaaaagcacactcaagtgaatgactaaaaatgcaaccacagtgcatgttgcagataccggcggccgcaggaggggcagcatccagtagaggactggcgttggagtcacactgctgtgaaatcacgttgcagtccagcgcacaattgctatctatccatagaccattcttgaccaagcaagcatgcacattatgggcagttacattctcaagtttttaaaatcaaggggaacttgtatactgggcctgtttttcagcctgtttgctaccttttttgcattctatcccatgtgaattttacagacactgggctaaaaagggtattcagacacatggacacacattcctagaatgtcatcatatggtcctaattccatgtcaccaacaacacagacaagaccctgtttacaactttttctttccttttttttaattttagacctttctgagaagattattatatatgacatatctatagctatgtgtatggccatagatgtatttctgtgtgtacatatgtatagtcatgtattcctgcatatgtacatacaaatacagagatatataaagtacatagaaattccttacttgtaaatagccaaaaagtactgacatgagtgaattttcacatttaaatagtcatcaatatgaagccatgattaatgcttgtataatgtgatgcaataaaatttaaaataaatttctgcacatgg

SEQ ID NO: 107939 - DNA, 1315 bp, Homo sapiens
  Payload ID: 1187
  Gene Symbol: ANO4
  Gene Name: anoctamin 4
  Uniprot ID: Q32M45
  ENST ID: ENST00000570509
  CDS Start-End: 1-530
tctctgttatcacaaatgcatttgtcatagcgataacatctgactttatccctcgcttggtgtatgcttataagtatggaccttgtgcaggccaaggagaagctgggcaaaagtgcatggttggctatgtgaatgccagcttgtctgtatttcgaatttctgactttgagaaccgatctgagcctgaatctgatggcagtgagttctcggggactcctcttaagtactgcagataccgggactaccgtgacccgcctcattcactggtgccctatggctacacactgcagttttggcatgtcctagctgctcgattagcttttatcattgtctttgagcacctcgtgttttgtataaagcacctcatttcatatctgatcccagacctcccaaaagacctaagggatcgaatgagaagagagaagtacttgattcaggagatgatgtatgaagcagaactggaacgtctccagaaggaacgaaaggagaggaagaagaatggaaaagcacaccacaacgagtggccgtgaccataaaatagtccctttccaggccaaggacctgaattctgtttacttcttctggctgtgcaaaagcacactcaagtgaatgactaaaaatgcaaccacagtgcatgttgcagataccggcggccgcaggaggggcagcatccagtagaggactggcgttggagtcacactgctgtgaaatcacgttgcagtccagcgcacaattgctatctatccatagaccattcttgaccaagcaagcatgcacattatgggcagttacattctcaagtttttaaaatcaaggggaacttgtatactgggcctgtttttcagcctgtttgctaccttttttgcattctatcccatgtgaattttacagacactgggctaaaaagggtattcagacacatggacacacattcctagaatgtcatcatatggtcctaattccatgtcaccaacaacacagacaagaccctgtttacaactttttctttccttttttttaattttagacctttctgagaagattattatatatgacatatctatagctatgtgtatggccatagatgtatttctgtgtgtacatatgtatagtcatgtattcctgcatatgtacatacaaatacagagatatataaagtacatagaaattccttacttgtaaatagccaaaaagtactgacatgagtgaattttcacatttaaatagtcatcaatatgaagccatgattaatgcttgtataatgtgatgcaataaaatttaaaataaatttctgcacatggaatattttcagctg

SEQ ID NO: 107940 - DNA, 6651 bp, Homo sapiens
  Payload ID: 1188
  Gene Symbol: ANO5
  Gene Name: anoctamin 5
  Uniprot ID: Q75V66
  ENST ID: ENST00000324559
  CDS Start-End: 318-3059
agagcgcccaggagcgctaccggctgagggtggggaagcgcagggccaagcgcgcgaagcaggttgtgggggaccgggtcgagtggaagtacccgccggagaggaaggccggctggctgtggcgcccagagacggtggagtccgaggaggaggagaaggaggcctgcagaaggaagagcaggcccttagaagtccagcagcagcaactccggcggcccacagtcagattcagcacctgcctcagatctccacgtctgtctcagctgcccctctcctgctgcctctcaggcaccagtgccattaacgagctggcgaagatgggcgacccggatctcctggaagtgttggcggaggaaggggaaaaagtcaataagcatatagactactctttccaaatgagtgagcagagcctgagcagcagagagaccagctttctcatcaatgaagaaacaatgcctgcaaagcgattcaatttgttcctgaggcggcggcttatgtttcaaaaaaatcagcaaagcaaagattctatcttcttccgagatgggattaggcaaattgattttgtgctttcctacgttgatgatgtaaagaaagacgcagagttaaaggcggaaagaagaaaagagtttgaaactaatctcagaaaaacaggtcttgagttggaaatagaagacaaaagggactcggaagatggaagaacttattttgtcaagatccatgccccttgggaggtattagttacctatgctgaagtcttgggaatcaaaatgcctattaaggagagtgatattccccgccctaagcacactcctataagctatgtgcttggacctgtaagactcccactgagtgtgaagtatccccatcctgaatattttactgcacaattcagcagacatcggcaggagctcttcctcatcgaagatcaggcaaccttctttccatcctcatcaagaaacagaattgtgtactatattctctcaagatgtccttttggcatagaagatgggaagaaaaggtttgggattgaaagactgctaaactctaacacttactcatctgcctatccactccatgatggccaatattggaagccatcagaacctcccaatcctaccaatgaaagatacacacttcaccagaattgggctcgattttcctatttctacaaggagcagcctttagacttgattaagaattattatggagaaaaaattggtatctattttgtctttcttggattttacacagaaatgctattctttgcagctgtagttggcttagcttgttttatttatggcttattatcaatggaacataacacaagcagcactgaaatctgtgaccctgagattggtggtcagatgatcatgtgcccactctgtgatcaagtgtgtgattattggagactaaatagtacgtgtttggcttcaaagttctcccatttgtttgataatgagtcaacagtgttctttgcaatattcatgggaatttgggtcaccttatttttggagttttggaaacaacgacaagccagactggaatatgaatgggacctggtggactttgaagaggaacagcagcagcttcagctgagaccagaatttgaagctatgtgtaaacacaggaaattgaatgcagtgactaaggagatggaaccttacatgcctctatacacgcgtattccatggtactttctttcaggagccacagtgacattatggatgtctcttgtcgtcaccagtatggtagctgtaattgtgtaccgcctgtcagtctttgctacatttgctagtttcatggaaagtgatgcatccttaaagcaggtcaaaagcttccttactcctcagataaccacatcactcacaggatcatgcttgaactttattgtcatcttgatcttgaatttcttttatgaaaagatatctgcctggatcacaaaaatggaaattcctcgaacataccaggagtatgagagcagtcttaccttgaaaatgttcctgtttcagtttgtaaatttttactcatcctgcttctacgtagctttctttaaagggaagttcgtaggctatcctggaaaatacacatatttatttaatgagtggagaagtgaagagtgtgatcctggaggctgtcttatagaattgacaacccaattgaccattataatgaccgggaaacagatttttggaaacattaaagaagccatttatcccttggctttgaattggtggagacgccgaaaagctcggacaaactctgagaagctgtatagtcgatgggagcaggatcatgaccttgaaagttttggaccccttgggcttttctatgagtacttagaaacagttactcaatttggatttgttacactatttgtggcctcttttcctttggctcctcttcttgctctcataaataatattgtagagattcgagtggatgcctggaaacttaccactcaatacaggagaactgtagcttctaaagctcatagcataggtgtttggcaagacattctttatggaatggctgtcctttctgttgcaactaatgcctttattgttgcatttacgtcagacatcattccccgtctagtttactactatgcttactcaacaaatgccacacagcctatgacaggatatgtgaataatagcctgtcagtattcctgatagctgattttccaaaccacactgcaccttcggaaaaacgagacttcatcacttgcaggtacagagattacagatatcctcctgatgacgagaataaatattttcataatatgcaattctggcatgtccttgctgccaagatgaccttcatcattgttatggaacatgttgtgtttttagttaaatttttgctggcctggatgatacctgatgttccaaaagatgttgtggagagaatcaagagagaaaagttaatgactatcaagattctccatgattttgagctcaacaaattaaaagagaacttgggaattaattctaatgaatttgccaagcatgtcatgattgaggaaaacaaagcacagctggctaaatcaacactctaatcagtatagtgaggaagcagcaggtgatctgccttacttcactttatcctctggttttagggccagacgccagaagccatgtgtcaattttaccctttcttttttttttttttctttttttttttaaactcaaagtttttatacacttttatagaggccaactttgtgatgttggaaatgtactacttctctgcttcattgactgggccctctccagatgttgttttctgaggtgctgtaaatgactgttgaaagtgcaggtagaatcagaatactgggaaattatggagtcttgcagtttagtaagaaacactggccttgggctgtcccatcactttccagtgcatctatttatttttgtggtcttctcttgggttatttgatacctccttccccattaagaaaaatgttggggcaaaaagaaatggatcaaagagactgactgagccctatatatcctatcattttaaaatatgcaaatgaattgccaagatcagatgacataagaaaactcacacattaaggtgttaatgtatcatagcagaggtttattcctaacacattcaactaccatcagaatcccagatagttcttcctggtaaaggcagaattccttttctcgagactgaaattttgggtttcaacataaaacaacttggttcttagagataataatttggttataatagtttcaagactgatcttatctggaaagcaacattatgaagctgttagattgcttcaggttctcaagcaaagacacaatacagaagtaaatgtgttttcttagtagttaatggatgcaggacaatgtatattgattaatttgttgattttaatttagaaaattgttaaattatttcttaaaaatcacttttcttctggaatgccaatttcacatcatgaagcctttttgtataagttagatacgagttgtttatgataaacatttctttgctttaaaataattgcaaatattttaataagtttacaaccttttctattgatgtatcatcttatacaatgctcagtgccttgttccaatacctctgacacacaagaagtcatgttgttagctagtgatttgatgtgatgtaacatcttaaatgtaagcttgtcttaatgaaattgtcagtgtaataacaactacagtcttgaaaaccaaaagtgaatcaaccaactaagaatgagttcatggacttaataatctaagggggaaaaaatgtttgttgaattattcctctcaaatttaggcttgtgttacatgcacaaaaatccttgttctgttttcacttaaaaaaactaaatatgtataactttgtgtatacacacacacacatctatatatataattattagcactagagggatatagtccagttatgtagtatttaaatctccagtttcaaattataattcacctccaaaagaatagttttttaatcacacacataagaaattttatcacaatatttaaaactaatatttcattatctaatgctaataaattattgtggtactgccagtattaaatatatggcagatggtattaactactgatcaatagtaagcatacagaactggggattatggattttataaactatgagacagtcaccccagtttggactgggactaatccccagtactgatttgtcatccactgagtagactttatgaatattttgggtaatttgaaatgatctcattattgaaagatgatttcatatgtagagaagataatatttctttcttgaaaaaacaagtcaggcttaccatgatgtgtgcaaccaatgtaggatctttggcttgtcaaatcagattctccattgctatagtgtacagtgcacacagctcatattgcttccttcctgggtgctgataaaaataagaaagagcatggaaattggtttcttgaatataagctttaatttttaaggcttaaaagtattcatagaggtagactgtatgataaataaaaacaaatttaattcacaaagttatctgtacactgcagttttaaaatataccaactaaattattgggtttctggaagtgaatggagaaaacagcaagggaagaaatcgtttttaagataagtaaataattcccatggattgataaatattttccttttaaaatgttatggactgatattttttattcacctttaaatttcttatcaagaagtttatctttgtttttcagatttaaaaatgaaatacaggtattcgtcactttcctgaaaccatgctaaccaaaatcagtagccaaaccaattcagatagatgtgtctcatctaattaaacccattggtttttatgggagggctgcattaagagcacccaaccaccacatgtaagttgataattaccagcatggcaggtgattttatctgctgaccaagcgcatagttttgttttgttttcagaatgttctagggaacatttgagattttatgtgaaataaaattttaagtgccaaagccaaaaaaatacttaactcttttcaaaggccctctttcatccttgccttcgtcaactttcctttgcacacaggaagcaaaatctacttcaagacatttattttagaggaatccattaagaaaggattgttttacttaaatgaaatgctgtcttatttttgctgtgtcttttgacacctcttagctttaacattcttcttttaaccaagccattatgcaaagttatcaaagaagaggagaaggaaaggaggacagatgaaagtgacgggaaatgagaaagaagaggagtgaggaaacagttatttccttatgaatcctgtgtgtttctttggaagaaagagctgttccgaggaagtttggtccagctgtggttgataagaggtatatctcttaaaaaagacacctaatgaaagtgagagaaaagctaaagaaaatttcaatgtgaccactattatgtgtcaaaataaaacttagattccaaagtggttttgtagtgttgggtgctatgagtaggtatggatctctgttgattgactccagttgaaggtgagaaatctgtaccaatcattcaaaaagggaatctattgttttgaaagaaactctctcatatttcctttaaattgttaatagttgttatgcaactaaagaatgttatgaagaaaaatagcattgcaaaaagtaccattggccagccttacaagtcagccacaatgagtcggtataactactgtgttattctttttctagacaaattttgactcttctacttttatgtgtaataattccagtattctatttatttcagcattatgtgaaaaatgataagaatgttaaaaagaaaataatagtgtggtttaattggtatgagatacctgcttcctcctcctcaaaggtttgactgggtgtatctctcctatgtgtgacattatgtctcctggtgttaacacaggaaatgagtgctcctttttaaaatttctttcttccaagtttttttttccaggaagagaaatatgcagttatgcaggaaaagctctcttaaataatgtgtacataaatctcaagagaatcaaattcacagagtgaataaagtaataatattaaactaca

SEQ ID NO: 107941 - DNA, 5975 bp, Homo sapiens
  Payload ID: 1189
  Gene Symbol: ANO6
  Gene Name: anoctamin 6
  Uniprot ID: Q4KMQ2
  ENST ID: ENST00000320560
  CDS Start-End: 203-2935
gagaggcgtcctccggctctgggctccggtcggtgggtgcctcggctcggctttccccggcgctggctgggctcagcggcccctgagcccaagcgacacacgccccgcggtccccgatccggcccctgggagagccgcgccgttctggaacccgggagcccccaacttcgcgccaagttcggagccgccttctgagggagacatgaaaaagatgagcaggaatgttttgctacaaatggaggaggaggaggacgacgacgatggggatatcgtgttggaaaaccttggacagacaattgtccccgatttgggatcactggaaagtcagcatgattttcgaaccccggagtttgaagaatttaatggaaaacctgactccctcttttttaatgatggccagcgaagaattgactttgttctagtatatgaggatgaaagcagaaaagagaccaataaaaagggtacaaatgaaaaacaaaggaggaaaagacaagcatacgaatctaaccttatctgtcatggcctgcagttagaagcaacaagatcagtattggatgacaagcttgtatttgtaaaagtacacgcaccatgggaggtgttatgtacgtatgctgagataatgcacatcaaattgcctctgaaacccaatgatctgaaaaaccggtcctcagcctttggtacactcaactggtttaccaaagtcctcagtgtagacgaaagcatcatcaagccagagcaagagtttttcactgccccatttgagaagaaccggatgaatgatttttacatagttgatagagatgctttcttcaatccagccaccagaagccgcattgtttacttcatcctctctcgggtcaagtatcaagtgataaacaatgttagcaagtttgggatcaacagacttgtaaactctgggatctacaaggcagctttcccactccatgattgcaaattccgccgtcagtcagaggatcccagctgccctaatgaacggtaccttctgtacagagaatgggctcatcctcgaagcatatacaaaaagcagcccttggatcttatcaggaaatactatggagagaagattggaatctactttgcttggctgggctattacactcagatgcttctcctggccgcagttgtaggagtggcttgctttctctatggatatcttaatcaagataactgtacatggagcaaagaagtttgtcatcctgatattggtggcaagatcataatgtgtcctcagtgtgataggctttgtccattctggaaactcaatattacttgcgagtcctcaaagaaattgtgcatcttcgacagttttggaaccctggtctttgcagtatttatgggagtatgggttaccttgtttttggagttttggaagcgacgccaggcagaacttgagtatgaatgggatactgttgagttacagcaggaagaacaagcccgaccagaatacgaagcacgatgtactcacgtagtgataaatgagattactcaggaagaagaacgcattccctttactgcctggggaaaatgtatacggataaccctctgtgccagtgctgtctttttctggatcctattgatcatcgcttcagttattgggatcattgtctataggctctcggtgttcattgtattttctgcaaaacttcccaagaacattaatggaacagacccaatccagaaatacctgactccacagacagccacgtccatcacggcctccatcatcagctttataattatcatgattctgaacaccatatatgaaaaagtggcaattatgattactaacttcgaactcccaaggacccagactgattatgagaacagcctcaccatgaagatgttcttattccagtttgtcaactactactcttcatgcttctacatagcattctttaagggcaaatttgtaggctatccaggagacccagtttattggttgggaaaatacagaaatgaagagtgtgacccaggtggctgtcttcttgaactgacaactcagctgacaataatcatgggaggaaaagcaatctggaataacatacaagaagtattattgccctggatcatgaatctaattgggcgatttcacagagtttctggatcagaaaagataaccccacgatgggaacaggactaccatctgcagcctatgggcaaactgggattattttatgaatatcttgaaatgattattcagtttgggttcgtcaccttatttgtggcctcttttccactggcccctctgttggctctcgtgaacaatatattggaaataagagtggacgcatggaaactgaccacccagtttagacgcctggtaccagagaaagcccaagacattggagcatggcagcccatcatgcaaggaatagcaattctggctgtggtgaccaatgccatgatcatagctttcacgtcggacatgatcccccgcctagtgtactactggtccttctccgtccctccctacggggaccacacttcctacaccatggaagggtacatcaacaacactctctccatcttcaaagtcgcagacttcaaaaacaaaagcaagggaaacccgtactctgacctgggtaaccataccacatgcaggtatcgtgatttccgatacccacctggacacccccaggagtataaacacaacatctactattggcatgtgattgcagccaagctggcttttatcattgtcatggagcacgtcatctactctgtgaaatttttcatttcatatgcaattcccgatgtatcaaaacgcacaaagagcaagatccagagagaaaaatacctaacccaaaagcttcttcatgagaatcacctcaaagatatgacgaaaaatatgggggtgatagctgagcggatgatagaagcagtagataacaatttacggccaaaatcagaataagagctttatgttctgagaagcactttaaggaatttagctttgtcaaaatatattaggaatcactaatgagaatgtgtaagttaaatcactttggcaaatatgagtctcaactattgccatttcctcatgtattatttttcagtttcagctagcgatgcagaaactggaaaatgtaaaacttagatcatgaagggcataaaacttatcacccggaaaacctcaatgttacctttttctgataaattggaattttacagaaaaagtccctcagtgtgcttaaaaaccaccccttctaaagtagaatggattcttttttttctgtttgattattttcatttctgtctattctcaggcgcatgatctcctttatttttaagccatgtttcatttcttcacttggctagatctgttccagggtcatcttttccttacagtaccatcattatagatttaatttaatagctttcatgtgattaaaaatagctaactagactcaaggattcacaatatttaggtgtattttcaatacctccagaaaggaaacctcagttaatcagaggaaatagtttcagtcttcatttgagcatgtctttccatctcaaaaaaatactcttagtaggttggagtgaagatagcaaggttttgaagcatatttgtcctaatccacagtgacactttttatcttccaggagcactcctaggaggttccgtgcctaatcaatgttgactgctttgcagatctcaagggaataaaatgacaaaagcagggaaagttacagattcaaacagcattttaactcatgttgatctggataattaatcttttctaaagatgtgtagtttcttggaaaacagtgatatcacatgattaaaattacatttttatcaacataattgtctggaaaagataagcccctcaattttctaccagttgacttttattcattagatacagaaggtgcagtattacacatcaccagctgcctttgtgaatggctcactacacagccattggggtacaactgtgtgcatgggcagaaacagcaagtgccctcattgtggtcattgggtggggagtgccttttgtcaaggagtctgcaggaattggcttatttctgtatgccaaagtgatcaacacaccaaagtctctgccataaagaatgtggcttccttgcatcctccatcctgttactctgggcccagtaatttgatgtaactgtctgattgtactagagacaggagtatacccagcttattcataatcaagtaaagagactcagattagatttgattttttagcctcctctagagccaatcaggcagttaagagtaataaaggaaaagggtttggtcacaaaccctaccattatctggagattacttcctgctgcactcctgtcttgccatgcacgtcttgccccctcacttttgctcagcctagcagtctacttcactttattgccttgtaagtgtcaggcctcctgggcgctctggaaaagacagggagccaggccctctcacccctactggtaacaggtcattgctgggtgcacaagagggaggtgatttgcatcatggtcatgctgcatgggcttcactgggatgctgttaaacaccagaggagccaacctatcagaatcccagcagcaaaggaaaactcagattttagaggctttttacaataaagtagcgtaactctaggtcatgattgatttcaaatgcctgccatgaatgatttgtaagtaattatgtaggatccatcaaagcagtattgtaggcttttgaattgtcccagtggatccgggaccccatttcactgtctctcttgatcgtgttaatgatgcaatcagagttcaagacaggccccatgaagtctgactgcactgggatggagaaatgaatttcttcccactgaaggaaactctttctcattcgcagccaagacgggagtgccactgttcctctcttcactcctgagatactgcttctggaagcgggtgtcacttcctctctagtacctcttctcttctctgaagtgtgtgactatctcctagtgtttaaatttggcagttactcgccatgtatgtcagcatagaaaaggaaatgtttttaccttatctcctgtatgtatgatagaacttaaaagaaatgtgcatttgttttcatagccccagcagagaaaatcctcttcatagattaaatgtgctgctgtggacaggaggggaaaaaaaaccctctacatattgaaaggcaccaaatgtaatatctgacactgttaagatgcccaaaagagcaaagttgtagtggagatgcagggtcatttccccatgccatccacagtgtttgttagtgagtccacggctgacttgcagtgataaagaaaagcatggagctgtgtctgcagacaatggtggctgcatctgtaagtggcttcagaggcagcagccctggggaaattgatgggtgtggcagtggacctgtgaagagggagaatctagccttcagcctgtccagtgttaaccactagagaaactgagctttatatccttttttaatgcctgtgaattttagcatattgaaacattagagcaaatactcaggggatttttcattaaacatccctcagataatttagctatatatcattagaaagggaaagctatcatttttattttaaaactaaacaaggccatcttataaactgtcaccaaagtcttcccttttttattgcatgtgtgccttgaatttcataaaacattaattcacaatgggggtcagaatgtactcttgttgaaacacttcttgtaccattttatgttcatattatgtttgagagggtaaaaatgtatgagcagcttaactgaagtagaactattcatgatgcttttcacacattgtggcataagatgtaaagtttgtaattaatgttaatttctgtgcattttaatattcttttataattattaatgttaatttctgtgcattttaatattcttttataattatgagcattttaataaattcatttttacaaacaata

SEQ ID NO: 107942 - DNA, 3558 bp, Homo sapiens
  Payload ID: 1189
  Gene Symbol: ANO6
  Gene Name: anoctamin 6
  Uniprot ID: Q4KMQ2
  ENST ID: ENST00000425752
  CDS Start-End: 303-3092
cttctgcgcgcctcgtaaaaccggggaagttcaatcattccgcagcgagccgcggcggccgcactgggcatgctcagtctccgggctccgctcggcaggcgagaggcgtcctccggctctgggctccggtcggtgggtgcctcggctcggctttccccggcgctggctgggctcagcggcccctgagcccaagcgacacacgccccgcggtccccgatccggcccctgggagagccgcgccgttctggaacccgggagcccccaacttcgcgccaagttcggagccgccttctgagggagacatgaaaaagatgagcaggaatgttttgctacaaatggaggaggaggaggacgacgacgatggggatatcgtgttggaaaaccttggacagacaattgtccccgatttgggatcactggaaagtcagcatgattttcgaaccccggagtttgaagaatttaatggaaaacctgactccctcttttttaatgatggccagcgaagaattgactttgttctagtatatgaggatgaaagcagaaaagagaccaataaaaagggtacaaatgaaaaacaaaggaggaaaagacaagcatacgaatctaaccttatctgtcatggcctgcagttagaagcaacaagatcagtattggatgacaagcttgtatttgtaaaagtacacgcaccatgggaggtgttatgtacgtatgctgagataatgcacatcaaattgcctctgaaacccaatgatctgaaaaaccggtcctcagcctttggtacactcaactggtttaccaaagtcctcagtgtagacgaaagcatcatcaagccagagcaagagtttttcactgccccatttgagaagaaccggatgaatgatttttacatagttgatagagatgctttcttcaatccagccaccagaagccgcattgtttacttcatcctctctcgggtcaagtatcaagtgataaacaatgttagcaagtttgggatcaacagacttgtaaactctgggatctacaaggcagctttcccactccatgattgcaaattccgccgtcagtcagaggatcccagctgccctaatgaacggtaccttctgtacagagaatgggctcatcctcgaagcatatacaaaaagcagcccttggatcttatcaggaaatactatggagagaagattggaatctactttgcttggctgggctattacactcagatgcttctcctggccgcagttgtaggagtggcttgctttctctatggatatcttaatcaagataactgtacatggagcaaagaagtttgtcatcctgatattggtggcaagatcataatgtgtcctcagtgtgataggctttgtccattctggaaactcaatattacttgcgagtcctcaaagaaattgtgcatcttcgacagttttggaaccctggtctttgcagtatttatgggagtatgggttaccttgtttttggagttttggaagcgacgccaggcagaacttgagtatgaatgggatactgttgagttacagcaggaagaacaagcccgaccagaatacgaagcacgatgtactcacgtagtgataaatgagattactcaggaagaagaacgcattccctttactgcctggggaaaatgtatacggataaccctctgtgccagtgctgtctttttctggatcctattgatcatcgcttcagttattgggatcattgtctataggctctcggtgttcattgtattttctgcaaaacttcccaagaacattaatggaacagacccaatccagaaatacctgactccacagacagccacgtccatcacggcctccatcatcagctttataattatcatgattctgaacaccatatatgaaaaagtggcaattatgattactaacttcgaactcccaaggacccagactgattatgagaacagcctcaccatgaagatgttcttattccagtttgtcaactactactcttcatgcttctacatagcattctttaagggcaaatttgtaggctatccaggagacccagtttattggttgggaaaatacagaaatgaagagtgtgacccaggtggctgtcttcttgaactgacaactcagctgacaataatcatgggaggaaaagcaatctggaataacatacaagaagtattattgccctggatcatgaatctaattgggcgatttcacagagtttctggatcagaaaagataaccccacgatgggaacaggactaccatctgcagcctatgggcaaactgggattattttatgaatatcttgaaatgattattcagtttgggttcgtcaccttatttgtggcctcttttccactggcccctctgttggctctcgtgaacaatatattggaaataagagtggacgcatggaaactgaccacccagtttagacgcctggtaccagagaaagcccaagacattggagcatggcagcccatcatgcaaggaatagcaattctggctgtggtgaccaatgccatgatcatagctttcacgtcggacatgatcccccgcctagtgtactactggtccttctccgtccctccctacggggaccacacttcctacaccatggaagggtacatcaacaacactctctccatcttcaaagtcgcagacttcaaaaacaaaagcaagggaaacccgtactctgacctgggtaaccataccacatgcaggtatcgtgatttccgatacccacctggacacccccaggagtataaacacaacatctactattggcatgtgattgcagccaagctggcttttatcattgtcatggagtatctcgctttgttgcccaggctgggacacagtggcatgatcttggctcactgcaacctccgcctcccagttgactgctgtatgtgttataggtttgtcgatgaaattagacttttggaacaactaacttctgactttattgactccctctattatatattttctatttcaataatatctattttcttttctgttactttctttttccttctactttctttggggccaactccgtgtttttctgtatcgaatttcttaagttagatttattcaataattcattcaacaaatatttgtgtgtctattatgtggccagcattgtttcatgtgctcaagatagagtagcattgtttggctcattaatattccaatactggcatttaagaccattaattttcctctaaatcgtatttgagctgcaacccacaagcttttatatgtatagttttttgttgttgctattattaaaagtattttagatcctcccttgttttgcttttcaatctgaaatgccttcatgccattttaatttttaaaaggtaatttaattgagcctaatttctttttcttttttcttttttttgagacagagtcttactctgtcacccaggctggagtgcagtggcgtgatctcagctcaatgcaagctctgcctcccaggttcacgccattctcctgtctcagcctcccaagtagctgggactacaggcgcccaccaccatgcctggct

SEQ ID NO: 107943 - DNA, 5504 bp, Homo sapiens
  Payload ID: 1189
  Gene Symbol: ANO6
  Gene Name: anoctamin 6
  Uniprot ID: Q4KMQ2
  ENST ID: ENST00000423947
  CDS Start-End: 238-3033
gggcatgctcagtctccgggctccgctcggcaggcgagaggcgtcctccggctctgggctccggtcggtgggtgcctcggctcggctttccccggcgctggctgggctcagcggcccctgagcccaagcgacacacgccccgcggtccccgatccggcccctgggagagccgcgccgttctggaacccgggagcccccaacttcgcgccaagttcggagccgccttctgagggagacatgaaaaagatgagcaggaatgttttgctacaaatggaggaggaggaggacgacgacgatggggatatcggtgatgttcctgcctccaggaggccttttctgactcctcatactcacctcccatccagcctggtgttggaaaaccttggacagacaattgtccccgatttgggatcactggaaagtcagcatgattttcgaaccccggagtttgaagaatttaatggaaaacctgactccctcttttttaatgatggccagcgaagaattgactttgttctagtatatgaggatgaaagcagaaaagagaccaataaaaagggtacaaatgaaaaacaaaggaggaaaagacaagcatacgaatctaaccttatctgtcatggcctgcagttagaagcaacaagatcagtattggatgacaagcttgtatttgtaaaagtacacgcaccatgggaggtgttatgtacgtatgctgagataatgcacatcaaattgcctctgaaacccaatgatctgaaaaaccggtcctcagcctttggtacactcaactggtttaccaaagtcctcagtgtagacgaaagcatcatcaagccagagcaagagtttttcactgccccatttgagaagaaccggatgaatgatttttacatagttgatagagatgctttcttcaatccagccaccagaagccgcattgtttacttcatcctctctcgggtcaagtatcaagtgataaacaatgttagcaagtttgggatcaacagacttgtaaactctgggatctacaaggcagctttcccactccatgattgcaaattccgccgtcagtcagaggatcccagctgccctaatgaacggtaccttctgtacagagaatgggctcatcctcgaagcatatacaaaaagcagcccttggatcttatcaggaaatactatggagagaagattggaatctactttgcttggctgggctattacactcagatgcttctcctggccgcagttgtaggagtggcttgctttctctatggatatcttaatcaagataactgtacatggagcaaagaagtttgtcatcctgatattggtggcaagatcataatgtgtcctcagtgtgataggctttgtccattctggaaactcaatattacttgcgagtcctcaaagaaattgtgcatcttcgacagttttggaaccctggtctttgcagtatttatgggagtatgggttaccttgtttttggagttttggaagcgacgccaggcagaacttgagtatgaatgggatactgttgagttacagcaggaagaacaagcccgaccagaatacgaagcacgatgtactcacgtagtgataaatgagattactcaggaagaagaacgcattccctttactgcctggggaaaatgtatacggataaccctctgtgccagtgctgtctttttctggatcctattgatcatcgcttcagttattgggatcattgtctataggctctcggtgttcattgtattttctgcaaaacttcccaagaacattaatggaacagacccaatccagaaatacctgactccacagacagccacgtccatcacggcctccatcatcagctttataattatcatgattctgaacaccatatatgaaaaagtggcaattatgattactaacttcgaactcccaaggacccagactgattatgagaacagcctcaccatgaagatgttcttattccagtttgtcaactactactcttcatgcttctacatagcattctttaagggcaaatttgtaggctatccaggagacccagtttattggttgggaaaatacagaaatgaagagtgtgacccaggtggctgtcttcttgaactgacaactcagctgacaataatcatgggaggaaaagcaatctggaataacatacaagaagtattattgccctggatcatgaatctaattgggcgatttcacagagtttctggatcagaaaagataaccccacgatgggaacaggactaccatctgcagcctatgggcaaactgggattattttatgaatatcttgaaatgattattcagtttgggttcgtcaccttatttgtggcctcttttccactggcccctctgttggctctcgtgaacaatatattggaaataagagtggacgcatggaaactgaccacccagtttagacgcctggtaccagagaaagcccaagacattggagcatggcagcccatcatgcaaggaatagcaattctggctgtggtgaccaatgccatgatcatagctttcacgtcggacatgatcccccgcctagtgtactactggtccttctccgtccctccctacggggaccacacttcctacaccatggaagggtacatcaacaacactctctccatcttcaaagtcgcagacttcaaaaacaaaagcaagggaaacccgtactctgacctgggtaaccataccacatgcaggtatcgtgatttccgatacccacctggacacccccaggagtataaacacaacatctactattggcatgtgattgcagccaagctggcttttatcattgtcatggagcacgtcatctactctgtgaaatttttcatttcatatgcaattcccgatgtatcaaaacgcacaaagagcaagatccagagagaaaaatacctaacccaaaagcttcttcatgagaatcacctcaaagatatgacgaaaaatatgggggtgatagctgagcggatgatagaagcagtagataacaatttacggccaaaatcagaataagagctttatgttctgagaagcactttaaggaatttagctttgtcaaaatatattaggaatcactaatgagaatgtgtaagttaaatcactttggcaaatatgagtctcaactattgccatttcctcatgtattatttttcagtttcagctagcgatgcagaaactggaaaatgtaaaacttagatcatgaagggcataaaacttatcacccggaaaacctcaatgttacctttttctgataaattggaattttacagaaaaagtccctcagtgtgcttaaaaaccaccccttctaaagtagaatggattcttttttttctgtttgattattttcatttctgtctattctcaggcgcatgatctcctttatttttaagccatgtttcatttcttcacttggctagatctgttccagggtcatcttttccttacagtaccatcattatagatttaatttaatagctttcatgtgattaaaaatagctaactagactcaaggattcacaatatttaggtgtattttcaatacctccagaaaggaaacctcagttaatcagaggaaatagtttcagtcttcatttgagcatgtctttccatctcaaaaaaatactcttagtaggttggagtgaagatagcaaggttttgaagcatatttgtcctaatccacagtgacactttttatcttccaggagcactcctaggaggttccgtgcctaatcaatgttgactgctttgcagatctcaagggaataaaatgacaaaagcagggaaagttacagattcaaacagcattttaactcatgttgatctggataattaatcttttctaaagatgtgtagtttcttggaaaacagtgatatcacatgattaaaattacatttttatcaacataattgtctggaaaagataagcccctcaattttctaccagttgacttttattcattagatacagaaggtgcagtattacacatcaccagctgcctttgtgaatggctcactacacagccattggggtacaactgtgtgcatgggcagaaacagcaagtgccctcattgtggtcattgggtggggagtgccttttgtcaaggagtctgcaggaattggcttatttctgtatgccaaagtgatcaacacaccaaagtctctgccataaagaatgtggcttccttgcatcctccatcctgttactctgggcccagtaatttgatgtaactgtctgattgtactagagacaggagtatacccagcttattcataatcaagtaaagagactcagattagatttgattttttagcctcctctagagccaatcaggcagttaagagtaataaaggaaaagggtttggtcacaaaccctaccattatctggagattacttcctgctgcactcctgtcttgccatgcacgtcttgccccctcacttttgctcagcctagcagtctacttcactttattgccttgtaagtgtcaggcctcctgggcgctctggaaaagacagggagccaggccctctcacccctactggtaacaggtcattgctgggtgcacaagagggaggtgatttgcatcatggtcatgctgcatgggcttcactgggatgctgttaaacaccagaggagccaacctatcagaatcccagcagcaaaggaaaactcagattttagaggctttttacaataaagtagcgtaactctaggtcatgattgatttcaaatgcctgccatgaatgatttgtaagtaattatgtaggatccatcaaagcagtattgtaggcttttgaattgtcccagtggatccgggaccccatttcactgtctctcttgatcgtgttaatgatgcaatcagagttcaagacaggccccatgaagtctgactgcactgggatggagaaatgaatttcttcccactgaaggaaactctttctcattcgcagccaagacgggagtgccactgttcctctcttcactcctgagatactgcttctggaagcgggtgtcacttcctctctagtacctcttctcttctctgaagtgtgtgactatctcctagtgtttaaatttggcagttactcgccatgtatgtcagcatagaaaaggaaatgtttttaccttatctcctgtatgtatgatagaacttaaaagaaatgtgcatttgttttcatagccccagcagagaaaatcctcttcatagattaaatgtgctgctgtggacaggaggggaaaaaaaaccctctacatattgaaaggcaccaaatgtaatatctgacactgttaagatgcccaaaagagcaaagttgtagtggagatgcagggtcatttccccatgccatccacagtgtttgttagtgagtccacggctgacttgcagtgataaagaaaagcatggagctgtgtctgcagacaatggtggctgcatctgtaagtggcttcagaggcagcagccctggggaaattgatgggtgtggca

SEQ ID NO: 107944 - DNA, 5955 bp, Homo sapiens
  Payload ID: 1189
  Gene Symbol: ANO6
  Gene Name: anoctamin 6
  Uniprot ID: Q4KMQ2
  ENST ID: ENST00000441606
  CDS Start-End: 237-2915
ttggggcagaggaggcttgtaggaataggggaagagttcataagcagagctgaaacaacaccaaacatggaaatgttacaaggtggagaaattgtgcttactgaaactcttctcagaaatattgctgtttgtggatgatagaaatcttcagagttgtcacttaaggtagaggtaggagggtaagaagcgtcaaggactcaccgaattgtccattcccccttttgttctgctgtggaatgttttgtgctgctgtgttggaaaaccttggacagacaattgtccccgatttgggatcactggaaagtcagcatgattttcgaaccccggagtttgaagaatttaatggaaaacctgactccctcttttttaatgatggccagcgaagaattgactttgttctagtatatgaggatgaaagcagaaaagagaccaataaaaagggtacaaatgaaaaacaaaggaggaaaagacaagcatacgaatctaaccttatctgtcatggcctgcagttagaagcaacaagatcagtattggatgacaagcttgtatttgtaaaagtacacgcaccatgggaggtgttatgtacgtatgctgagataatgcacatcaaattgcctctgaaacccaatgatctgaaaaaccggtcctcagcctttggtacactcaactggtttaccaaagtcctcagtgtagacgaaagcatcatcaagccagagcaagagtttttcactgccccatttgagaagaaccggatgaatgatttttacatagttgatagagatgctttcttcaatccagccaccagaagccgcattgtttacttcatcctctctcgggtcaagtatcaagtgataaacaatgttagcaagtttgggatcaacagacttgtaaactctgggatctacaaggcagctttcccactccatgattgcaaattccgccgtcagtcagaggatcccagctgccctaatgaacggtaccttctgtacagagaatgggctcatcctcgaagcatatacaaaaagcagcccttggatcttatcaggaaatactatggagagaagattggaatctactttgcttggctgggctattacactcagatgcttctcctggccgcagttgtaggagtggcttgctttctctatggatatcttaatcaagataactgtacatggagcaaagaagtttgtcatcctgatattggtggcaagatcataatgtgtcctcagtgtgataggctttgtccattctggaaactcaatattacttgcgagtcctcaaagaaattgtgcatcttcgacagttttggaaccctggtctttgcagtatttatgggagtatgggttaccttgtttttggagttttggaagcgacgccaggcagaacttgagtatgaatgggatactgttgagttacagcaggaagaacaagcccgaccagaatacgaagcacgatgtactcacgtagtgataaatgagattactcaggaagaagaacgcattccctttactgcctggggaaaatgtatacggataaccctctgtgccagtgctgtctttttctggatcctattgatcatcgcttcagttattgggatcattgtctataggctctcggtgttcattgtattttctgcaaaacttcccaagaacattaatggaacagacccaatccagaaatacctgactccacagacagccacgtccatcacggcctccatcatcagctttataattatcatgattctgaacaccatatatgaaaaagtggcaattatgattactaacttcgaactcccaaggacccagactgattatgagaacagcctcaccatgaagatgttcttattccagtttgtcaactactactcttcatgcttctacatagcattctttaagggcaaatttgtaggctatccaggagacccagtttattggttgggaaaatacagaaatgaagagtgtgacccaggtggctgtcttcttgaactgacaactcagctgacaataatcatgggaggaaaagcaatctggaataacatacaagaagtattattgccctggatcatgaatctaattgggcgatttcacagagtttctggatcagaaaagataaccccacgatgggaacaggactaccatctgcagcctatgggcaaactgggattattttatgaatatcttgaaatgattattcagtttgggttcgtcaccttatttgtggcctcttttccactggcccctctgttggctctcgtgaacaatatattggaaataagagtggacgcatggaaactgaccacccagtttagacgcctggtaccagagaaagcccaagacattggagcatggcagcccatcatgcaaggaatagcaattctggctgtggtgaccaatgccatgatcatagctttcacgtcggacatgatcccccgcctagtgtactactggtccttctccgtccctccctacggggaccacacttcctacaccatggaagggtacatcaacaacactctctccatcttcaaagtcgcagacttcaaaaacaaaagcaagggaaacccgtactctgacctgggtaaccataccacatgcaggtatcgtgatttccgatacccacctggacacccccaggagtataaacacaacatctactattggcatgtgattgcagccaagctggcttttatcattgtcatggagcacgtcatctactctgtgaaatttttcatttcatatgcaattcccgatgtatcaaaacgcacaaagagcaagatccagagagaaaaatacctaacccaaaagcttcttcatgagaatcacctcaaagatatgacgaaaaatatgggggtgatagctgagcggatgatagaagcagtagataacaatttacggccaaaatcagaataagagctttatgttctgagaagcactttaaggaatttagctttgtcaaaatatattaggaatcactaatgagaatgtgtaagttaaatcactttggcaaatatgagtctcaactattgccatttcctcatgtattatttttcagtttcagctagcgatgcagaaactggaaaatgtaaaacttagatcatgaagggcataaaacttatcacccggaaaacctcaatgttacctttttctgataaattggaattttacagaaaaagtccctcagtgtgcttaaaaaccaccccttctaaagtagaatggattcttttttttctgtttgattattttcatttctgtctattctcaggcgcatgatctcctttatttttaagccatgtttcatttcttcacttggctagatctgttccagggtcatcttttccttacagtaccatcattatagatttaatttaatagctttcatgtgattaaaaatagctaactagactcaaggattcacaatatttaggtgtattttcaatacctccagaaaggaaacctcagttaatcagaggaaatagtttcagtcttcatttgagcatgtctttccatctcaaaaaaatactcttagtaggttggagtgaagatagcaaggttttgaagcatatttgtcctaatccacagtgacactttttatcttccaggagcactcctaggaggttccgtgcctaatcaatgttgactgctttgcagatctcaagggaataaaatgacaaaagcagggaaagttacagattcaaacagcattttaactcatgttgatctggataattaatcttttctaaagatgtgtagtttcttggaaaacagtgatatcacatgattaaaattacatttttatcaacataattgtctggaaaagataagcccctcaattttctaccagttgacttttattcattagatacagaaggtgcagtattacacatcaccagctgcctttgtgaatggctcactacacagccattggggtacaactgtgtgcatgggcagaaacagcaagtgccctcattgtggtcattgggtggggagtgccttttgtcaaggagtctgcaggaattggcttatttctgtatgccaaagtgatcaacacaccaaagtctctgccataaagaatgtggcttccttgcatcctccatcctgttactctgggcccagtaatttgatgtaactgtctgattgtactagagacaggagtatacccagcttattcataatcaagtaaagagactcagattagatttgattttttagcctcctctagagccaatcaggcagttaagagtaataaaggaaaagggtttggtcacaaaccctaccattatctggagattacttcctgctgcactcctgtcttgccatgcacgtcttgccccctcacttttgctcagcctagcagtctacttcactttattgccttgtaagtgtcaggcctcctgggcgctctggaaaagacagggagccaggccctctcacccctactggtaacaggtcattgctgggtgcacaagagggaggtgatttgcatcatggtcatgctgcatgggcttcactgggatgctgttaaacaccagaggagccaacctatcagaatcccagcagcaaaggaaaactcagattttagaggctttttacaataaagtagcgtaactctaggtcatgattgatttcaaatgcctgccatgaatgatttgtaagtaattatgtaggatccatcaaagcagtattgtaggcttttgaattgtcccagtggatccgggaccccatttcactgtctctcttgatcgtgttaatgatgcaatcagagttcaagacaggccccatgaagtctgactgcactgggatggagaaatgaatttcttcccactgaaggaaactctttctcattcgcagccaagacgggagtgccactgttcctctcttcactcctgagatactgcttctggaagcgggtgtcacttcctctctagtacctcttctcttctctgaagtgtgtgactatctcctagtgtttaaatttggcagttactcgccatgtatgtcagcatagaaaaggaaatgtttttaccttatctcctgtatgtatgatagaacttaaaagaaatgtgcatttgttttcatagccccagcagagaaaatcctcttcatagattaaatgtgctgctgtggacaggaggggaaaaaaaaccctctacatattgaaaggcaccaaatgtaatatctgacactgttaagatgcccaaaagagcaaagttgtagtggagatgcagggtcatttccccatgccatccacagtgtttgttagtgagtccacggctgacttgcagtgataaagaaaagcatggagctgtgtctgcagacaatggtggctgcatctgtaagtggcttcagaggcagcagccctggggaaattgatgggtgtggcagtggacctgtgaagagggagaatctagccttcagcctgtccagtgttaaccactagagaaactgagctttatatccttttttaatgcctgtgaattttagcatattgaaacattagagcaaatactcaggggatttttcattaaacatccctcagataatttagctatatatcattagaaagggaaagctatcatttttattttaaaactaaacaaggccatcttataaactgtcaccaaagtcttcccttttttattgcatgtgtgccttgaatttcataaaacattaattcacaatgggggtcagaatgtactcttgttgaaacacttcttgtaccattttatgttcatattatgtttgagagggtaaaaatgtatgagcagcttaactgaagtagaactattcatgatgcttttcacacattgtggcataagatgtaaagtttgtaattaatgttaatttctgtgcattttaatattcttttataattattaatgttaatttctgtgcattttaatattcttttataattatgagcattttaataaattcatttttacaaacaata

SEQ ID NO: 107945 - DNA, 835 bp, Homo sapiens
  Payload ID: 1189
  Gene Symbol: ANO6
  Gene Name: anoctamin 6
  ENST ID: ENST00000550630
  CDS Start-End: 203-340
gagaggcgtcctccggctctgggctccggtcggtgggtgcctcggctcggctttccccggcgctggctgggctcagcggcccctgagcccaagcgacacacgccccgcggtccccgatccggcccctgggagagccgcgccgttctggaacccgggagcccccaacttcgcgccaagttcggagccgccttctgagggagacatgaaaaagatgagcaggaatgttttgctacaaatggaggaggaggaggacgacgacgatggggatatcgggctgaagtgcagtagtggagtagcgcaatcatggctcactgtagcattgactcccagactcaattgatcctcttacctcaacctcctgcgtatctgggaccacaggtgatgttcctgcctccaggaggccttttctgactcctcatactcacctcccatccagcctggtgttggaaaaccttggacagacaattgtccccgatttgggatcactggaaagtcagcatgattttcgaaccccggagtttgtgaaagctattctgaaggttgccctaggaagttgaacataagatggactccagggaattagaaaccctgtttttccatgcaaccctgctctcagacctctgtggacaagtcgcttttccttttagaacctcagtttcctcatatgtaaaaagcagaaagatcagcagtagatatcctcactggagtgttgttcagtgactgcacggtgactgagaaacattttagctatcttaaaatgatgttcataataatatagtgaatagtcttatctaacatttatggatgcttgtggttggctaagcacattacaggg

SEQ ID NO: 107946 - DNA, 4128 bp, Homo sapiens
  Payload ID: 1190
  Gene Symbol: ANO7
  Gene Name: anoctamin 7
  Uniprot ID: Q6IWH7
  ENST ID: ENST00000274979
  CDS Start-End: 104-2905
aaagatagatcctgctccaggagccgggaagccttgccctggccagctgtgctgggcacctcccctgcctgcttcctggcccacttgcaggcaaggtgagggcatgcgaatggctgccactgcctgggcggggctccaagggccacccctccccaccctctgtcccgcagtgaggacgggactctactgccgagaccaggctcacgctgagaggtgggccatgacctccgagacctcttccggaagccactgtgccaggagcaggatgctgcggcgacgggcccaggaagaggacagcaccgtcctgatcgatgtgagcccccctgaggcagagaagaggggctcttacgggagcacagcccacgcctcggagccaggtggacagcaagcggccgcctgcagagctgggagtcctgccaagccccggatcgcagacttcgtcctcgtttgggaggaggacctgaagctagacaggcagcaggacagtgccgcccgggacagaacagacatgcacaggacctggcgggagacttttctggataatcttcgtgcggctgggctgtgtgtagaccagcaggacgtccaggacgggaacaccacagtgcactacgccctcctcagcgcctcctgggctgtgctctgctactacgccgaagacctgcgcctgaagctgcccttgcaggagttacccaaccaggcctccaactggtcggccggcctgctggcatggctgggcatccccaacgtcctgctggaggttgtgccagacgtaccccccgagtactactcctgccggttcagagtgaacaagctgccacgcttcctcgggagtgacaaccaggacaccttcttcacaagcaccaagaggcaccaaattctgtttgagatcctggccaagaccccgtatggccacgagaagaaaaacctgcttgggatccaccagctgctggcagagggtgtcctcagtgccgccttccccctgcatgacggccccttcaagacgcccccagagggcccgcaggctccacgcctcaaccagcgccaagtccttttccagcactgggcgcgctggggcaagtggaacaagtaccagcccctggaccacgtgcgcaggtacttcggggagaaggtggccctctacttcgcctggctcgggttttacacaggctggctcctgccagcggcagtggtgggcacactggtgttcctggtgggctgcttcctggtgttctcagacatacccacgcaggaactgtgtggcagcaaggacagcttcgagatgtgcccactttgcctcgactgccctttctggctgctctccagcgcctgtgccctggcccaggccggccggctgttcgaccacggcggcaccgtgttcttcagcttgttcatggcactgtgggccgtgctgctgctggagtactggaagcggaagagcgccacgctggcctaccgctgggactgctctgactacgaggacactgaggagaggcctcggccccagtttgccgcctcagcccccatgacagccccgaaccccatcacgggtgaggacgagccctacttccctgagaggagccgcgcgcgccgcatgctggccggctctgtggtgatcgtggtgatggtggccgtggtggtcatgtgcctcgtgtctatcatcctgtaccgtgccatcatggccatcgtggtgtccaggtcgggcaacacccttctcgcagcctgggcctctcgcatcgccagcctcacggggtctgtagtgaacctcgtcttcatcctcatcctctccaagatctatgtatccctggcccacgtcctgacacgatgggaaatgcaccgcacccagaccaagttcgaggacgccttcaccctcaaggtgttcatcttccagttcgtcaacttctactcctcacccgtctacattgccttcttcaagggcaggtttgtgggatacccaggcaactaccacaccttgtttggagtccgcaatgaggagtgcgcggctggaggctgcctgatcgagctggcacaggagctcctggtcatcatggtgggcaagcaggtcatcaacaacatgcaggaggtcctcatcccgaagctaaagggctggtggcagaagttccggcttcgctccaagaagaggaaggcgggagcttctgcaggggctagccaggggccctgggaggacgactatgagcttgtgccctgtgagggtctgtttgacgagtacctggaaatggtgctgcagttcggcttcgtcaccatcttcgtggccgcctgtccgctcgcgccgctcttcgccctgctcaacaactgggtggagatccgcttggacgcgcgcaagttcgtctgcgagtaccggcgcccggtggccgagcgcgcccaggacatcggcatctggttccacatcctggcgggcctcacgcacctggcggtcatcagcaacgccttcctcctggccttctcgtccgacttcctgccgcgcgcctactaccggtggacccgcgcccacgacctgcgcggcttcctcaacttcacgctggcgcgagccccgtcctccttcgccgccgcgcacaaccgcacgtgcaggtatcgggctttccgggatgacgatggacattattcccagacctactggaatcttcttgccatccgcctggccttcgtcattgtgtttgagcatgtggttttctccgttggccgcctcctggacctcctggtgcctgacatcccagagtctgtggagatcaaagtgaagcgggagtactacctggctaagcaggcactggctgagaatgaggttctttttggaacgaacggaacaaaggatgagcagcccgagggctcagagctcagctcccactggacacccttcacggttcccaaggccagccagctgcagcagtgacgcctggaaggacatctggtggtccttaggggagtggcccctcctgagccctgcgagcagcgtccttttcctcttccctcaggcagcggctgtgtgaaccgctggctgctgttgtgcctcatctctgggcacattgcctgcttccccccagcgccggcttctctcctcagagcgcctgtcactccatccccggcagggagggaccgtcagctcacaaggccctctttgtttcctgctcccagacataagcccaaggggcccctgcacccaagggaccctgtccctcggtggcctccccaggcccctggacacgacagttctcctcaggcaggtgggctttgtggtcctcgccgcccctggccacatcgccctctcctcttacacctggtgaccttcgaatgtttcagagcgcagggccgttctccctcgtgtcctctggacccacccgccccttcctgccctgtttgcgcagggacatcacccacatgccccagctctcggaccctgcagctctgtgtcccaggccacagcaaaggtctgttgaacccctccctccattcccagttatctgggtcctctggattcttctgtttcttgaatcaggctctgctttccccctagccactacaggcagcctctgacagtgccgctttacttgcattctgcagcaattacatgtgtccttttgatccttgcccaacttccctccctctcccagctcctggcccctggcccagggcccctcttgctgtttttacctctgttccttggggcctagtacccagcaagcacccaaatgggggaggttttgggatgagaggaggaaacgtgtatacctgtaacatctggtggctcttcccccagaagtttgtgttcatacataattgttttccacgctggatcataatgtgacgtgcagttctgccctgtgctggggagccacatgaagcttcccctggctaacttgctaccccgcagcaatcccagtgtggccgtctgcttgctaaaaaatggatctgtgctcatctgtattgatgtccttggagttctacaagtggaacttaagtgtcaaaaagaatatgtggtttttagctgagcgtggtggctcacacctgtaatcccaggactttgggaggctgaggcaggaggattacaaggtcaggagttcgggactagcctgtccaacatggtgaaaccctgtctttactaaaaatgcaaaaatt

SEQ ID NO: 107947 - DNA, 894 bp, Homo sapiens
  Payload ID: 1190
  Gene Symbol: ANO7
  Gene Name: anoctamin 7
  Uniprot ID: Q6IWH7
  ENST ID: ENST00000402530
  CDS Start-End: 104-643
aaagatagatcctgctccaggagccgggaagccttgccctggccagctgtgctgggcacctcccctgcctgcttcctggcccacttgcaggcaaggtgagggcatgcgaatggctgccactgcctgggcggggctccaagggccacccctccccaccctctgtcccgcagtgaggacgggactctactgccgagaccaggctcacgctgagaggtgggccatgacctccgagacctcttccggaagccactgtgccaggagcaggatgctgcggcgacgggcccaggaagaggacagcaccgtcctgatcgatgtgagcccccctgaggcagagaagaggggctcttacgggagcacagcccacgcctcggagccaggtggacagcaagcggccgcctgcagagctgggagtcctgccaagccccggatcgacttcgtcctcgtttgggaggaggacctgaagctagacaggcagcaggacagtgccgcccgggacagaacagacatgcacaggacctggcgggagacttttctggataatcttcgtgcggctgggctgtgtgtagaccaggtacgtggaggctgtcatgggcagggccctaggccctgcatccactcagtgacccatgaccttgccgcatgaggcctgagggcatggtgtccagagtcccagagcagatcaggccccaaagtcctgctggaccccccagccaccgtgagctcctccgtgtggctagggagctgctgtccagaggcggaggtaaacattgatccctcctgcacactcagctctctcatggaagtcggagccctcagggtcacctgaaaactctgacactacctttgccattcacctgtcccgtctccaacattaaagcttttgggtaggcgtgt

SEQ ID NO: 107948 - DNA, 2652 bp, Homo sapiens
  Payload ID: 1190
  Gene Symbol: ANO7
  Gene Name: anoctamin 7
  Uniprot ID: Q6IWH7
  ENST ID: ENST00000402430
  CDS Start-End: 1-2652
atgcgaatggctgccactgcctgggcggggctccaagggccacccctccccaccctctgtcccgcagtgaggacgggactctactgccgagaccaggctcacgctgagaggtgggccatgacctccgagacctcttccggaagccactgtgccaggagcaggatgctgcggcgacgggcccaggaagaggacagcaccgtcctgatcgatgtgagcccccctgaggcagagaagaggggctcttacgggagcacagcccacgcctcggagccaggtggacagcaagcggccgcctgcagagctgggagtcctgccaagccccggatcgacttcgtcctcgtttgggaggaggacctgaagctagacaggcagcaggacagtgccgcccgggacagaacagacatgcacaggacctggcgggagacttttctggataatcttcgtgcggctgggctgtgtgtagaccagcaggacgtccaggacgggaacaccacagtgcactacgccctcctcagcgcctcctgggctgtgctctgctactacgccgaagacctgcgcctgaagctgcccttgcaggagttacccaaccaggcctccaactggtcggccggcctgctggcatggctgggcatccccaacgtcctgctggaggttgtgccagacgtaccccccgagtactactcctgccggttcagagtgaacaagctgccacgcttcctcgggagtgacaaccaggacaccttcttcacaagcaccaagaggcaccaaattctgtttgagatcctggccaagaccccgtatggccacgagaagaaaaacctgcttgggatccaccagctgctggcagagggtgtcctcagtgccgccttccccctgcatgacggccccttcaagacgcccccagagggcccgcaggctccacgcctcaaccagcgccaagtccttttccagcactgggcgcgctggggcaagtggaacaagtaccagcccctggaccacgtgcgcaggtacttcggggagaaggtggccctctacttcgcctggctcgggttttacacaggctggctcctgccagcggcagtggtgggcacactggtgttcctggtgggctgcttcctggtgttctcagacatacccacgcaggaactgtgtggcagcaaggacagcttcgagatgtgcccactttgcctcgactgccctttctggctgctctccagcgcctgtgccctggcccaggccggccggctgttcgaccacggcggcaccgtgttcttcagcttgttcatggcactgtgggccgtgctgctgctggagtactggaagcggaagagcgccacgctggcctaccgctgggactgctctgactacgaggacactgaggagaggcctcggccccagtttgccgcctcagcccccatgacagccccgaaccccatcacgggtgaggacgagccctacttccctgagaggagccgcgcgcgccgcatgctggccggctctgtggtgatcgtggtgatggtggccgtggtggtcatgtgcctcgtgtctatcatcctgtaccgtgccatcatggccatcgtggtgtccaggtcgggcaacacccttctcgcagcctgggcctctcgcatcgccagcctcacggggtctgtagtgaacctcgtcttcatcctcatcctctccaagatctatgtatccctggcccacgtcctgacacgatgggaaatgcaccgcacccagaccaagttcgaggacgccttcaccctcaaggtgttcatcttccagttcgtcaacttctactcctcacccgtctacattgccttcttcaagggcaggtttgtgggatacccaggcaactaccacaccttgtttggagtccgcaatgaggagtgcgcggctggaggctgcctgatcgagctggcacaggagctcctggtcatcatggtgggcaagcaggtcatcaacaacatgcaggaggtcctcatcccgaagctaaagggctggtggcagaagttccggcttcgctccaagaagaggaaggcgggagcttctgcaggggctagccaggggccctgggaggacgactatgagcttgtgccctgtgagggtctgtttgacgagtacctggaaatggtgctgcagttcggcttcgtcaccatcttcgtggccgcctgtccgctcgcgccgctcttcgccctgctcaacaactgggtggagatccgcttggacgcgcgcaagttcgtctgcgagtaccggcgcccggtggccgagcgcgcccaggacatcggcatctggttccacatcctggcgggcctcacgcacctggcggtcatcagcaacgccttcctcctggccttctcgtccgacttcctgccgcgcgcctactaccggtggacccgcgcccacgacctgcgcggcttcctcaacttcacgctggcgcgagccccgtcctccttcgccgccgcgcacaaccgcacgtgcaggtatcgggctttccgggatgacgatggacattattcccagacctactggaatcttcttgccatccgcctggccttcgtcattgtgtttgaggtagccgaggcacctgctggttctcccatccatggcatgaggccccgaccctgtgctttgcctaattcgagcacgtggtga

SEQ ID NO: 107949 - DNA, 555 bp, Homo sapiens
  Payload ID: 1190
  Gene Symbol: ANO7
  Gene Name: anoctamin 7
  ENST ID: ENST00000451047
  CDS Start-End: 1-555
cgcggggggcgcgttccgagggctgagggcggacggtggcggagagcccggccgtgaccccctccccgcagtgctgcagttcggcttcgtcaccatcttcgtggccgcctgtccgctcgcgccgctcttcgccctgctcaacaactgggtggagatccgcttggacgcgcgcaagttcgtctgcgagtaccggcgcccggtggccgagcgcgcccaggacatcggcatctggttccacatcctggcgggcctcacgcacctggcggtcatcagcaacgccttcctcctggccttctcgtccgacttcctgccgcgcgcctactaccggtggacccgcgcccacgacctgcgcggcttcctcaacttcacgctggcgcgagccccgtcctccttcgccgccgcgcacaaccgcacgtgcaggtatcgggctttccgggatgacgatggacattattcccagacctactggaatcttcttgccatccgcctggccttcgtcattgtgtttgagcatgtggttttctccgttggccgcctcctggacctcctggtgcc

SEQ ID NO: 107950 - DNA, 4152 bp, Homo sapiens
  Payload ID: 1191
  Gene Symbol: ANO8
  Gene Name: anoctamin 8
  Uniprot ID: Q9HCE9
  ENST ID: ENST00000159087
  CDS Start-End: 160-3858
cgagaagcagcgctcgggcgagcgaggaccgaggccggcgcgggcgggcgcggcctttgtctcctcctcccgcgcgctccgcggctgcaccggccccatgagcccgcggctccccgtcgcccgggccgtccgtagcccctgacctgacctgtcctcgccatggccgaggccgcctccggcgccgggggcacgtccctggagggcgagcgtggcaagaggcccccgccggagggcgagcctgcagccccggcgtccggagttctggataagcttttcggaaagcggctcctgcaggctggtcgctacctggtgtcccacaaggcgtggatgaagacggtgcctacagagaactgcgacgtgctgatgaccttcccagacacgaccgatgaccacacgctgctatggctgctgaaccacatccgcgtgggcattcccgagctcatcgtgcaagtccgccaccaccgccacacgcgtgcctacgccttctttgtcaccgccacgtatgagagcctactccgaggggccgacgagctgggtctgcgcaaagcagtgaaggccgagtttggcgggggcacccgcggcttctcctgcgaggaggactttatctatgagaatgtggagagcgagctacgcttcttcacctcccaggaacgccagagcatcatccgcttctggctgcagaatttgcgtgccaagcagggagaagcactccacaacgtgcgcttcctggaggaccagccaatcatcccggagctggcagcacgtgggatcatccagcaggtgttccctgtccacgagcagcgtattctgaaccgcctcatgaagtcatgggtgcaggccgtgtgtgaaaaccagcctctagatgacatctgtgattactttggtgtgaaaattgccatgtacttcgcctggctgggcttctacacgtcggctatggtatacccagctgtcttcgggtctgtcctgtacacattcacagaggctgatcagacaagccgggatgtttcctgcgtggtctttgccctcttcaacgtgatctggtcgacgctgttcctagaggaatggaagcggagaggggctgagctggcatataagtgggggacgctggactcacctggggaagccgtggaggagccacgcccccagttcaggggcgtgcgacgtatcagccccatcacgcgggccgaggagttctactacccgccctggaagcggctgctcttccagctgcttgtgagcctccccctgtgcctggcgtgcctcgtctgtgtcttcttgctcatgcttggctgcttccagctgcaggagctggtgctgagcgtgaaggggttgccccgtctcgcccgattcctgcctaaggtcatgctggccctgcttgtcagtgtgagtgccgagggctacaagaagctagccatctggctcaatgacatggaaaattaccggctggagagcgcctatgagaagcacctcatcatcaaagttgtcctgttccagtttgtcaactcgtacctgagcctcttctacatcggtttctacctcaaggacatggagcgcttgaaagagatgctggccacgctgctgatcacccgccagttcctccagaacgtgcgcgaggtcctgcagccgcacctgtaccggcgcctgggccgcggcgagctgggcctgcgggccgtctgggagctggcccgagccctgcttggcctcctgagcctccggcgccctgcgccccgccgcctcgaaccccaggcggatgagggcgggggcggcggcagcgggggcgggggccgcaggtgcctcagcgggggctgcggggcgccggaggaggaggaggaggcggcgctggtggagcggcggcgggcgggggaaggcggggaggagggggacgggcctccagggggcaaggaggaggacgaggacgacgaggaggaggaggacgaggaggaagaggaggacgaggaggagggcgaggaagggggcctcctggactgcgggctccggctgaagaaggtcagcttcgctgagcgcggcgcggggcggcgtcggcccggcccaagcccggaggccctcctggaggaagggagccccactatggtggagaaggggctggagccgggagtgttcaccctggccgaggaggacgacgaggcggagggggctcccggcagccctgaacgggagcccccggccatcttgttccgccgggccgggggcgagggccgagaccaggggcccgacgggggcccggacccggaacccggctccaacagcgattcgacccgtaggcagagacggcagaaccggtcgtcttggattgacccgccggaggaggaacactcgccccagctcacccaggcagagctggagagctgtatgaagaagtacgaggacacgttccaggactaccaggagatgttcgtgcagttcggctacgttgtgctcttctcgtccgccttccccctggcggcgctgtgcgccctggtcaacaacctcattgagatccgcagcgacgccttcaagctgtgcaccgggctgcagcggcccttcggccagcgcgtggaaagcatcggccagtggcagaaggtgatggaggccatgggtgtcctagcgattgtggtcaactgctacttaatcggccagtgcgggcagctgcagcgcctcttcccctggctgagcccggaggcagccatcgtgtcggtggtagtgctcgagcacttcgctctgctcctcaagtacctcatccacgtggccatccccgatatcccgggctgggtggccgaggaaatggccaagctggagtaccagcgccgcgaggcctttaagagacacgagcgccaggcccagcatcgctaccagcagcagcagcgcaggcggcgggaggaggaggagcgacagcgccatgcagagcaccatgcccggcgggagcatgattctggtggccgagaggaggcgagggccgagggctctgggctggaccctgccacctcctccgagaaggcctctgccaaggccaagggcagcactgcgggtggccacgggcctgaacggcccaagcgcccagggtccctgctggcacccaacaacgtcatgaagttgaagcagatcatcccactgcagggcaaattcctctcgtcaggggccacatcctcactggctgctgcaggggccggagccaccacccggcctccccctgcccagtcacccacaggcagcgacacccgcctgcctgccttcctcagcttcaagttcctcaagtcacccgagacccggcgggactctgagcgcagccactcaccgcccaaagccttccatgctggcaagctcttcccctttggtggcacccgggctgagcctgggtccaacggggcgggcgggcaggcccggccagatgggacccccagcagtggcagcagccgggttcagaggagtgggccggtggacgaggccctggctgaggagctggaagccccccggcccgaagaggaaggctcagggacagcgctggcccccgtgggcgcccctgccctccgcacccgccgcagccggagccccgcgccgccgccgccaatgccgctgccccggcccccgacaccgcccgcaggctgctggcagtgggacgggccctggggctgcgggggcgagggtgccgccccccgccaggccctggccgctgccgagtgcccaccctgtgccatggccgggcccccacccgccccccagcccctgccgggagacgccagcttttacagcctcccgcccccaccgctaccgcccacctcggatcccctcgagaccccagcgccctcccctagccccagccccagcccccaggccgtgtgctggcccagcggctggcattagctctacccgccctgccttctcttctcatatgcaatatcagtcattcacaggggcggccggtctccaaaatgcaaaatgcgcttcagcccccgagggcccccagtattggtcggtgccccccatctgccgttttcctttccaaacgaaaggaaacccacaaatccaacagaaaacacacacacacacacacacacacacacacacagaacaggcgattatttatttgtttttaatttattttgtcatatttttgtaaaacggcagaaatgcaataaaaactatatttcaacagtg

SEQ ID NO: 107951 - DNA, 4618 bp, Homo sapiens
  Payload ID: 1191
  Gene Symbol: ANO8
  Gene Name: anoctamin 8
  ENST ID: ENST00000597643
  CDS Start-End: 68-1813
gccccatgagcccgcggctccccgtcgcccgggccgtccgtagcccctgacctgacctgtcctcgccatggccgaggccgcctccggcgccgggggcacgtccctggagggcgagcgtggcaagaggcccccgccggagggcgagcctgcagccccggcgtccggagttctggataagcttttcggaaagcggctcctgcaggctggtcgctacctggtgtcccacaaggcgtggatgaagacggtgcctacagagaactgcgacgtgctgatgaccttcccagacacgaccgatgaccacacgctgctatggctgctgaaccacatccgcgtgggcattcccgagctcatcgtgcaagtccgccaccaccgccacacgcgtgcctacgccttctttgtcaccgccacgtatgagagcctactccgaggggccgacgagctgggtctgcgcaaagcagtgaaggccgagtttggcgggggcacccgcggcttctcctgcgaggaggactttatctatgagaatgtggagagcgagctacgcttcttcacctcccaggaacgccagagcatcatccgcttctggctgcagaatttgcgtgccaagcagggagaagcactccacaacgtgcgcttcctggaggaccagccaatcatcccggagctggcagcacgtgggatcatccagcaggtgttccctgtccacgagcagcgtattctgaaccgcctcatgaagtcatgggtgcaggccgtgtgtgaaaaccagcctctagatgacatctgtgattactttggtgtgaaaattgccatgtacttcgcctggctgggcttctacacgtcggctatggtatacccagctgtcttcgggtctgtcctgtacacattcacagaggctgatcagacaagccgggatgtttcctgcgtggtctttgccctcttcaacgtgatctggtcgacgctgttcctagaggaatggaagcggagaggggctgagctggcatataagtgggggacgctggactcacctggggaagccgtggaggagccacgcccccagttcaggggcgtgcgacgtatcagccccatcacgcgggccgaggagttctactacccgccctggaagcggctgctcttccagctgcttgtgagcctccccctgtgcctggcgtgcctcgtctgtgtcttcttgctcatgcttggctgcttccagctgcaggagctggtgctgagcgtgaaggggttgccccgtctcgcccgattcctgcctaaggtcatgctggccctgcttgtcagtgtgagtgccgagggctacaagaagctagccatctggctcaatgacatggaaaattaccggctggagagcgcctatgagaagcacctcatcatcaaagttgtcctgttccagtttgtcaactcgtacctgagcctcttctacatcggtttctacctcaaggacatggagcgcttgaaagagctcctgctcgtcctgtccctgtcccagagcctcgagcggcagctgcaggcggtgctggtcccgctcgcggccctgcggttccgcctgctcctcctctccctccggggcctcctgctcgcggcccgggccaaagtacgggcaggtggcgagcccgtgggtcctcgccggggtgggcagcgtggctgtgctgggggcctggcgcgccgagctgagggcgcatgcgcggagggaatctggggtcgggggcggccagcaagcaggtgcaggcggctgggggcgcacgcggcccagtgcaccgacagagcccgcggtggggtggagacgcgctgggcctgcccgtgaggtgggcgaggagcgctgcgcgtgccaggctgtattttgtggctgagcgctgggggcctcgcgtcgaggcgcgtccaaagcagcggagttaggaaccggattcggcgtgtgtctgggcacggtgctccggcggggcgcccagggagggtgagtcccccgatcccggcgccccgcttgccccccacgcgcctctctccttccccttcctgcccccagatgctggccacgctgctgatcacccgccagttcctccagaacgtgcgcgaggtcctgcagccgcacctgtaccggcgcctgggccgcggcgagctgggcctgcgggccgtctgggagctggcccgagccctgcttggcctcctgagcctccggcgccctgcgccccgccgcctcgaaccccaggcggatgagggcgggggcggcggcagcgggggcgggggccgcaggtgcctcagcgggggctgcggggcgccggaggaggaggaggaggcggcgctggtggagcggcggcgggcgggggaaggcggggaggagggggacgggcctccagggggcaaggaggaggacgaggacgacgaggaggaggaggacgaggaggaagaggaggacgaggaggagggcgaggaagggggcctcctggactgcgggctccggctgaagaaggtcagcttcgctgagcgcggcgcggggcggcgtcggcccggcccaagcccggaggccctcctggaggaagggagccccactatggtggagaaggggctggagccgggagtgttcaccctggccgaggaggacgacgaggcggagggggctcccggcagccctgaacgggagcccccggccatcttgttccgccgggccgggggcgagggccgagaccaggggcccgacgggggcccggacccggaacccggctccaacagcgattcgacccgtaggcagagacggcagaaccggtcgtcttggattgacccgccggaggaggaacactcgccccagctcacccaggcagagctggagagctgtatgaagaagtacgaggacacgttccaggactaccaggagatgttcgtgcagttcggctacgttgtgctcttctcgtccgccttccccctggcggcgctgtgcgccctggtcaacaacctcattgagatccgcagcgacgccttcaagctgtgcaccgggctgcagcggcccttcggccagcgcgtggaaagcatcggccagtggcagaaggtgatggaggccatgggtgtcctagcgattgtggtcaactgctacttaatcggccagtgcgggcagctgcagcgcctcttcccctggctgagcccggaggcagccatcgtgtcggtggtagtgctcgagcacttcgctctgctcctcaagtacctcatccacgtggccatccccgatatcccgggctgggtggccgaggaaatggccaagctggagtaccagcgccgcgaggcctttaagagacacgagcgccaggcccagcatcgctaccagcagcagcagcgcaggcggcgggaggaggaggagcgacagcgccatgcagagcaccatgcccggcgggagcatgattctggtggccgagaggaggcgagggccgagggctctgggctggaccctgccacctcctccgagaaggcctctgccaaggccaagggcagcactgcgggtggccacgggcctgaacggcccaagcgcccagggtccctgctggcacccaacaacgtcatgaagttgaagcagatcatcccactgcagggcaaattcctctcgtcaggggccacatcctcactggctgctgcaggggccggagccaccacccggcctccccctgcccagtcacccacaggcagcgacacccgcctgcctgccttcctcagcttcaagttcctcaagtcacccgagacccggcgggactctgagcgcagccactcaccgcccaaagccttccatgctggcaagctcttcccctttggtggcacccgggctgagcctgggtccaacggggcgggcgggcaggcccggccagatgggacccccagcagtggcagcagccgggttcagaggagtgggccggtggacgaggccctggctgaggagctggaagccccccggcccgaagaggaaggctcagggacagcgctggcccccgtgggcgcccctgccctccgcacccgccgcagccggagccccgcgccgccgccgccaatgccgctgccccggcccccgacaccgcccgcaggctgctggcagtgggacgggccctggggctgcgggggcgagggtgccgccccccgccaggccctggccgctgccgagtgcccaccctgtgccatggccgggcccccacccgccccccagcccctgccgggagacgccagcttttacagcctcccgcccccaccgctaccgcccacctcggatcccctcgagaccccagcgccctcccctagccccagccccagcccccaggccgtgtgctggcccagcggctggcattagctctacccgccctgccttctcttctcatatgcaatatcagtcattcacaggggcggccggtctccaaaatgcaaaatgcgcttcagcccccgagggcccccagtattggtcggtgccccccatctgccgttttcctttccaaacgaaaggaaacccacaaatccaacagaaaacacacacacacacacacacacacacacacacagaacaggcgattatttatttgtttttaatttattttgtcatatttttgtaaaacggcagaaatgcaataaaaactatatttcaacagtg

SEQ ID NO: 107952 - DNA, 1905 bp, Homo sapiens
  Payload ID: 1191
  Gene Symbol: ANO8
  Gene Name: anoctamin 8
  ENST ID: ENST00000630631
  CDS Start-End: 160-1905
cgagaagcagcgctcgggcgagcgaggaccgaggccggcgcgggcgggcgcggcctttgtctcctcctcccgcgcgctccgcggctgcaccggccccatgagcccgcggctccccgtcgcccgggccgtccgtagcccctgacctgacctgtcctcgccatggccgaggccgcctccggcgccgggggcacgtccctggagggcgagcgtggcaagaggcccccgccggagggcgagcctgcagccccggcgtccggagttctggataagcttttcggaaagcggctcctgcaggctggtcgctacctggtgtcccacaaggcgtggatgaagacggtgcctacagagaactgcgacgtgctgatgaccttcccagacacgaccgatgaccacacgctgctatggctgctgaaccacatccgcgtgggcattcccgagctcatcgtgcaagtccgccaccaccgccacacgcgtgcctacgccttctttgtcaccgccacgtatgagagcctactccgaggggccgacgagctgggtctgcgcaaagcagtgaaggccgagtttggcgggggcacccgcggcttctcctgcgaggaggactttatctatgagaatgtggagagcgagctacgcttcttcacctcccaggaacgccagagcatcatccgcttctggctgcagaatttgcgtgccaagcagggagaagcactccacaacgtgcgcttcctggaggaccagccaatcatcccggagctggcagcacgtgggatcatccagcaggtgttccctgtccacgagcagcgtattctgaaccgcctcatgaagtcatgggtgcaggccgtgtgtgaaaaccagcctctagatgacatctgtgattactttggtgtgaaaattgccatgtacttcgcctggctgggcttctacacgtcggctatggtatacccagctgtcttcgggtctgtcctgtacacattcacagaggctgatcagacaagccgggatgtttcctgcgtggtctttgccctcttcaacgtgatctggtcgacgctgttcctagaggaatggaagcggagaggggctgagctggcatataagtgggggacgctggactcacctggggaagccgtggaggagccacgcccccagttcaggggcgtgcgacgtatcagccccatcacgcgggccgaggagttctactacccgccctggaagcggctgctcttccagctgcttgtgagcctccccctgtgcctggcgtgcctcgtctgtgtcttcttgctcatgcttggctgcttccagctgcaggagctggtgctgagcgtgaaggggttgccccgtctcgcccgattcctgcctaaggtcatgctggccctgcttgtcagtgtgagtgccgagggctacaagaagctagccatctggctcaatgacatggaaaattaccggctggagagcgcctatgagaagcacctcatcatcaaagttgtcctgttccagtttgtcaactcgtacctgagcctcttctacatcggtttctacctcaaggacatggagcgcttgaaagagctcctgctcgtcctgtccctgtcccagagcctcgagcggcagctgcaggcggtgctggtcccgctcgcggccctgcggttccgcctgctcctcctctccctccggggcctcctgctcgcggcccgggccaaagtacgggcaggtggcgagcccgtgggtcctcgccggggtgggcagcgtggctgtgctgggggcctggcgcgccgagctgagggcgcatgcgcggagggaatctggggtcgggggcggccagcaagcaggtgcaggcggctgggggcgcacgcggcccagtgcaccgacagagcccgcggtggggtggagacgcgctgggcctgcccgtga

SEQ ID NO: 107953 - DNA, 2542 bp, Homo sapiens
  Payload ID: 1192
  Gene Symbol: ANO9
  Gene Name: anoctamin 9
  Uniprot ID: A1A5B4
  ENST ID: ENST00000332826
  CDS Start-End: 86-2434
acgcggaagtcaggtaggagcacccgccgctggcagccactctcctggccgccaaaccccagctggaactccggccacagccagcatgcagggcgaagagagcctccggatcctggtggagcccgaaggggacagcttcccgctgatggagatcagcacctgtgagaccgaggcctccgagcagtgggactatgtcctcgtggcccaacgtcacacccagagagacccccggcaggcgcggcagcaacagttcctggaggagctcaggagaaagggcttccacattaaggtgatccgggaccagaaacaggtcttctttgggatccgtgctgacaacagtgtctttggcctgtaccgcactctcctcctggagcctgaggggcctgccccccacgccgagctggccgcgccgaccaccatcccggtcaccacgagtctcagaatccgaatcgtgaacttcgttgtcatgaacaacaagacctcggctggtgagaccttcgaggatctgatgaaggacggggtctttgaggccaggttccccctgcacaagggggagggacgcctgaagaagacgtgggcgcggtggagacacatgttccgggagcagccagttgatgaaatcaggaactactttggggaaaaggtggccctgtacttcgtctggctgggctggtacacctacatgctggtgccggccgccctgacgggcctcttagtctttctgagcggattctcgctgtttgaggccagccagatcagcaaggagatctgtgaggcccacgacatcctcatgtgtcccctcggcgaccacagccgcaggtaccagcggctctcggaaacctgcacttttgccaagctcacccacctctttgacaatgatggcacggtggtgttcgccatcttcatggctctctgggccacggtgttcctggagatctggaagcggcagcgcgcccgcgtggtcctgcactgggacctgtacgtgtgggacgaggaacaggaggaaatggcacttcagctcattaactgccccgactacaagctccggccataccagcactcctacctacgcagcaccgtcatcctcgtcctgaccctgctcatgatctgcctcatgatcggcatggcccacgtcctggtggtctaccgcgtcctggcctccgcgctcttcagcagctcggccgtgcccttcctggaggagcaggtgaccacggccgtggtggtgaccggggctctggtgcactatgtgaccatcatcatcatgaccaagatcaacaggtgcgtggccctgaagctttgtgacttcgagatgcccaggaccttctcggagcgagagagcaggttcaccatccgcttcttcacactgcagttcttcacccatttctcgtctctcatctacatcgccttcatcctgggcaggatcaacggccaccccgggaagtccacgcgcctggcgggcttgtggaagctggaagagtgccacgccagcggctgcatgatggacctcttcgtgcagatggccatcatcatgggcctgaagcagacgctcagcaactgcgtcgagtacctggtcccgtgggtgacccacaagtgccgctctctgcgggcctccgagtccgggcacctgccccgggaccccgagctcagggactggcggcgcaactaccttctgaacccggtcaacaccttcagcctgttcgacgagttcatggagatgatgatccagtacggcttcaccaccatcttcgtggccgccttcccgctggcgccgctgctcgcgctcttcagcaacctcgtggagatccgcctggacgccatcaagatggtctggttgcagcggcgcctggtgccgcgcaaggccaaggacatcgggacctggctgcaggtgctggagaccatcggtgtgctggcggtcattgccaatgggatggtcattgccttcacatctgagttcatcccccgagtggtctacaagtaccgctatagcccatgcctgaaagaaggcaactctactgtcgactgcctcaagggctacgtcaaccacagcctgtccgtcttccacaccaaggacttccaggaccctgatgggattgagggctcagaaaacgtgactctgtgcagatacagggactaccgcaatccccccgattacaacttctccgagcagttctggttcctcctggccatccgcctggccttcgtcatcctctttgagcacgtggccttgtgcatcaagctcatcgccgcctggttcgtgcccgacatccctcagtcggtgaagaacaaggttctggaggtgaagtaccagaggctgcgtgagaagatgtggcatggaaggcagaggctgggtggggtgggggcaggctctcggcccccaatgcctgcccatcccaccccagcatccatcttcagtgccaggagcacagacgtgtagggccagagcccgtccagaggccaccaggagctgagacagtgccaccaccagcacctcccacaagcccaccgctgtgcgtgttgaggggtgctgtgagaaggctgtgcc

SEQ ID NO: 107954 - DNA, 1765 bp, Homo sapiens
  Payload ID: 1193
  Gene Symbol: ANHX
  Gene Name: anomalous homeobox
  Uniprot ID: E9PGG2
  ENST ID: ENST00000419717
  CDS Start-End: 53-1192
gtgcgccggcgctgaagcgggtcccggaggagtggccacgacccagcacaggatgcagagcttcctgactctgctgaaggagcatgaggacacctgtgcacccccggcggagctggtgacccttgcgggcagactgtgccgggacttccaggatgaccttgcccaactgcagcctttggtcacagccattctggacagccagctccgcctgcatctcctggacaacgcagatgtggccctggcgtgcgcccgtgtcctggaccagcaggagcagcagcaggcggcttgccgcctcctggaggggtgccaggtgccgggaggcagccaggagttagtgcagctctggaacgacatccactaccgtctggtcatgaggaggctgggcgtggctgcgctcaccccggtgcagaagttccgctgcaggaagaggaaccccccgcccccctccctctgcccagaggggctgaagagccggaacttccccagagaggttcgtgagaagctgcacaatttcgctgtgggggtgaacaccaaccccagcaaggctgagagggagaacttggcattggagacgagcttgacccctgagcaggtgtacaactggtttgccaattaccggcgccgccaaagagcccttccccagcacatgaagccagcccagcaggccacagctgaagaccctggtgcgagggagaggggtcctgacctcctgcagccctcaggcaacccccgtgttgactctgggtttgtggacaggcctcagtggtcagaggaacgtgaggaaaaggggcctccacagtccccacagaccacccaaggaccatgggagccactggccttagccccggactttcccgcagatgagacagtctcaaagccactggatgtcagcggccatccccagagcgtgcaattggaggagggtctgggcacaagcagtggacggacagagctacgggtgggcagcttcctggtgacacagcccccactgcaagctcctgaattcatcctcacccagagccctccagagctggccccagccccatctgccttccccggccctgtgtctgccatggagctgagccaggccctgccctccagccaggtgcagtgttctgatagccaggcctctggtgatgccttctggggagccaggatgctccttgagttttcagggagcagcctgggctgagctatccccaggagccagacagcaccccaggaggagcgggtgtggatggtctgcctggtcaacacaaggagttacagagctttatcctgaatacaaaatgaaggtccccagagttcccctgggggctctgctgaaaagcagagattctttcccactgccatgtttgaatagtttggttagcaattccctgtagtagagaaagcatttgagaaatgttcgtgagatcagaagtcaaaggtgggtctgtcccactcacgcagcactggatcagtcgggctccggggcactcgtgcagagaaggccattctagagaggggagtgttctgctgctggctgccttgccgtctgcccgtgcacacagccagacttttccaccaagttaactgagtgaggtatgaggagtgttctgagatttctgtgtgtaggggcttctcccttgagtactgggaggcaaacctgtctgcgaatggcctaggcagggcagagtagggtggattttccctccaggttgtaattcactgtgtctatgacacaaatgttgtagtcaattaaagtttaatgttttgaactccc

SEQ ID NO: 107955 - DNA, 3452 bp, Homo sapiens
  Payload ID: 1193
  Gene Symbol: ANHX
  Gene Name: anomalous homeobox
  Uniprot ID: E9PGG2
  ENST ID: ENST00000545940
  CDS Start-End: 1740-2879
accccgcaccgcacaccccagaaaccccaggtcgtccgggactcctcggacccgcagatgccacggacaccagatcccccacggacccctcagctcccccggactccgcggtcgcatcgggggctgaggggcgccggcccccgggacgccttgtgggcggggcctcgcgggattggctgcgagcctggatactttgtagcacccgcaccttctgtgctgcccagcgcctcctcgccagccccgggtgcgcgccaagcacgtgcgccggcgctgaagcgggtcccggagggtgaggggcgcgcgggcaggggggtccgggaggatgagggacgcgcgggggcagggggggcctggaatgtgaggggcgcgggggcgggggtcccagagggtgaggggcgcgcaggcggggggggtcctggaggataaggggcgcggaggcggggggtcccggaaggtgaggggcgctagggcaggagtccctgagggtaaggggggccccggagggtgaggggtgcgggggccggggtggggctgagggtggagcctcccaggctggagccccaggcaggaatttcggcctccgcagggagcagcgtgccagaaaggtaggggggctgggggccatgggcgggggtcccgccaaagtcaggaagccaagcagagccacctcccgcgacccttcccctccattcagctggagccgggtgcccctcagggcaccgggcggacaggccaaggtaccccacaggaacctttttccttcctgaagtggcaggaaccccgcccctcccagagccggtgggggtcggcgttgcaggaaacccaggcctgggagcctcctctgccctcctccaaggcccctgcaggctctgttcccccaagggaccccaggtccagggcctcctgcccactgtggcagctggaaactcagagccccgagtcaggacccgggtgagatggcgctagagcccgggaacgggtggagtagacgaggtcgcgtccccttggcgggcgcacggcagaaagaacccctcgccagggagcgcgcagcctacctggttcttcgcggctgtgaggatttacaaaccttttggaaagcagtttggcaacacctactaccctgcccctacttctgtgaataaaagtgtattccgcagaagtaagatcgattggggagggttttctgttgggaaaagcagtcactggcagctgcctgaatgtccttaggtgaggcaccgttagaacaagtaaaggttcctcctgtgtggatgcaggaccaagcgtgtgattgcaaagtgtgtctttgacattgtttggattaagtattggcgtgagcagtttctgctgttaaaacaagtgcatgtatgtgggttcagatgaaaggccttggcatccactggtgacccctgcacacaaggtccctaccctactgagcccagagcagtggaggagctgttgcagacagtacccagcccagtgcttggtgcacagccgtgttcgttaaggactaaagtatttgggggattagaaggaaattctagagggtgtatgctatggtgctgccctctctcgggatgtgtgaggtcttattcctactctacaagtgtccacggcacaagagccgtgcatcacctgctttgcagagtgggttgggcgattgactgacagaaaggacgtggtcagtggtggccattcttgtgactgtttgtgttggcagagtggccacgacccagcacaggatgcagagcttcctgactctgctgaaggagcatgaggacacctgtgcacccccggcggagctggtgacccttgcgggcagactgtgccgggacttccaggatgaccttgcccaactgcagcctttggtcacagccattctggacagccagctccgcctgcatctcctggacaacgcagatgtggccctggcgtgcgcccgtgtcctggaccagcaggagcagcagcaggcggcttgccgcctcctggaggggtgccaggtgccgggaggcagccaggagttagtgcagctctggaacgacatccactaccgtctggtcatgaggaggctgggcgtggctgcgctcaccccggtgcagaagttccgctgcaggaagaggaaccccccgcccccctccctctgcccagaggggctgaagagccggaacttccccagagaggttcgtgagaagctgcacaatttcgctgtgggggtgaacaccaaccccagcaaggctgagagggagaacttggcattggagacgagcttgacccctgagcaggtgtacaactggtttgccaattaccggcgccgccaaagagcccttccccagcacatgaagccagcccagcaggccacagctgaagaccctggtgcgagggagaggggtcctgacctcctgcagccctcaggcaacccccgtgttgactctgggtttgtggacaggcctcagtggtcagaggaacgtgaggaaaaggggcctccacagtccccacagaccacccaaggaccatgggagccactggccttagccccggactttcccgcagatgagacagtctcaaagccactggatgtcagcggccatccccagagcgtgcaattggaggagggtctgggcacaagcagtggacggacagagctacgggtgggcagcttcctggtgacacagcccccactgcaagctcctgaattcatcctcacccagagccctccagagctggccccagccccatctgccttccccggccctgtgtctgccatggagctgagccaggccctgccctccagccaggtgcagtgttctgatagccaggcctctggtgatgccttctggggagccaggatgctccttgagttttcagggagcagcctgggctgagctatccccaggagccagacagcaccccaggaggagcgggtgtggatggtctgcctggtcaacacaaggagttacagagctttatcctgaatacaaaatgaaggtccccagagttcccctgggggctctgctgaaaagcagagattctttcccactgccatgtttgaatagtttggttagcaattccctgtagtagagaaagcatttgagaaatgttcgtgagatcagaagtcaaaggtgggtctgtcccactcacgcagcactggatcagtcgggctccggggcactcgtgcagagaaggccattctagagaggggagtgttctgctgctggctgccttgccgtctgcccgtgcacacagccagacttttccaccaagttaactgagtgaggtatgaggagtgttctgagatttctgtgtgtaggggcttctcccttgagtactgggaggcaaacctgtctgcgaatggcctaggcagggcagagtagggtggattttccctccaggttgtaattcactgtgtctatgacacaaatgttgtagtcaattaaagtttaatgttttgaactccc

SEQ ID NO: 107956 - DNA, 6314 bp, Homo sapiens
  Payload ID: 1194
  Gene Symbol: ANOS1
  Gene Name: anosmin 1
  Uniprot ID: P23352
  ENST ID: ENST00000262648
  CDS Start-End: 151-2193
gtcggcgaggagggtccggccggagttgaaggattgaactttccggctcagtcgcggcgtctgcctggtcctcagcagtgcagccccggcgcggagcagggagcctcggcccgcgcccggcgccctcgccctcgccctcgacccgcagccatggtgcccggggtgcccggcgcggtcctgaccctctgcctctggctggcggcctccagcggctgcctggcggccggccccggcgcggctgctgcgcggcggctggacgagtcgctgtctgccgggagcgtccagcgcgctcgctgcgcctccaggtgcctgagcctgcagatcactcgcatctccgccttcttccagcacttccagaacaatggttccctggtttggtgccagaatcacaagcaatgttctaagtgcctggagccctgcaaggaatcaggggacctgaggaaacaccagtgccaaagcttttgtgagcctctcttccccaagaagagctacgaatgcttgaccagctgtgagttcctcaaatacatcctgttggtgaagcagggggactgtccggctcctgagaaagccagtggatttgcggccgcctgtgttgaaagctgcgaagttgacaatgagtgctctggggtgaagaaatgttgttcgaatgggtgtggacacacctgtcaagtacccaagactctgtacaaaggtgtccccctgaagcccagaaaagagttacgatttacagaactgcagtctggacagctggaggttaagtggtcctcgaaattcaatatttctattgagcctgtgatctatgtggtacaaagaagatggaattatggaatccatcctagcgaagatgacgccactcactggcagacagtggcccagaccacagacgagcgagttcaactgactgacataagacccagccgatggtaccagtttcgagtggctgctgtgaatgtgcatggaactcgaggcttcactgcccccagcaaacacttccgttcttccaaagatccatctgccccaccagcaccggctaacctccggctggccaactccaccgtcaacagtgatgggagtgtgaccgtcactatagtttgggatctccccgaggagccggacatccctgtgcatcattacaaggtcttttggagctggatggtcagcagtaagtctcttgtcccaacaaagaagaagcggagaaagactacggatgggtttcaaaattctgtgatcctggagaaactccagccagactgtgactatgttgtggaattgcaagccataacgtactggggacagacacggctgaagagtgcaaaggtgtcccttcacttcacatcgacacatgcaaccaacaacaaagaacagcttgtgaaaactagaaaaggtggaattcaaacacaactcccttttcaaagacgacgacccactcgcccgctggaagtcggagctcccttctatcaggatggccaactgcaagttaaagtctactggaagaagacagaagatcccactgtcaaccgatatcatgtgcggtggtttcctgaagcgtgtgcccacaacagaacaaccggatcagaggcatcatctggcatgacccacgaaaattacataattcttcaagatctgtcattttcctgcaagtataaggtgactgtccaaccaatacggccaaaaagtcactccaaggcagaagctgttttcttcactactccaccatgctctgctcttaaggggaagagccacaagcctgttggctgcctgggcgaagcaggtcatgttctttctaaggtgctagctaagcctgagaacctttctgcttcattcatcgtccaggatgtgaacatcaccggtcacttttcttggaagatggccaaggccaatctctatcagcccatgactgggtttcaagtgacttgggctgaggtcactacggaaagcagacagaacagcctacccaacagcattatttcacagtcccagatcctgccttccgatcattatgtcctaacagtgcccaatctgagaccatctactctttaccgactggaagtgcaagtgctgaccccaggaggggaggggccggccaccatcaagacgttccggacgccggagctcccaccctcttcagcacacagatctcatcttaagcatcgtcatccacatcattacaagccttctccagaaagatactaaactgttcaaaaagattttgtgaaattgcacagatgtgtaagcttgttgaacttcggccacgagacatgcacacttccagaggcagtgggaactgctcagaggcccggactctcctatgtgactttagtgcaggaagaacttctgtcaatcatggacgcatctggagacaagtgagaaacagtagattggtgaagacagacaccagttccctacaagcatggagaaaatgaagaataggcctgtttaatgctaaattttgttttcatgtatggtgtcgctcatttctattgaattacaacagaactcagttttccctgaatttggagcaccaaactccgccccaaaaaggagagtaacaaatacacaattcacacataacactaagcgtaaatctaatcaataaaatatatttttgactaaattattgattcgatatgaaaaatcaactaagattacacagctttgtttttttgaatctttcctaagatcatttttatcctaggtgatttttaaatgaaaatgtgtaatctaaaatataccagcgaatttaaatctaaaaatgctcctactttaagtaccttgtgctgctctttatgcaaaggtaaatcaaagttccctctataaattatgatttacaaaagacacccaagccagaggaactcaatgaaataagctgctaatcagattttaccttggagaaatgaaaattatttcttggggatgccttttaatatttgatcctattatgtgagagattttcctgatatgttatcttatttatattttcccttattttcctcaatgcagataatagcttttggtgcacttttgtttcaccatctgaaaattcacaaaacttcttgcttcaaatgaaaaaatcccaactattgagcatgtttaaatctttgcagagatttgccttttcttaatcaaagaaaggtctttgtgtgctagaatattattggtaatgttttaaaaattcctttgattgatagagaaggacagttatttgcatttaattcacccatatgctttcaaatctagtatatcttactttttggaaatgttttatgctacaaattagtgccttgtagcatgaacttaagtcaaaacgtgttatcaatatagagtgttgcagtgtatattgtaacaacctaaaacgcagagaagtttaatttaatactgttttttttcttgaaggaatactcacatacatggtttgaaatgtgcatagatatgcatgtctatataattataaatgcatgtgtatatatatgcaaatatatgtacatatacatgtatatacacacagacacatgcatatacatgaatataccttgagcatgaatccctggagaaatcgttttcgtagctcaccaatggtgagtaaagatacagctcttttaaaggtcataaggataatatattttccccatcaatgctgattctgagaaaagagcaatttatcaaaattaaacactgtaaaagaaaggtgtccatatgtctttacctacctaagtaaaacaggaagaaaatcagtaacattatccttaggttttgacaatggtacttgcttcttgttgttttattgtttcctgaattcatgcagatgcctggccattcctgggaagagtggataactcagaagtcactgtactccacagagcctcactgcagtgtctaaaggtagatgcaaattaaaatgcagggaaaataacttttctgatgttgatgcatgtctttgggaaacacatttataaacatggatacctgataatagatattgaaacccatttcctgtgtgttaaaatatttaaaaagtggatattccaggaatgttttgcagctttgtacaagtaacataaattggacacctcagaatgaaagttcatgttggttctgaatggttcactgcagctcctgtcacaagctgggatggatttatcacattgagttatgaaattacctggttctaagaatttttgagtggcaaaaatagaaaacaatcttcatttgaaaacatccctaagcttgaataaatggataccatagatagcttctcttttttattctggtgtcattaccagcatctgaatttcaagttcttaaaatttcaaaaattaaaatttttcattattagctatccatttatcttttacatgaacttgtcatgaacaaattcaaatgtttatgccagcaaatttttgtactgttgcatagttaaaaatgctgggagtctctgcatagatacaaaatattattaaattattacataaatttaattttataaaatttaatcatgcttcttttgtctgggtaatagacattggacagatatttttagttcagatggtgattctgaagcttacatctcccttaaaaaaatctaaagcagctcttatgggcttctaattttaatataaataaataatttaaattttattggtgttattggaagaaaaatgctattaatgggctaataaaaaacatgtgtttctcttatggattttaataagctccagtattattcaaatgatcaaaaatatagttataattttttgaattttaaaaatgtgattgctctaataaagaataaaatctatgctttttaacaaacatagttttggtgcctaattctgtaatatgttttattgaaattagattcatttctctaatgtgagaaaaatatatccagtaatagtattgactgtttaaaaaattgagctcatcaaaaatattgtcatcaaatacaggtggttaatctgacatacattgcagttacatgcattatttttatttacaacatttgctccttaatgatgaatttatctgtgttaccctgtttttctacctggaactccatagaatgatgtttgcaaaccaacatgtgctcttttcagtcattcactgttttaatatgacatggtagagaagataaggtttatggcaggtaattttttgtaatgtgtattaaacgaagttcaaagattagaaatacatctgtgtcctgaaaaccttagatacatagccgactgtatacagaggttcatctcaacctcaacactattgacttttggggctggatagttctctgttgtgggggtttgtcttgtgcactgtaggtttttagtagcatccacactttctcctcaccagatgccagttgcaccctcccccaagttgagacaaccaaaaatgtctccagatattgccagctaccccttgagggatggtacctctggttgagaaccattgctagagaatgatctttactgaatttgccctttataagaaacccagtgaatttctagagcaagtcccaaaaactaagggacagctaagaagttattatggttgacttcaaaggcctaaactgtgttttttatgtccactaaacaacttgattaaaagacggaattttgactcgtgtctgtatcatacaagtacaaatactaattttgccctatgtatccgtaaatgtcatttgtgattttgacttatttatttaatgccctttcttatgccgtgggttttcaagtttactcatttctatggttgcaaataactctaaaacttattatataaactttcatattataggcagaacacaatggctaaatatctgttgcatgtactttaaagtttattataaaatataaacagatatataaagatgttgactcttacctgtgattttgcatggtcagactcggtgtcaggtacggagaggattctcatgactgtcttacctctactgaatattctagtgagttatatgatttacggagtgattaacagaggtctatataaagttacttttcccctttacttaattatattgtagtgtgcagataacaaaactgctaccttctcatccaagtggtctgtagaattcatgtcccttacagtggtcatttaaagtcaatatttatttatgtatgtaataaaaaaagttggatttttgtgtatgtctgtcacattatttagagagaagtaatcttgtaaaaatgttttgtaaaaaacaaaaaagtattgtaaatagtcttgatattctgtgactcattattttcatgttagagtttgtacatactggttcaataataaagtatccttaaaccaga

SEQ ID NO: 107957 - DNA, 2191 bp, Homo sapiens
  Payload ID: 1194
  Gene Symbol: ANOS1
  Gene Name: anosmin 1
  ENST ID: ENST00000619786
  CDS Start-End: 152-2191
ggtcggcgaggagggtccggccggagttgaaggattgaactttccggctcagtcgcggcgtctgcctggtcctcagcagtgcagccccggcgcggagcagggagcctcggcccgcgcccggcgccctcgccctcgccctcgacccgcagccatggtgcccggggtgcccggcgcggtcctgaccctctgcctctggctggcggcctccagcggcgcctggcggccggccccggcgcggctgtgcgcggcggctggacgagtcgctgtctgccgggagcgtccagcgcgctcgtgcgcctccaggtgcctgagcctgcagatcactcgcatctccgccttcttccagcacttccagaacaatggttccctggtttggtgccagaatcacaagcaatgttctaagtgcctggagccctgcaaggaatcaggggacctgaggaaacaccagtgccaaagcttttgtgagcctctcttccccaagaagagctacgaatgcttgaccagctgtgagttcctcaaatacatcctgttggtgaagcagggggactgtccggctcctgagaaagccagtggatttgcggccgcctgtgttgaaagctgcgaagttgacaatgagtgctctggggtgaagaaatgttgttcgaatgggtgtggacacacctgtcaagtacccaagactctgtacaaaggtgtccccctgaagcccagaaaagagttacgatttacagaactgcagtctggacagctggaggttaagtggtcctcgaaattcaatatttctattgagcctgtgatctatgtggtacaaagaagatggaattatggaatccatcctagcgaagatgacgccactcactggcagacagtggcccagaccacagacgagcgagttcaactgactgacataagacccagccgatggtaccagtttcgagtggctgctgtgaatgtgcatggaactcgaggcttcactgcccccagcaaacacttccgttcttccaaagatccatctgccccaccagcaccggctaacctccggctggccaactccaccgtcaacagtgatgggagtgtgaccgtcactatagtttgggatctccccgaggagccggacatccctgtgcatcattacaaggtcttttggagctggatggtcagcagtaagtctcttgtcccaacaaagaagaagcggagaaagactacggatgggtttcaaaattctgtgatcctggagaaactccagccagactgtgactatgttgtggaattgcaagccataacgtactggggacagacacggctgaagagtgcaaaggtgtcccttcacttcacatcgacacatgcaaccaacaacaaagaacagcttgtgaaaactagaaaaggtggaattcaaacacaactcccttttcaaagacgacgacccactcgcccgctggaagtcggagctcccttctatcaggatggccaactgcaagttaaagtctactggaagaagacagaagatcccactgtcaaccgatatcatgtgcggtggtttcctgaagcgtgtgcccacaacagaacaaccggatcagaggcatcatctggcatgacccacgaaaattacataattcttcaagatctgtcattttcctgcaagtataaggtgactgtccaaccaatacggccaaaaagtcactccaaggcagaagctgttttcttcactactccaccatgctctgctcttaaggggaagagccacaagcctgttggctgcctgggcgaagcaggtcatgttctttctaaggtgctagctaagcctgagaacctttctgcttcattcatcgtccaggatgtgaacatcaccggtcacttttcttggaagatggccaaggccaatctctatcagcccatgactgggtttcaagtgacttgggctgaggtcactacggaaagcagacagaacagcctacccaacagcattatttcacagtcccagatcctgccttccgatcattatgtcctaacagtgcccaatctgagaccatctactctttaccgactggaagtgcaagtgctgaccccaggaggggaggggccggccaccatcaagacgttccggacgccggagctcccaccctcttcagcacacagatctcatcttaagcatcgtcatccacatcattacaagccttctccagaaagatactaa

SEQ ID NO: 107958 - DNA, 2110 bp, Homo sapiens
  Payload ID: 1195
  Gene Symbol: AMN1
  Gene Name: antagonist of mitotic exit network 1 homolog
  Uniprot ID: Q8IY45
  ENST ID: ENST00000281471
  CDS Start-End: 167-943
ttctttccttgtggagtccgaagcgtggccacgccccggtcaccggaaaaatccgtgtgacgtcacaaaaacctacgcgtcgcgcggtgggcgggagttggcggacggtccctggctgggttctggaggccctgggaccgcggaagaggcttcagacgctgcagcgatgcctcgcccacggcgggtcagtcagctcctggatctatgcctttggtgcttcatgaagaatatttccagatatctcacagacattaagcctttgcctcccaacataaaagacagactgattaaaataatgagtatgcagggacagataacagattcaaatataagtgagattttacatcctgaagtccaaactctagatctacggagctgcgatatatcagatgctgctctcctgcacctgtctaactgtagaaaactgaagaaattaaatttaaatgcttcaaaagggaaccgagtttctgtaacttcagaaggaataaaagctgtggcttcatcttgttcatacctacacgaagcttctttgaaaagatgctgcaatctcactgacgaaggagtcgttgctcttgcactcaattgccagctgctaaagatcatcgatttaggtggctgcttaagtattactgatgtgtccttacatgcattaggaaaaaactgcccatttttgcagtgtgtcgacttttcagctactcaggtatctgacagtggtgtgattgcacttgttagtggaccttgtgcgaagaaattagaggagattcatatgggacattgtgtaaatctgactgatggggctgtcgaagctgtccttacttactgtcctcaaatacgtatattactcttccatggatgccccttgataacagatcattcccgagaagtgttggagcaattagtaggcccaaacaaactaaagcaagtgacatggactgtttattgatgcttttttgaagatgatcaatgctaggaaagcttatcaaaactactttcccaggaaaccatctatagagatttgcattctacttaatgttaacactatttttaattattttattgtcttaagttataactctcagagaattagctaagtcttggtatatacatggtttgtgctttactcttaaacatctttaaagtgctattattctatatctgttggatgagtcattatttttgaaatgataatcctagcatgaactctgatctatggtgttggattctgtttcttaaataactttaaaattaactgttttcccttgagatttccttctcctatgtaggtatttgagctattgttctaagtttacctgtaagtataaaccttgggagaatctaagtaaacatatttctaaaagcatagttaccttcctattttctggctcttaccttcttggagtatttaaatgcccatttgccaaaagcagacctgaacatcaagcctgttaattcttcaaagaatttaggtatttgtttcaccgaaatgaagtgacttattagccattcagcgtattagtattacagaggctcttgcccagccacatccattcattgatttttatggctactcttcccagttacattttatgcatctgtaagctttccttccttagcaaaattgcattcaaaaatgtgtaaaaatgagtaaatacagaatatcactacagagacttgtatcctcaggtttattgatttcacattgtgaaataaacagcaaaggtcttagttttcaagtgaaaactttttggtaatcacaaaattacctgacacataccacgcttaaaccaacccccaaatttagcatattcattttgccatgagccagtcttgagattttcttaaaagatttcttattttgcctctgatgtagtgaaaaacggggtaagtatgctaactttcttgtatatgttggggggtacttattcaactccatttcttgtccttacaagatttataaatgtggtatgtttatagtgtggatatatatgttgccactgcaaaggtggtgcatatgtatatatgtgcaaaatgggtaaggcctgttctaactatgaaatttttctaaagacaaattcaataaaatttaatactgaatatttaaccaagtcaa

SEQ ID NO: 107959 - DNA, 571 bp, Homo sapiens
  Payload ID: 1195
  Gene Symbol: AMN1
  Gene Name: antagonist of mitotic exit network 1 homolog
  ENST ID: ENST00000457428
  CDS Start-End: 277-571
agacgctgcagcgatgcctcgcccacggcgggtcagtcagctcctggatcttgatgcttaggaaagattttatatcattaaaaagaaattgggaggtcacttccaagatggctaaatgggaacagctccagtctgcagctcccagcaagattgacgcagaagatgggcgatttctgcatttccaactgagatgctactggacttgaatggttaataaaattgcacaatgttgttggtggcagtgacttctttctgttcagatgcctttggtgcttcatgaagaatatttccagatatctcacagacattaagcctttgcctcccaacataaaagacagactgattaaaataatgagtatgcagggacagataacagattcaaatataagtgagggtcatgctccgttgcccaggctggagtacagtggtgcaatctcagctcactgcaacctccgctgcctggacttagagacagggtttcaccatgttgcccaggctggtctcgaactccggagctcaagtgatccatccgcctcagcctctcaaaatgctgggattacagattttacat

SEQ ID NO: 107960 - DNA, 796 bp, Homo sapiens
  Payload ID: 1195
  Gene Symbol: AMN1
  Gene Name: antagonist of mitotic exit network 1 homolog
  ENST ID: ENST00000535408
  CDS Start-End: 148-796
cgtgtgacgtcacaaaaacctacgcgtcgcgcggtgggcgggagttggcggacggtccctggctgggttctggaggccctgggaccgcggaagaggcttcagacgctgcagcgatgcctcgcccacggcggatgcctttggtgcttcatgaagaatatttccagatatctcacagacattaagcctttgcctcccaacataaaagacagactgattaaaataatgagtatgcagggacagataacagattcaaatataagtgagattttacatcctgaagtccaaactctagatctacggagctgcgatatatcagatgctgctctcctgcacctgtctaactgtagaaaactgaagaaattaaatttaaatgcttcaaaagggaaccgagtttctgtaacttcagaaggaataaaagctgtggcttcatcttgttcatacctacacgaagcttctttgaaaagatgctgcaatctcactgacgaaggagtcgttgctcttgcactcaattgccagctgctaaagatcatcgatttaggtggctgcttaagtattactgatgtgtccttacatgcattaggaaaaaactgcccatttttgcagtgtgtcgacttttcagctactcaggtatctgacagtggtgtgattgcacttgttagtggaccttgtgcgaagaaattagaggagattcatatgggacattgtgtaaatctgactgatggggctgtcgaagctgtccttacttactgtcctcaaatacgtatattactcttccatggatgccccttgataacag

SEQ ID NO: 107961 - DNA, 880 bp, Homo sapiens
  Payload ID: 1195
  Gene Symbol: AMN1
  Gene Name: antagonist of mitotic exit network 1 homolog
  ENST ID: ENST00000541931
  CDS Start-End: 570-746
acaaaaacctacgcgtcgcgcggtgggcgggagttggcggacggtccctggctgggttctggaggccctgggaccgcggaagaggcttcagacgctgcagcgatgcctcgcccacggcgggtcagtcagctcctggatctattttacatcctgaagtccaaactctagatctacggagctgcgatatatcagatgctgctctcctgcacctgtctaactgtagaaaactgaagaaattaaatttaaatgcttcaaaagggaaccgagtttctgtaacttcagaaggaataaaagctgtggcttcatcttgttcatacctacacgaagcttctttgaaaagatgctgcaatctcactgacgaaggagtcgttgctcttgcactcaattgccagctgctaaagatcatcgatttaggtggctgcttaagtattactgatgtgtccttacatgcattaggaaaaaactgcccatttttgcagtgtgtcgacttttcagctactcaggtatctgacagtggtgtgattgcacttgttagtggaccttgtgcgaagaaattagaggagattcatatgggacattgtgtaaatctgactgatggggctgtcgaagctgtccttacttactgtcctcaaatacgtatattactcttccatggatgccccttgataacagatcattcccgagaagtgttggagcaattagtaggcccaaacaaactaaagcaagtgacatggactgtttattgatgcttttttgaagatgatcaatgctaggaaagcttatcaaaactactttcccaggaaaccatctatagagatttgcattctacttaatgttaacactatttttaattattttattgtcttaagttataactctc

SEQ ID NO: 107962 - DNA, 403 bp, Homo sapiens
  Payload ID: 1195
  Gene Symbol: AMN1
  Gene Name: antagonist of mitotic exit network 1 homolog
  ENST ID: ENST00000506446
  CDS Start-End: 87-403
atgctactggacttgaatggttaataaaattgcacaatgttgttggtggcagtgacttctttctgttcagatgcctttggtgcttcatgaagaatatttccagatatctcacagacattaagcctttgcctcccaacataaaagacagactgattaaaataatgagtatgcagggacagataacagattcaaatataagtgagggtcatgctccgttgcccaggctggagtacagtggtgcaatctcagctcactgcaacctccgctgcctggacttagtccaaactctagatctacggagctgcgatatatcagatgctgctctcctgcacctgtctaactgtagaaaactgaagaaattaaatttaaatgcttcaaaagggaaccgagtttctgtaacttc

SEQ ID NO: 107963 - DNA, 1025 bp, Homo sapiens
  Payload ID: 1195
  Gene Symbol: AMN1
  Gene Name: antagonist of mitotic exit network 1 homolog
  Uniprot ID: Q8IY45
  ENST ID: ENST00000536761
  CDS Start-End: 277-999
agacgctgcagcgatgcctcgcccacggcgggtcagtcagctcctggatcttgatgcttaggaaagattttatatcattaaaaagaaattgggaggtcacttccaagatggctaaatgggaacagctccagtctgcagctcccagcaagattgacgcagaagatgggcgatttctgcatttccaactgagatgctactggacttgaatggttaataaaattgcacaatgttgttggtggcagtgacttctttctgttcagatgcctttggtgcttcatgaagaatatttccagatatctcacagacattaagcctttgcctcccaacataaaagacagactgattaaaataatgagtatgcagggacagataacagattcaaatataagtgagattttacatcctgaagtccaaactctagatctacggagctgcgatatatcagatgctgctctcctgcacctgtctaactgtagaaaactgaagaaattaaatttaaatgcttcaaaagggaaccgagtttctgtaacttcagaaggaataaaagctgtggcttcatcttgttcatacctacacgaagcttctttgaaaagatgctgcaatctcactgacgaaggagtcgttgctcttgcactcaattgccagctgctaaagatcatcgatttaggtggctgcttaagtattactgatgtgtccttacatgcattaggaaaaaactgcccatttttgcagtgtgtcgacttttcagctactcaggtatctgacagtggtgtgattgcacttgttagtggaccttgtgcgaagaaattagaggagattcatatgggacattgtgtaaatctgactgatggggctgtcgaagctgtccttacttactgtcctcaaatacgtatattactcttccatggatgccccttgataacagatcattcccgagaagtgttggagcaattagtaggcccaaacaaactaaagcaagtgacatggactgtttattgatgcttttttgaagatgatcaatgcta

SEQ ID NO: 107964 - DNA, 1538 bp, Homo sapiens
  Payload ID: 1195
  Gene Symbol: AMN1
  Gene Name: antagonist of mitotic exit network 1 homolog
  Uniprot ID: Q8IY45
  ENST ID: ENST00000537562
  CDS Start-End: 457-1179
cgatgcctcgcccacggcgggtcagtcagctcctggatcttgatgcttaggaaagattttatatcattaaaaagaaattgggaggtcacttccaagatggctaaatgggaacagctccagtctgcagctcccagcaagattgacgcagaagatgggcgatttctgcatttccaactgagatgctactggacttgaatggttaataaaattgcacaatgttgttggtggcagtgacttctttctgttcagattaaggccgagcacaaggctcatgcctgtaatcccagcagtttgggaggccaaggtgggaggctcacttcagcccaggagttcaagaccggcctgggcaacatatagagaccccatctctacaagaaatacagaaaattagctgattgtggtggtgcatgtctgtagtcccaactacttgggaggctgagatgcctttggtgcttcatgaagaatatttccagatatctcacagacattaagcctttgcctcccaacataaaagacagactgattaaaataatgagtatgcagggacagataacagattcaaatataagtgagattttacatcctgaagtccaaactctagatctacggagctgcgatatatcagatgctgctctcctgcacctgtctaactgtagaaaactgaagaaattaaatttaaatgcttcaaaagggaaccgagtttctgtaacttcagaaggaataaaagctgtggcttcatcttgttcatacctacacgaagcttctttgaaaagatgctgcaatctcactgacgaaggagtcgttgctcttgcactcaattgccagctgctaaagatcatcgatttaggtggctgcttaagtattactgatgtgtccttacatgcattaggaaaaaactgcccatttttgcagtgtgtcgacttttcagctactcaggtatctgacagtggtgtgattgcacttgttagtggaccttgtgcgaagaaattagaggagattcatatgggacattgtgtaaatctgactgatggggctgtcgaagctgtccttacttactgtcctcaaatacgtatattactcttccatggatgccccttgataacagatcattcccgagaagtgttggagcaattagtaggcccaaacaaactaaagcaagtgacatggactgtttattgatgcttttttgaagatgatcaatgctaggaaagcttatcaaaactactttcccaggaaaccatctatagagatttgcattctacttaatgttaacactatttttaattattttattgtcttaagttataactctcagagaattagctaagtcttggtatatacatggtttgtgctttactcttaaacatctttaaagtgctattattctatatctgttggatgagtcattatttttgaaatgataatcctagcatgaactctgatctatggtgttggattctgtttcttaaataactttaaaattaactgttttcccttgagatttccttctcctatgtaggtatttgagctattgttct

SEQ ID NO: 107965 - DNA, 397 bp, Homo sapiens
  Payload ID: 1195
  Gene Symbol: AMN1
  Gene Name: antagonist of mitotic exit network 1 homolog
  ENST ID: ENST00000537960
  CDS Start-End: 136-397
acgctgcagcgatgcctcgcccacggcgggtcagtcagctcctggatctatgctactggacttgaatggttaataaaattgcacaatgttgttggtggcagtgacttctttctgttcagatgcctttggtgcttcatgaagaatatttccagatatctcacagacattaagcctttgcctcccaacataaaagacagactgattaaaataatgagtatgcagggacagataacagattcaaatataagtgagattttacatcctgaagtccaaactctagatctacggagctgcgatatatcagatgctgctctcctgcacctgtctaactgtagaaaactgaagaaattaaatttaaatgcttcaaaagggaaccgagtttctgtaacttcagaag

SEQ ID NO: 107966 - DNA, 879 bp, Homo sapiens
  Payload ID: 1195
  Gene Symbol: AMN1
  Gene Name: antagonist of mitotic exit network 1 homolog
  ENST ID: ENST00000542781
  CDS Start-End: 690-797
agacgctgcagcgatgcctcgcccacggcgggtcagtcagctcctggatcttgatgcttaggaaagattttatatcattaaaaagaaattgggaggtcacttccaagatggctaaatgggaacagctccagtctgcagctcccagcaagattgacgcagaagatgggcgatttctgcatttccaactgagatgctactggacttgaatggttaataaaattgcacaatgttgttggtggcagtgacttctttctgttcagattttacatcctgaagtccaaactctagatctacggagctgcgatatatcagatgctgctctcctgcacctgtctaactgtagaaaactgaagaaattaaatttaaatgcttcaaaagggaaccgagtttctgtaacttcagaaggaataaaagctgtggcttcatcttgttcatacctacacgaagcttctttgaaaagatgctgcaatctcactgacgaaggagtcgttgctcttgcactcaattgccagctgctaaagatcatcgatttaggtggctgcttaagtattactgatgtgtccttacatgcattaggaaaaaactgcccatttttgcagtgtgtcgacttttcagctactcaggtatctgacagtggtgtgattgcacttgttagtggaccttgtgcgaagaaattagaggagattcatatgggacattgtgtaaatctgactgatggggctgtcgaagctgtccttacttactgtcctcaaatacgtatattactcttccatggatgccccttgataacagggtaacactggcctcacagaaagagttggaaagtgtttcccccttcttctatagccacccagctttgtcatggttgccatttaaatg

SEQ ID NO: 107967 - DNA, 782 bp, Homo sapiens
  Payload ID: 1196
  Gene Symbol: AGR2
  Gene Name: anterior gradient 2, protein disulphide isomerase family member
  ENST ID: ENST00000401412
  CDS Start-End: 43-609
ggaccgcatcctagccgccgactcacacaaggcagagttgccatggagaaaattccagtgtcagcattcttgctccttgtggccctctcctacactctggccagagataccacagtcaaacctggagccaaaaaggacacaaaggactctcgacccaaactgccccagaccctctccagaggttggggtgaccaactcatctggactcagacatatgaagaagctctatataaatccaagacaagcaacaaacccttgatgattattcatcacttggatgagtgcccacacagtcaagctttaaagaaagtgtttgctgaaaataaagaaatccagaaattggcagagcagtttgtcctcctcaatctggtttatgaaacaactgacaaacacctttctcctgatggccagtatgtccccaggattatgtttgttgacccatctctgacagttagagccgatatcactggaagatattcaaatcgtctctatgcttacgaacctgcagatacagctctgtgtaagtgtgaccttcaattcggatgttgcccaagagttgaacacctctattgctgtagtgatgggactagaggctgcatggtgaggtgagagagagctaggcttagggacgcctcggactcagtttgaccctaactagccttgcatcttcaggcaaatcacactctttccatctcaggtttgtttgtttttaatctcaattgaagatgaattatttagattaggtatctttttctctaggaggattctatgaccacattacc

SEQ ID NO: 107968 - DNA, 1778 bp, Homo sapiens
  Payload ID: 1196
  Gene Symbol: AGR2
  Gene Name: anterior gradient 2, protein disulphide isomerase family member
  Uniprot ID: O95994
  ENST ID: ENST00000419304
  CDS Start-End: 154-681
tagcaacaagtaaatgcagcactagtgggtgggattgaggtatgccctggtgcataaatagagactcagctgtgctggcacactcagaagcttggaccgcatcctagccgccgactcacacaaggcaggtgggtgaggaaatccagagttgccatggagaaaattccagtgtcagcattcttgctccttgtggccctctcctacactctggccagagataccacagtcaaacctggagccaaaaaggacacaaaggactctcgacccaaactgccccagaccctctccagaggttggggtgaccaactcatctggactcagacatatgaagaagctctatataaatccaagacaagcaacaaacccttgatgattattcatcacttggatgagtgcccacacagtcaagctttaaagaaagtgtttgctgaaaataaagaaatccagaaattggcagagcagtttgtcctcctcaatctggtttatgaaacaactgacaaacacctttctcctgatggccagtatgtccccaggattatgtttgttgacccatctctgacagttagagccgatatcactggaagatattcaaatcgtctctatgcttacgaacctgcagatacagctctgttgcttgacaacatgaagaaagctctcaagttgctgaagactgaattgtaaagaaaaaaaatctccaagcccttctgtctgtcaggccttgagacttgaaaccagaagaagtgtgagaagactggctagtgtggaagcatagtgaacacactgattaggttatggtttaatgttacaacaactattttttaagaaaaacaagttttagaaatttggtttcaagtgtacatgtgtgaaaacaatattgtatactaccatagtgagccatgattttctaaaaaaaaaaataaatgttttgggggtgttctgttttctccaacttggtctttcacagtggttcgtttaccaaataggattaaacacacacaaaatgctcaaggaagggacaagacaaaaccaaaactagttcaaatgatgaagaccaaagaccaagttatcatctcaccacaccacaggttctcactagatgactgtaagtagacacgagcttaatcaacagaagtatcaagccatgtgctttagcataaaagaatatttagaaaaacatcccaagaaaatcacatcactacctagagtcaactctggccaggaactctaaggtacacactttcatttagtaattaaattttagtcagattttgcccaacctaatgctctcagggaaagcctctggcaagtagctttctccttcagaggtctaatttagtagaaaggtcatccaaagaacatctgcactcctgaacacaccctgaagaaatcctgggaattgaccttgtaatcgatttgtctgtcaaggtcctaaagtactggagtgaaataaattcagccaacatgtgactaattggaagaagagcaaagggtggtgacgtgttgatgaggcagatggagatcagaggttactagggtttaggaaacgtgaaaggctgtggcatcagggtaggggagcattctgcctaacagaaattagaattgtgtgttaatgtcttcactctatacttaatctcacattcattaatatatggaattcctctactgcccagcccctcctgatttctttggcccctggactatggtgctgtatataatgctttgcagtatctgttgcttgtcttgattaacttttttggataaaaccttttttgaacaga

SEQ ID NO: 107969 - DNA, 670 bp, Homo sapiens
  Payload ID: 1196
  Gene Symbol: AGR2
  Gene Name: anterior gradient 2, protein disulphide isomerase family member
  ENST ID: ENST00000412973
  CDS Start-End: 277-670
agattcacaaggccaacagacaacccaaagtcattaagccatgagagtggaatgaatctatgaaaactcaatgaagacagaacaagagaaaaatcttttcagccacgatgaattaggagaacaagatgtcaaattacactgatgctgagtcaagcttctcaaagcaagagataatcaggctgacctattgctgaggactatgagaaaaaagttattacagaatgagtcatatggaaaacacttgcaaacagaagaatattgagaacataagttgccatggagaaaattccagtgtcagcattcttgctccttgtggccctctcctacactctggccagagataccacagtcaaacctggagccaaaaaggacacaaaggactctcgacccaaactgccccagaccctctccagaggttggggtgaccaactcatctggactcagacatatgaagaagctctatataaatccaagacaagcaacaaacccttgatgattattcatcacttggatgagtgcccacacagtcaagctttaaagaaagtgtttgctgaaaataaagaaatccagaaattggcagagcagtttgtcctcctcaatctggtttatgaaacaactgacaaacacctttctcctgatggccagtatgtccccaggattatgtttgttg

SEQ ID NO: 107970 - DNA, 671 bp, Homo sapiens
  Payload ID: 1196
  Gene Symbol: AGR2
  Gene Name: anterior gradient 2, protein disulphide isomerase family member
  ENST ID: ENST00000450569
  CDS Start-End: 1-360
cccttgatgattattcatcacttggatgagtgcccacacagtcaagctttaaagaaagtgtttgctgaaaataaagaaatccagaaattggcagagcagtttgtcctcctcaatctggtttatgaaacaactgacaaacacctttctcctgatggccagtatgtccccaggattatgtttgttgacccatctctgacagttagagccgatatcactggaagatattcaaatcgtctctatgcttacgaacctgcagatacagctctgtgtaagtgtgaccttcaattcggatgttgcccaagagttgaacacctctattgctgtagtgatgggactagaggctgcatggtgagtgcttgacaacatgaagaaagctctcaagttgctgaagactgaattgtaaagaaaaaaaatctccaagcccttctgtctgtcaggccttgagacttgaaaccagaagaagtgtgagaagactggctagtgtggaagcatagtgaacacactgattaggttatggtttaatgttacaacaactattttttaagaaaaacaagttttagaaatttggtttcaagtgtacatgtgtgaaaacaatattgtatactaccatagtgagccatgattttctaaaaaaaaaaataaatgttttgggggtgttctgttttctccaa

SEQ ID NO: 107971 - DNA, 749 bp, Homo sapiens
  Payload ID: 1197
  Gene Symbol: AGR3
  Gene Name: anterior gradient 3, protein disulphide isomerase family member
  Uniprot ID: Q8TD06
  ENST ID: ENST00000310398
  CDS Start-End: 72-572
aaacatccagaatacatttccaacaagagcactggccaagtcagcttcttctgagagagtctctagaagacatgatgctacactcagctttgggtctctgcctcttactcgtcacagtttcttccaaccttgccattgcaataaaaaaggaaaagaggcctcctcagacactctcaagaggatggggagatgacatcacttgggtacaaacttatgaagaaggtctcttttatgctcaaaaaagtaagaagccattaatggttattcatcacctggaggattgtcaatactctcaagcactaaagaaagtatttgcccaaaatgaagaaatacaagaaatggctcagaataagttcatcatgctaaaccttatgcatgaaaccactgataagaatttatcacctgatgggcaatatgtgcctagaatcatgtttgtagacccttctttaacagttagagctgacatagctggaagatactctaacagattgtacacatatgagcctcgggatttacccctattgatagaaaacatgaagaaagcattaagacttattcagtcagagctataagagatgatggaaaaaagccttcacttcaaagaagtcaaatttcatgaagaaaacctctggcacattgacaaatactaaatgtgcaagtatatagattttgtaatattactatttagtttttttaatgtgtttgcaatagtcttattaaaataaatgttttttaaatctgagactgac

SEQ ID NO: 107972 - DNA, 563 bp, Homo sapiens
  Payload ID: 1197
  Gene Symbol: AGR3
  Gene Name: anterior gradient 3, protein disulphide isomerase family member
  ENST ID: ENST00000402239
  CDS Start-End: 66-557
ccagaatacatttccaacaagagcactggccaagtcagcttcttctgagagagtctctagaagacatgatgctacactcagctttgggtctctgcctcttactcgtcacagtttcttccaaccttgccattgcaataaaaaaggaaaagaggcctcctcagacactctcaagaggatggggagatgacatcacttgggtacaaacttatgaagaaggtctcttttatgctcaaaaaagtaagaagccattaatggttattcatcacctggaggattgtcaatactctcaagcactaaagaaagtatttgcccaaaatgaagaaatacaagaaatggctcagaataagttcatcatgctaaaccttatgcatgaaaccactgataagaatttatcacctgatgggcaatatgtgcctagaatcatgtttgtagacccttctttaacagttagagctgacatagctggaagatactctaacagattgtacacatatgagcctcgggatttacccctatgtaagtattcacaaatgatctcaaacagtggtcatagctgacccctg

SEQ ID NO: 107973 - DNA, 386 bp, Homo sapiens
  Payload ID: 1197
  Gene Symbol: AGR3
  Gene Name: anterior gradient 3, protein disulphide isomerase family member
  ENST ID: ENST00000414935
  CDS Start-End: 1-386
aaacatccagaatacatttccaacaagagcactggccaagtcaggatggggagatgacatcacttgggtacaaacttatgaagaaggtctcttttatgctcaaaaaagtaagaagccattaatggttattcatcacctggaggattgtcaatactctcaagcactaaagaaagtatttgcccaaaatgaagaaatacaagaaatggctcagaataagttcatcatgctaaaccttatgcatgaaaccactgataagaatttatcacctgatgggcaatatgtgcctagaatcatgtttgtagacccttctttaacagttagagctgacatagctggaagatactctaacagattgtacacatatgagcctcgggatttacccctat

SEQ ID NO: 107974 - DNA, 5859 bp, Homo sapiens
  Payload ID: 1198
  Gene Symbol: ANTXR1
  Gene Name: anthrax toxin receptor 1
  Uniprot ID: Q9H6X2
  ENST ID: ENST00000303714
  CDS Start-End: 323-2017
gacggaactccttccattgcaaaagctcggcgcggcctcgggagctgcccggcggccccggaccgaggcagccctcccctttaaaagaagcggaggacaggattgggatccttgaaacccgaaacccagaaacagcatcggagcggaaaccagaggggaaaccttgaactcctccagacaattgcttccggggagttgcgagggagcgagggggaataaaggacccgcgaggaagggcccgcggatggcgcgtccctgagggtcgtggcgagttcgcggagcgtgggaaggagcggaccctgctctccccgggctgcgggccatggccacggcggagcggagagccctcggcatcggcttccagtggctctctttggccactctggtgctcatctgcgccgggcaagggggacgcagggaggatgggggtccagcctgctacggcggatttgacctgtacttcattttggacaaatcaggaagtgtgctgcaccactggaatgaaatctattactttgtggaacagttggctcacaaattcatcagcccacagttgagaatgtcctttattgttttctccacccgaggaacaaccttaatgaaactgacagaagacagagaacaaatccgtcaaggcctagaagaactccagaaagttctgccaggaggagacacttacatgcatgaaggatttgaaagggccagtgagcagatttattatgaaaacagacaagggtacaggacagccagcgtcatcattgctttgactgatggagaactccatgaagatctctttttctattcagagagggaggctaataggtctcgagatcttggtgcaattgtttactgtgttggtgtgaaagatttcaatgagacacagctggcccggattgcggacagtaaggatcatgtgtttcccgtgaatgacggctttcaggctctgcaaggcatcatccactcaattttgaagaagtcctgcatcgaaattctagcagctgaaccatccaccatatgtgcaggagagtcatttcaagttgtcgtgagaggaaacggcttccgacatgcccgcaacgtggacagggtcctctgcagcttcaagatcaatgactcggtcacactcaatgagaagcccttttctgtggaagatacttatttactgtgtccagcgcctatcttaaaagaagttggcatgaaagctgcactccaggtcagcatgaacgatggcctctcttttatctccagttctgtcatcatcaccaccacacactgttctgacggttccatcctggccatcgccctgctgatcctgttcctgctcctagccctggctctcctctggtggttctggcccctctgctgcactgtgattatcaaggaggtccctccaccccctgccgaggagagtgaggaagaagatgatgatggtctgcctaagaaaaagtggccaacggtagacgcctcttattatggtgggagaggcgttggaggcattaaaagaatggaggttcgttggggagaaaagggctccacagaagaaggtgctaagttggaaaaggcaaagaatgcaagagtcaagatgccggagcaggaatatgaattccctgagccgcgaaatctcaacaacaatatgcgtcggccttcttccccccggaagtggtactctccaatcaagggaaaactcgatgccttgtgggtcctactgaggaaaggatatgatcgtgtgtctgtgatgcgtccacagccaggagacacggggcgctgcatcaacttcaccagggtcaagaacaaccagccagccaagtacccactcaacaacgcctaccacacctcctcgccgcctcctgcccccatctacactcccccacctcctgcgccccactgccctcccccgccccccagcgcccctacccctcccatcccgtccccaccttccacccttccccctcctccccaggctccacctcccaacagggcacctcctccctcccgccctcctccaaggccttctgtctagagcccaaagttcctgctctgggctctctcagaaacttcaggagatgttagaacaagtctttccagttagagaagaggagtggtgataaagcccactgaccttcacacattctaaaaattggttggcaatgccagtataccaacaatcatgatcagctgaaagaaacagatattttaaattgccagaaaacaaatgatgaggcaactacagtcagatttatagccagccatctatcacctctagaaggttccagagacagtgaaactgcaagatgctctcaacaggattatgtctcatggagaccagtaagaaaatcatttatctgaaggtgaaatgcagagttggataagaaatacattgctgggtttctaaaatgctgccttcctgcctctactccacctccatccctggactttggacccttggcctaggagcctaaggaccttcacccctgtgcaccacccaagaaagaggaaaactttgcctacaactttggaaatgctggggtccctggtgtggtaagaaactcaacatcagacgggtatgcagaaggatgttcttctgggatttgcaggtacataaaaaatgtatggcatcttttccttgcaaattcttccagtttccaagtgagaaggggagcaggtgtttactgatggaaaaggtatgttgctatgttgatgtgtaagtgaaatcagttgtgtgcaatagacaggggcgtattcatgggagcatcagccagtttctaaaacccacaggccatcagcagctagaggtggctggctttggccagacatggaccctaaatcaacagacaatggcattgtcgaagagcaacctgttaatgaatcatgttaaaaatcaaggtttggcttcagtttaaatcacttgaggtatgaagtttatcctgttttccagagataaacataagttgatcttcccaaaataccatcattaggacctatcacacaatatcactagttttttttgtttgtttgttttttgttttttttcttggtaaagccatgcaccacagacttctgggcagagctgagagacaatggtcctgacataataaggatctttgattaacccccataaggcatgtgtgtgtatacaaatatacttctctttggcttttcgacatagaacctcagctgttaaccaaggggaaatacatcagatctgcaacacagaaatgctctgcctgaaatttccaccatgcctaggactcaccccatttatccaggtctttctggatctgtttaatcaataagccctataatcacttgctaaacactgggcttcatcacccagggataaaaacagagatcattgtcttggacctcctgcatcagcctattcaaaattatctctctctctagctttccacaaatcctaaaattcctgtcccaagccacccaaattctcagatcttttctggaacaaggcagaatataaaataaatatacatttagtggcttgggctatggtctccaaagatccttcaaaaatacatcaagccagcttcattcactcactttacttagaacagagatataagggcctgggatgcatttattttatcaataccaatttttgtggccatggcagacattgctaatcaatcacagcactatttcctattaagcccactgatttcttcacaatccttctcaaattacaattccaaagagccgccactcaacagtcagatgaacccaacagtcagatgagagaaatgaaccctacttgctatctctatcttagaaagcaaaaacaaacaggagtttccagggagaatgggaaagccagggggcataaaaggtacagtcaggggaaaatagatctaggcagagtgccttagtcagggaccacgggcgctgaatctgcagtgccaacaccaaactgacacatctccaggtgtacctccaaccctagccttctcccacagctgcctacaacagagtctcccagccttctcagagagctaaaaccagaaatttccagactcatgaaagcaaccccccagcctctccccaaccctgccgcattgtctaatttttagaacactaggcttcttctttcatgtagttcctcataagcaggggccagaatatctcagccacctgcagtgacattgctggacccctgaaaaccattccataggagaatgggttccccaggctcacagtgtagagacattgagcccatcacaactgttttgactgctggcagtctaaaacagtccacccaccccatggcactgccgcgtgattcccgcggccattcagaagttcaagccgagatgctgacgttgctgagcaacgagatggtgagcatcagtgcaaatgcaccattcagcacatcagtcatatgcccagtgcagttacaagatgttgtttcggcaaagcattttgatggaatagggaactgcaaatgtatgatgattttgaaaaggctcagcaggatttgttcttaaaccgactcagtgtgtcatccccggttatttagaattacagttaagaaggagaaacttctataagactgtatgaacaaggtgatatcttcatagtgggctattacaggcaggaaaatgttttaactggtttacaaaatccatcaatacttgtgtcattccctgtaaaaggcaggagacatgtgattatgatcaggaaactgcacaaaattattgttttcagcccccgtgttattgtccttttgaactgtttttttttttattaaagccaaatttgtgttgtatatattcgtattccatgtgttagatggaagcatttcctatccagtgtgaataaaaagaacagttgtagtaaattattataaagccgatgatatttcatggcaggttattctaccaagctgtgcttgttggtttttcccatgactgtattgcttttataaatgtacaaatagttactgaaatgacgagacccttgtttgcacagcattaataagaaccttgataagaaccatattctgttgacagccagctcacagtttcttgcctgaagcttggtgcaccctccagtgagacacaagatctctcttttaccaaagttgagaacagagctggtggattaattaatagtcttcgatatctggccatgggtaacctcattgtaactatcatcagaatgggcagagatgatcttgaagtgtcacatacactaaagtccaaacactatgtcagatgggggtaaaatccattaaagaacaggaaaaaataattataagatgataagcaaatgtttcagcccaatgtcaacccagttaaaaaaaaaattaatgctgtgtaaaatggttgaattagtttgcaaactatataaagacatatgcagtaaaaagtctgttaatgcacatcctgtgggaatggagtgttctaaccaattgccttttcttgttatctgagctctcctatattatcatactcagataaccaaattaaaagaattagaatatgatttttaatacacttaacattaaactcttctaactttcttctttctgtgataattcagaagatagttatggatcttcaatgcctctgagtcattgttataaaaaatcagttatcactataccatgctataggagactgggcaaaacctgtacaatgacaaccctggaagttgctttttttaaaaaaataataaatttcttaaatcaactcttttttctggttgtctgtttgttataaagtgcaacgtattcaagtcctcaatatcctgatcataataccatgctataggagactgggcaaaacctgtacaatgacaaccctggaagttgcttttttaaaaaaaataataaatttcttaaatcaa

SEQ ID NO: 107975 - DNA, 1384 bp, Homo sapiens
  Payload ID: 1198
  Gene Symbol: ANTXR1
  Gene Name: anthrax toxin receptor 1
  Uniprot ID: Q9H6X2
  ENST ID: ENST00000409349
  CDS Start-End: 104-1210
aggacccgcgaggaagggcccgcggatggcgcgtccctgagggtcgtggcgagttcgcggagcgtgggaaggagcggaccctgctctccccgggctgcgggccatggccacggcggagcggagagccctcggcatcggcttccagtggctctctttggccactctggtgctcatctgcgccgggcaagggggacgcagggaggatgggggtccagcctgctacggcggatttgacctgtacttcattttggacaaatcaggaagtgtgctgcaccactggaatgaaatctattactttgtggaacagttggctcacaaattcatcagcccacagttgagaatgtcctttattgttttctccacccgaggaacaaccttaatgaaactgacagaagacagagaacaaatccgtcaaggcctagaagaactccagaaagttctgccaggaggagacacttacatgcatgaaggatttgaaagggccagtgagcagatttattatgaaaacagacaagggtacaggacagccagcgtcatcattgctttgactgatggagaactccatgaagatctctttttctattcagagagggaggctaataggtctcgagatcttggtgcaattgtttactgtgttggtgtgaaagatttcaatgagacacagctggcccggattgcggacagtaaggatcatgtgtttcccgtgaatgacggctttcaggctctgcaaggcatcatccactcaattttgaagaagtcctgcatcgaaattctagcagctgaaccatccaccatatgtgcaggagagtcatttcaagttgtcgtgagaggaaacggcttccgacatgcccgcaacgtggacagggtcctctgcagcttcaagatcaatgactcggtcacactcaatgagaagcccttttctgtggaagatacttatttactgtgtccagcgcctatcttaaaagaagttggcatgaaagctgcactccaggtcagcatgaacgatggcctctcttttatctccagttctgtcatcatcaccaccacacactgttctgacggttccatcctggccatcgccctgctgatcctgttcctgctcctagccctggctctcctctggtggttctggcccctctgctgcactgtgattatcaaggaggtccctccaccccctgccgaggagagtgaggaaaataaaataaaataacaagaagaagaaagaaagaaatcccacagaaacagataacctaacacagcccgtgcaacgtattttatacaatgctctgaaaatcatagtctcaatctagacagtcttttcctctagttccctgtattcaaatcccagtgtctaacattcaataaatagctatatgaaatcaaa

SEQ ID NO: 107976 - DNA, 2221 bp, Homo sapiens
  Payload ID: 1198
  Gene Symbol: ANTXR1
  Gene Name: anthrax toxin receptor 1
  Uniprot ID: Q9H6X2
  ENST ID: ENST00000409829
  CDS Start-End: 195-1196
gaaacagcatcggagcggaaaccagaggggaaaccttgaactcctccagacaattgcttccggggagttgcgagggagcgagggggaataaaggacccgcgaggaagggcccgcggatggcgcgtccctgagggtcgtggcgagttcgcggagcgtgggaaggagcggaccctgctctccccgggctgcgggccatggccacggcggagcggagagccctcggcatcggcttccagtggctctctttggccactctggtgctcatctgcgccgggcaagggggacgcagggaggatgggggtccagcctgctacggcggatttgacctgtacttcattttggacaaatcaggaagtgtgctgcaccactggaatgaaatctattactttgtggaacagttggctcacaaattcatcagcccacagttgagaatgtcctttattgttttctccacccgaggaacaaccttaatgaaactgacagaagacagagaacaaatccgtcaaggcctagaagaactccagaaagttctgccaggaggagacacttacatgcatgaaggatttgaaagggccagtgagcagatttattatgaaaacagacaagggtacaggacagccagcgtcatcattgctttgactgatggagaactccatgaagatctctttttctattcagagagggaggctaataggtctcgagatcttggtgcaattgtttactgtgttggtgtgaaagatttcaatgagacacagctggcccggattgcggacagtaaggatcatgtgtttcccgtgaatgacggctttcaggctctgcaaggcatcatccactcaattttgaagaagtcctgcatcgaaattctagcagctgaaccatccaccatatgtgcaggagagtcatttcaagttgtcgtgagaggaaacggcttccgacatgcccgcaacgtggacagggtcctctgcagcttcaagatcaatgactcggtcacactcaatgagaagcccttttctgtggaagatacttatttactgtgtccagcgcctatcttaaaagaagttggcatgaaagctgcactccaggtcagcatgaacgatggcctctcttttatctccagttctgtcatcatcaccaccacacactgtagcctccacaaaattgcatcaggccccacaacagctgcttgcatggaatagcagagaataccgcctgctccctccggacagcacactcctgaaaacggggagagaggagccaaacatgctcggtttacactttccttatttactgaatgagtggagggcagagacaggcctggagttacgcacactgagtgccccaacatggaaagaaacatcaggagggacaggaaacgttccctccttaaccaacagttttcaagaccttactggaggcactttattggctacataatcactccatgcggtgggcatcaggcagaatcctggtgcagacccaactttgaggtggaggatttcacagtttctttattttgaacttcccccaggctcccactaattcctctccattctatcctcctccctttcccacaaaagaaaacagaaaggagcagcagtgtttgataccgtatcatccagaggcctggttctctcccattatagggcaaacaagccctggcaagatatttcactcccgccccatgccatgcattaaaaatccaaaattgcctatattccacctgccaagcaagagatgctttcattattgaagttccaaatgtatacctttgagaacagtgccttctcgtcttaaaagagaggtcctcattttgtgagttgggagcagagggaattaaagaaagccatgatgcagggatttggccattcaagccgggcagccttcagagaatgtcatccctaatgacacatgcccgaatgaaggagcggggctgagcttgtcctgccttcgtattgaatgttgcctgtctgcctccttaatagcgggcctctgtgtgagcatttgacaagacttaaaactattcattgaagaaaatggatgatcccccaacaggaagatgcaaccccatgggctgcctgcttgaccacagaagtgcttccagctccagttgctcatctgagaactccccccaccacttgctgttaaaattgttaaaattaaaggccatgttgattgattttttaaactttatttccattttttttaataaaataagaattgg

SEQ ID NO: 107977 - DNA, 621 bp, Homo sapiens
  Payload ID: 1198
  Gene Symbol: ANTXR1
  Gene Name: anthrax toxin receptor 1
  ENST ID: ENST00000482235
  CDS Start-End: 1-539
gagatcttggtgcaattgtttactgtgttggtgtgaaagatttcaatgagacacagctggcccggattgcggacagtaaggatcatgtgtttcccgtgaatgacggctttcaggctctgcaaggcatcatccactcaattttgaagaagtcctgcatcgaaattctagcagctgaaccatccaccatatgtgcaggagagtcatttcaagttgtcgtgagaggaaacggcttccgacatgcccgcaacgtggacagggtcctctgcagcttcaagatcaatgactcggtcacactcaatgagaagcccttttctgtggaagatacttatttactgtgtccagcgcctatcttaaaagaagttggcatgaaagctgcactccaggtcagcatgaacgatggcctctcttttatctccagttctgtcatcatcaccaccacacactgtgatggcttgtggttttacatacaatcattagagacggtaaaagaccacaggaatatcagagtgcggaactcagatctcaaatattgtttatgaactgaaataaaagtagtttgccaacatctctattttgacaacccttgtaacccttatatgtataaaaatatcttttaaaaga

SEQ ID NO: 107978 - DNA, 1473 bp, Homo sapiens
  Payload ID: 1199
  Gene Symbol: ANTXR2
  Gene Name: anthrax toxin receptor 2
  Uniprot ID: P58335
  ENST ID: ENST00000307333
  CDS Start-End: 4-1473
aggatggtggcggagcggtccccggcccgcagccccgggagctggctgttccccgggctgtggctgttggtgctcagcggtcccggggggctgctgcgcgcccaggagcagccctcctgcagaagagcctttgatctctacttcgtcctggacaagtctgggagtgtggcaaataactggattgaaatttataatttcgtacagcaacttgcggagagatttgtgagccctgaaatgagattatctttcattgtgttttcttctcaagcaactattattttgccattaactggagacagaggcaaaatcagtaaaggcttggaggatttaaaacgtgttagtccagtaggagagacatatatccatgaaggactaaagctagcgaatgaacaaattcagaaagcaggaggcttgaaaacctccagtatcataattgctctgacagatggcaagttggacggtctggtgccatcatatgcagagaaagaggcaaagatatccaggtcacttggggctagtgtttattgtgttggtgtccttgattttgaacaagcacagcttgaaagaattgctgattccaaggagcaagttttccctgtcaaaggtggatttcaggctcttaaaggaataattaattctatactagctcagtcatgtactgaaatcctagaattgcagccctcaagtgtctgtgtgggggaggaatttcagattgtcttaagtggaagaggattcatgctgggcagtcggaatggcagtgttctctgcacttacactgtaaatgaaacatatacaacgagtgtaaaaccagtaagtgtacagcttaattctatgctttgtcctgcacctatcctgaataaagctggagaaactcttgatgtttcagtgagctttaatggaggaaaatctgtcatttcaggatcattaattgtcacagccacagaatgttctaacgggatcgcagccatcattgttattttggtgttactgctactcctggggatcggtttgatgtggtggttttggcccctttgctgcaaagtggttattaaggatcctccaccaccacccgcccctgcaccaaaagaggaggaagaagaacctttgcctactaaaaagtggccaactgtggatgcttcctattatggtggtcgaggggttggaggaattaaaagaatggaggttcgttggggtgataaaggatctactgaggaaggtgcaaggctagagaaagccaaaaatgctgtggtgaagattcctgaagaaacagaggaacccatcaggcctagaccacctcgacccaaacccacacaccagcctcctcagacaaaatggtacaccccaattaagggtcgtcttgatgctctctgggctttgttgaggcggcagtatgaccgggtttctttgatgcgacctcaggaaggagatgaggtttgtatatgggaatgtattgagaaagagctaactgcttga

SEQ ID NO: 107979 - DNA, 1343 bp, Homo sapiens
  Payload ID: 1199
  Gene Symbol: ANTXR2
  Gene Name: anthrax toxin receptor 2
  Uniprot ID: P58335
  ENST ID: ENST00000346652
  CDS Start-End: 141-1301
cgctgccgcaggcgccggcgtctcagctgctcgccgccccccaccccagagtgcgtgccgggtgactcccgccacctttgcgaccctcctgagcttaggggactgcgagcgggagggagtctcaggcccccggccgcaggatggtggcggagcggtccccggcccgcagccccgggagctggctgttccccgggctgtggctgttggtgctcagcggtcccggggggctgctgcgcgcccaggagcagccctcctgcagaagagcctttgatctctacttcgtcctggacaagtctgggagtgtggcaaataactggattgaaatttataatttcgtacagcaacttgcggagagatttgtgagccctgaaatgagattatctttcattgtgttttcttctcaagcaactattattttgccattaactggagacagaggcaaaatcagtaaaggcttggaggatttaaaacgtgttagtccagtaggagagacatatatccatgaaggactaaagctagcgaatgaacaaattcagaaagcaggaggcttgaaaacctccagtatcataattgctctgacagatggcaagttggacggtctggtgccatcatatgcagagaaagaggcaaagatatccaggtcacttggggctagtgtttattgtgttggtgtccttgattttgaacaagcacagcttgaaagaattgctgattccaaggagcaagttttccctgtcaaaggtggatttcaggctcttaaaggaataattaattcttctaacgggatcgcagccatcattgttattttggtgttactgctactcctggggatcggtttgatgtggtggttttggcccctttgctgcaaagtggttattaaggatcctccaccaccacccgcccctgcaccaaaagaggaggaagaagaacctttgcctactaaaaagtggccaactgtggatgcttcctattatggtggtcgaggggttggaggaattaaaagaatggaggttcgttggggtgataaaggatctactgaggaaggtgcaaggctagagaaagccaaaaatgctgtggtgaagattcctgaagaaacagaggaacccatcaggcctagaccacctcgacccaaacccacacaccagcctcctcagacaaaatggtacaccccaattaagggtcgtcttgatgctctctgggctttgttgaggcggcagtatgaccgggtttctttgatgcgacctcaggaaggagatgaggtttgtatatgggaatgtattgagaaagagctaactgcttgagtcagtataatggaggcagggaaatagtaataaaaaatgatt

SEQ ID NO: 107980 - DNA, 1469 bp, Homo sapiens
  Payload ID: 1199
  Gene Symbol: ANTXR2
  Gene Name: anthrax toxin receptor 2
  ENST ID: ENST00000404191
  CDS Start-End: 158-1393
agtcttgggtttgtgaaccacgcatgggggctgttttagcacagctgctaaaataggccaggcctgcaggacatacgggtctgggagtgtggcaaataactggattgaaatttataatttcgtacagcaacttgcggagagatttgtgagccctgaaatgagattatctttcattgtgttttcttctcaagcaactattattttgccattaactggagacagaggcaaaatcagtaaaggcttggaggatttaaaacgtgttagtccagtaggagagacatatatccatgaaggactaaagctagcgaatgaacaaattcagaaagcaggaggcttgaaaacctccagtatcataattgctctgacagatggcaagttggacggtctggtgccatcatatgcagagaaagaggcaaagatatccaggtcacttggggctagtgtttattgtgttggtgtccttgattttgaacaagcacagcttgaaagaattgctgattccaaggagcaagttttccctgtcaaaggtggatttcaggctcttaaaggaataattaattctatactagctcagtcatgtactgaaatcctagaattgcagccctcaagtgtctgtgtgggggaggaatttcagattgtcttaagtggaagaggattcatgctgggcagtcggaatggcagtgttctctgcacttacactgtaaatgaaacatatacaacgagtgtaaaaccagtaagtgtacagcttaattctatgctttgtcctgcacctatcctgaataaagctggagaaactcttgatgtttcagtgagctttaatggaggaaaatctgtcatttcaggatcattaattgtcacagccacagaatgttctaacgggatcgcagccatcattgttattttggtgttactgctactcctggggatcggtttgatgtggtggttttggcccctttgctgcaaagtggttattaaggatcctccaccaccacccgcccctgcaccaaaagaggaggaagaagaacctttgcctactaaaaagtggccaactgtggatgcttcctattatggtggtcgaggggttggaggaattaaaagaatggaggttcgttggggtgataaaggatctactgaggaaggtgcaaggctagagaaagccaaaaatgctgtggtgaagattcctgaagaaacagaggaacccatcaggcctagaccacctcgacccaaacccacacaccagcctcctcagacaaaatggtacaccccaattaagggtcgtcttgatgctctctgggctttgttgaggcggcagtatgaccgggtttctttgatgcgacctcaggaaggagatgagggccggtgcataaacttctcccgagttccatctcagtaaaagggaagcaggaagaccaagaaggtacgaagatggcacattttcacatagctgattttcaaccaaatgaaaaaaa

SEQ ID NO: 107981 - DNA, 8273 bp, Homo sapiens
  Payload ID: 1199
  Gene Symbol: ANTXR2
  Gene Name: anthrax toxin receptor 2
  Uniprot ID: P58335
  ENST ID: ENST00000403729
  CDS Start-End: 527-1993
tttcggagtgcggagggagttggggccgccggaggagaagagtctccactcctagtttgttctgccgtcgccgcgtcccagggaccccttgtcccgaagcgcacggcagcgggggggacttcagccctccaggcggggtgggttccaggtccgggtccgaggcgggcgctggaggctcggccccaggccggagaggaactcctttcgcgagctgtcgccgtgggcccgcattgtctgcaggaactctccggaatcgggagggggaggactggatcgcgcttccactgggattcgtcaagagttccggcggcagctgcggcggtggcggagactccctttgtcctctcaggacctccctctctccctccctgtcagctggtgggtcccgctgccgcaggcgccggcgtctcagctgctcgccgccccccaccccagagtgcgtgccgggtgactcccgccacctttgcgaccctcctgagcttaggggactgcgagcgggagggagtctcaggcccccggccgcaggatggtggcggagcggtccccggcccgcagccccgggagctggctgttccccgggctgtggctgttggtgctcagcggtcccggggggctgctgcgcgcccaggagcagccctcctgcagaagagcctttgatctctacttcgtcctggacaagtctgggagtgtggcaaataactggattgaaatttataatttcgtacagcaacttgcggagagatttgtgagccctgaaatgagattatctttcattgtgttttcttctcaagcaactattattttgccattaactggagacagaggcaaaatcagtaaaggcttggaggatttaaaacgtgttagtccagtaggagagacatatatccatgaaggactaaagctagcgaatgaacaaattcagaaagcaggaggcttgaaaacctccagtatcataattgctctgacagatggcaagttggacggtctggtgccatcatatgcagagaaagaggcaaagatatccaggtcacttggggctagtgtttattgtgttggtgtccttgattttgaacaagcacagcttgaaagaattgctgattccaaggagcaagttttccctgtcaaaggtggatttcaggctcttaaaggaataattaattctatactagctcagtcatgtactgaaatcctagaattgcagccctcaagtgtctgtgtgggggaggaatttcagattgtcttaagtggaagaggattcatgctgggcagtcggaatggcagtgttctctgcacttacactgtaaatgaaacatatacaacgagtgtaaaaccagtaagtgtacagcttaattctatgctttgtcctgcacctatcctgaataaagctggagaaactcttgatgtttcagtgagctttaatggaggaaaatctgtcatttcaggatcattaattgtcacagccacagaatgttctaacgggatcgcagccatcattgttattttggtgttactgctactcctggggatcggtttgatgtggtggttttggcccctttgctgcaaagtggttattaaggatcctccaccaccacccgcccctgcaccaaaagaggaggaagaagaacctttgcctactaaaaagtggccaactgtggatgcttcctattatggtggtcgaggggttggaggaattaaaagaatggaggttcgttggggtgataaaggatctactgaggaaggtgcaaggctagagaaagccaaaaatgctgtggtgaagattcctgaagaaacagaggaacccatcaggcctagaccacctcgacccaaacccacacaccagcctcctcagacaaaatggtacaccccaattaagggtcgtcttgatgctctctgggctttgttgaggcggcagtatgaccgggtttctttgatgcgacctcaggaaggagatgagggccggtgcataaacttctcccgagttccatctcagtaaaagggaagcaggaagaccaagaaggtacgaagatggcacattttcacatagctgattttcaaccaaatgaaaaaaatcaagtgcatttcagaagcttttggaagagcagcttaattcctctcagtcgggaaatgttttctctgccttctgctttgcttgcaccaaacatttctaaacacttgttctgccatctacatgggaggtgatgaaactcagtggtaactcatgatttatgacattgaaaataaagaggaacattgacctgcagactatggtttgtacaagaaagtttgtttgaatgtgtagaagaggaaaaagcaacaacagcaacaacacgaagatgataccaaaacaaggaccacaaaacaactagccatgatgggagacaggagttttttacatggaaacatggcacttgtgtttttatgtggcaagatctttatccataggcagagtatgaaatttcccaccaggctaagcaaataaagaagtccattgccttatagctatgtcagatcacagaatccttccaagtgctctatcacagtgtgccttatgggaagtttctgactggaaaatcttgtcattctaacactgaaaagtgcacacgcatgacaaaatgtagacaagatgcctcaaggtattggtagcaagcaagattttgccctttagttttcgaagacacctttctttcattatgcactcgggacaagaaaattaatagagcgttattccacagaaggcctctagccagagatcttgagtgtagtgcaagggactcattttttgcgaacttgtccctgtgactagtagattcccccttttcctgtgtttaggatttagtagtgcataaagcattaatatccataaacatacctagaagtttgttttgcttttaatttaaaggaagcagtaaccacaaagcttccgctcagggttttttctttcttcaagtctccaagggctcttcagcgtcacaagccagcaactctctttgcattaaaatttcaaagtttaattaatataattaaaagcaacagcaagcagcagcctgtgaagattttgctcatcttttttatgccttttgacattgaatgacctattactgtatgcgcattacttggattttgaggggcactctaccttggttatgattcagtagaggaaaaagaccacctttcttcaatttacaaattaaatcttctggagggtcgctatcacaaaacattgacgatgtatgtattataattttttagaaaaaccaccatcgtgtcacgtcgacgatgccaaattatgttagcgtgagcagaaacaccgtgggggaggaaggcagcagctgaagaaaaaagctcaaatgatctagtcactttcgatactgtacttcagatgcgaaatggatattcgagtggaaacctgacaaagtgcgcctgctttgatgtgaactggtatagacaatgaccagtggctgggtcagtgggatgtctctctgtgagcacaaaggcttatcaaatgacactaaaaataagttcaacaaccatcacattggaagggagaaggcgaacatttcatgtttggcgggcatgtgagtgcacaagatggaaagagcgattggagcatcctggtataattacccccattgtgctcttaatggaaatttcaaaggacgggagtattctgttggttggtgtccaggtttgtggcactgttccaagaggccttacacacacacacaaatatataattttctatacatatatatcctctagcttgaaacttttgctcaagtttatttatgtcactggctggctggatccaaagtcatgtgtccacacattcataaataaaaattttacctatgcctgtgctaccatttctttaagcccacataaagctaatgccttcttgggttgaatatgcagttgttatgcttagtttcagggatggaattctattcagttccaaaatgtccctcatgttcacagatgatactattggcagtagctgcatatgcaagtgtaacttggaagcctgatatagtatacccaaccctttctgcaatgagttattgtatccctttgttctgcatttgcatctggaacaagacctaatgtggcttccttaaatgggcacttcatttctgatgagtgcacaccaattattgctattttaatatcattgagaatactacagaagctaaggctatgtttctttggtaactacttcaaatttctctagaattatgtagcatacttacattttgctgcatgaacaatgaaaattaacctctgcctttaaatggaaaaataactttctgtagattgttatacagctactatgaagagctcttaatgaagaggaagtggcagtggtctatatgtagactgaaaaaatatcattaataaagttcaaagactgatggaatttcattgcccttaaagatatgaaccagatctgttttatgcttttctccaattatactaactagcagttgaaaagaatttgttttgaagagtgttattttcttaccaaaagaccagatcaaaaatccctatacttttccaccaaaaaaagattaaaatgaagccatttctataaatttaatggcactttatattttatatagagaaatagcttctgtttgattttctggacaccatgtcagtcaagatctactttctgtgtaaaaatgaataagtcttgcacataatccattcgtgttgcataaggttgcaaaaacaattaagtgggaaatgactcctaacttatgtgtctactctgcctagaaagaaagttttgaaggcatctatatatatttcataacaatgtctgttctttatggatttgatccataaatatttatctatctgaaaactttgatacttggaatgttttccttagagcatttggtgctccaagaaaaaacatttggtgctaagagttgcagcactgatgcctttccctaagttaattctattttaaaaatttatatttccttcccaatgagatgcagagtaaaatttgagaccctccattgactagggagcagcatctgtcatctatggttaattactattttgacaaaaatatagaaggtttaaacccccatgtatttcagattgttagagaaagaagtagtttgcttatatttcccttgaactttattctaaccatttaaataataaattattcaatatttgttataataaatccttactagatacaagatttgggtgtttctgtgaagttaactttattatctaaatatcactaaccattgtttactgctcagaggcagatacatttgtttagtttaaagttgaaacaaattctatattgtggataattaggtgtttaaaacattttgatagaccagcttatatatgttatttttgaaatttaagaaggcagaatgtaattaggtcacatttacaagtagaaggaattataacttcctactccatgcatatattgtatattggttagcttttactagcattttctagcatcacattactttagaaagtttttgagagtttcattactactggaaaagtttggtgggtatatgtacacaggaaagaaatatatgcatcatttcaatatgaaaggaaatacataatctagaaacatagaataactcttggtacatctgttacatagttaaggaaagaaacaggcaggtgaggctggagaatgttgtctatttgtaggaaataaagtcagtgcagacgcatattctagtttagagttagattaatattgtgcttagtgaatttctatgacatatttctgagaacactttaatatatttccacacctactggaatctaattcagtcgatcggataaaagaaagacttttttgttgttgtttttgaaaatccataatgtagcaggttctgcgctggttttttaatgtattttatttttgtgctctcctgccaaaagaaaaggctgataagtaagtacacagtacaacatgtaaatttgtataaaaatatgcttgtttagattgctctacaataactatattaaggtaaattgtgtgtgtgtgtgtgagagagagagagagagagagaaacagagggagaattgactcaatgtgttttctatgaagagtcttagcttaggaatcaggtaacagagaggtcctagaccatagacccagccatcaactagcttgctgatgttgaacagatcaactctcaaccatagactgaagatggaatgaagatatcaaaagttccttttagcactgactagattttttttcttttttttgaaacagagtctcactctgtcacccaggctggagttcaatggcatggtctgggctgactgtaacctcctcttcctgggttcaagtgattctcatccctcagcctcctgagtagctgggattacaggcacataacaccacacccagctaactcttgtatttttgtagaaatggggtttcgctatgttgctcagactggtctcaaacacctggcctcaagtgatcctcctgcctcagtctcccaaatgctgtgattacaggcacaagctactgcaccaggcctctgactacatttctattaatatggttaggttggaggttttagtatttttgtatctcatatttgtatcaatatgactggcttctttgtctgtagtgtgtggtaatattagttctgtaaactgtcagttgcaaaaaaaaaaaataccttgaactatagtatatgttgataattagccataataatttcttagttaatttcttataattaaatttgtcaaagaggaaacttacagtttatatctgatgaaatctctaaaaagatgggtaaaacattgggaaatgtatgcatgtacttcactctggtttcatagggttagcaagtgtcttaaaaacatatataaagaagcacagagattgttaggagatatttatgctcccagttttaataattgggatactttgtataccacagaaagaaaaattactaaactcctctttttttagtcaaaattggaaaaaaagtcttaattgacagttactatgcctgtgctacccatagcaagtattcagtggaaaatactttactaagtaagtaatttgaacacagcttaaaatccatagtatgttacaattgctagcctttcacaaagtttgcattgtcttaatgtagaaggatactgtgatctaagaattcacaattttaaaaagtggaacctaaatagggtttcctaattgccatgaagttatttgtatcttagatgaattatatttacaacattgtaaatgtcagtgggtgatccaaaataaattgttaaagttattaaaatgtacatttaagtaggtttcagtttgactagaaataattggcaagaaggcaagaactagtcttctagagcagggatcccatcccccaggtcatggactggtactggtccatggcctgttagaaaccaggccacacagcaggagatgagtggaaagcaagtgaaacttcatgggtatttacagcaattccccgtcgctcgcattaccacctgagctgtgtctcctgtgagatcagcagcagcattagattctcaaggagcacaaacccttttggaactgtgtgtgagggatctaagttgcgcatttcttatgagaatctaatacctgatgatctgttgttgtctcccaccacccccagatgggaccatctagttgcaggaaaacaagctcaggctcccactgattctacattatagtgagttgtgtaattatttcattatatataacaatgtaataataatagaaataaagtacataataaatgtaatccacttgaattatcctgaaaccatccccaccccccaccccccggtctgtggaaaaattggcttccacgaaactggtccgtggtgccaaaaatattgggtatggttgttctagggtgtagactatgaaaaagatatgcattgtctccatgaactaaaaggcaaggtgattttaaacaatttagatgccaaacaaagaaaccaaaagcttccaaagtaataaatgatagagaaaggaaattgttacatcatgtgccaaattagaagcaaatctaaacttcttatcatgtactccaccatctgatttgtataagtaattggggaaagaaaaactcacaatataaaacaagattgactagttctagcagatgacacctgtaaatagaatttttactagttgaaattctgatgtgaaatgaagccattattattatcacaataaagtgttctttttagttctttttttaata

SEQ ID NO: 107982 - DNA, 2026 bp, Homo sapiens
  Payload ID: 1199
  Gene Symbol: ANTXR2
  Gene Name: anthrax toxin receptor 2
  ENST ID: ENST00000449651
  CDS Start-End: 46-783
tataatttcgtacagcaacttgcggagagatttgtgagccctgaaatgagattatctttcattgtgttttcttctcaagcaactattattttgccattaactggagacagaggcaaaatcagtaaaggcttggaggatttaaaacgtgttagtccagtaggagagacatatatccatgaaggactaaagctagcgaatgaacaaattcagaaagcaggaggcttgaaaacctccagtatcataattgctctgacagatggcaagttggacggtctggtgccatcatatgcagagaaagaggcaaagatatccaggtcacttggggctagtgtttattgtgttggtgtccttgattttgaacaagcacagcttgaaagaattgctgattccaaggagcaagttttccctgtcaaaggtggatttcaggctcttaaaggaataattaattctatactagctcagtcatgtactgaaatcctagaattgcagccctcaagtgtctgtgtgggggaggaatttcagattgtcttaagtggaagaggattcatgctgggcagtcggaatggcagtgttctctgcacttacactgtaaatgaaacatatacaacgagtgtaaaaccagtaagtgtacagcttaattctatgctttgtcctgcacctatcctgaataaagctggagagtggggtctcactgtcacccaggctggagtgaagtggcatgatctgactcactgtacttttggcctttctggctcaggtgatcctcctacttcagcctcctgagtagctggggctacagaactcttgatgtttcagtgagctttaatggaggaaaatctgtcatttcaggatcattaattgtcacagccacagaatgttctaacgggatcgcagccatcattgttattttggtgttactgctactcctggggatcggtttgatgtggtggttttggcccctttgctgcaaagtggttattaaggatcctccaccaccacccgcccctgcaccaaaagaggaggaagaagaacctttgcctactaaaaagtggccaactgtggatgcttcctattatggtggtcgaggggttggaggaattaaaagaatggaggttcgttggggtgataaaggatctactgaggaaggtgcaaggctagagaaagccaaaaatgctgtggtgaagattcctgaagaaacagaggaacccatcaggcctagaccacctcgacccaaacccacacaccagcctcctcagacaaaatggtacaccccaattaagggtcgtcttgatgctctctgggctttgttgaggcggcagtatgaccgggtttctttgatgcgacctcaggaaggagatgagggccggtgcataaacttctcccgagttccatctcagtaaaagggaagcaggaagaccaagaagaaaaaccaccatcgtgtcacgtcgacgatgccaaattatgttagcgtgagcagaaacaccgtgggggaggaaggcagcagctgaagaaaaaagctcaaatgatctagtcactttcgatactgtacttcagatgcgaaatggatattcgagtggaaacctgacaaagtgcgcctgctttgatgtgaactggtatagacaatgaccagtggctgggtcagtgggatgtctctctgtgagcacaaaggcttatcaaatgacactaaaaataagttcaacaaccatcacattggaagggagaaggcgaacatttcatgtttggcgggcatgtgagtgcacaagatggaaagagcgattggagcatcctggtataattacccccattgtgctcttaatggaaatttcaaaggacgggagtattctgttggttggtgtccaggtttgtggcactgttccaagaggccttacacacacacacaaatatataattttctatacatatatatcctctagcttgaaacttttgctcaagtttatttatgtcactggctggctggatccaaagtcatgtgtccacacattcataaataaaaattttacctatg

SEQ ID NO: 107983 - DNA, 430 bp, Homo sapiens
  Payload ID: 1200
  Gene Symbol: ANTXRL
  Gene Name: anthrax toxin receptor-like
  ENST ID: ENST00000614267
  CDS Start-End: 1-338
aggctcaaaaggctcggaaactgggggccaacgtttacaccctgggtgtggctgattataatctggatcagataacagcaattgcagacagccctggccacgtgtttgcagtggagaatggcttcaaggccctgagaagcaccattgatgccctcacgtcaaaggtctgtcttgatgtgacatcggtggagccttcctctgagtgtgtaggagaaccctaccatgtggttattcatggaaatggctttcagaatctaaagaaacgggatgaagttatttgcagatttatcttcaatgaaagcactatcattgggagtactctattgaagtcagcttgaacaaaggcaaaacattcttcaagagcaatgtcagcatcaccagcaccacatgtactgtcaaggagccaccacctgtgcagaagccagaaaag

SEQ ID NO: 107984 - DNA, 1964 bp, Homo sapiens
  Payload ID: 1200
  Gene Symbol: ANTXRL
  Gene Name: anthrax toxin receptor-like
  ENST ID: ENST00000622632
  CDS Start-End: 267-1964
cataacagagaattctgtccccagggtgggggaagggccaggcaggtagctggaagcaagtctcccagagccagctgctgaccctagtccctgcgatctggggaggtacctggtggagggccatagtgtgcactggtgaaagggcaggaggaggggtgtggccccgggcataaggggaggcggcaaagaaggggcctgtgctcagcctctctgggccctggcacaggcacccaagagtgaggtggggtcacagggacagccagataatggggagccatgagtccctggggccctacttcctggtcttcctgctgctgctgctgcttcctccaccgctttttagagcaggaagccttcggtaccatggacctgactggagaatatttcaccgcctggccctgggctccaggagagcccaccaccaccatggcccaggatggaggcagcactggcgccaggggcaagcaggtcacagatgccagggctcatttgacctctacttcatcttggacaagtctggcagcgtgaacaataactggattgacctttatatgtgggtggaggaaacagtggcgaggttccaaagcccaaatattcggatgtgcttcatcacctactccacagacggccagactgtcttgccactcacctcagacaagaatagaataaaaaacggtcttgaccaacttcagaaaattgtgcctgacggtcacacattcatgcaggcaggatttagaaaggcaattcaacagatcgaaagtttcaactccggaaacaaggttcccagcatgattattgctatgactgatggagaactggtggcacatgcatttcaggacactctcagagaagctcaaaaggctcggaaactgggggccaacgtttacaccctgggtgtggctgattataatctggatcagataacagcaattgcagacagccctggccacgtgtttgcagtggagaatggcttcaaggccctgagaagcaccattgatgccctcacgtcaaaggtctgtcttgatgtgacatcggtggagccttcctctgagtgtgtaggagaaccctaccatgtggttattcatggaaatggctttcagaatctaaagaaacgggatgaagttatttgcagatttatcttcaatgaaagcactatcattgatgaaaagccaaccagtatcgacaataattccatgaattgccctgggccaaaactagaaaaacctggagaggagtactctattgaagtcagcttgaacaaaggcaaaacattcttcaagagcaatgtcagcatcaccagcaccacatgtggcattttccgcaactggctctattttgtgccactcctgctgcttgtgccactgctgctgtgttgtgtctggcggctgtgccgcaagcagactgtcaaggagccaccacctgtgcagaagccagaaaaggagccagagcaggaaaaaccaccatcaccaccaccaccgcctccgcctccaccacctccactcccgcctccgcccccagctcctgtaaacacctgccccactgtgattatttgttgctgtggatgccaaggagtgggcgggatgagaaggatagagggcaatctggataccttttgtgacctctctcacgcaagctgccaccaggtgccatggatgtgttgtcagagcagggaccaggggaggtacctcagcttagcccttgcacagtcccaatatgcacaggctccctgctgcccaaggatctgctttccacacagccaggagcccaaggatctgcctgagacacagcccggagtacttttcccaagcacagactctgtgcaacccaaagagctgccttcaacccagccgggagtgcctcgatgctgccgctgctgtccccactgctcaggcacacggcagaaccccctttgtcactccccccctcagagcccaacttctaaggcaccaaacacccaagattaa

SEQ ID NO: 107985 - DNA, 490 bp, Homo sapiens
  Payload ID: 1200
  Gene Symbol: ANTXRL
  Gene Name: anthrax toxin receptor-like
  ENST ID: ENST00000619553
  CDS Start-End: 308-490
gctgggaggaagcccaggtcacacggggaggctacatgcagggtctccattcacagtcccagctgagcccaggttttgggccctcctgcctaggagccacacttgaagccttcggtaccatggacctgactggagaatatttcaccgcctggccctgggctccaggagagcccaccaccaccatggcccaggatggaggcagcactggcgccaggggcaagcaggtcacagatgccagggctcatttgacctctacttcatcttggacaagtctggcagcgtgaacaataactggattgacctttatatgtgggtggaggaaacagtggcgaggttccaaagcccaaatattcggatgtgcttcatcacctactccacagacggccagactgtcttgccactcacctcagacaagaatagaataaaaaacggtcttgaccaacttcagaaaattgtgcctgacggtcacacattcatgcaggcaggattt

SEQ ID NO: 107986 - DNA, 2206 bp, Homo sapiens
  Payload ID: 1200
  Gene Symbol: ANTXRL
  Gene Name: anthrax toxin receptor-like
  Uniprot ID: A6NF34
  ENST ID: ENST00000620264
  CDS Start-End: 266-2161
ataacagagaattctgtccccagggtgggggaagggccaggcaggtagctggaagcaagtctcccagagccagctgctgaccctagtccctgcgatctggggaggtacctggtggagggccatagtgtgcactggtgaaagggcaggaggaggggtgtggccccgggcataaggggaggcggcaaagaaggggcctgtgctcagcctctctgggccctggcacaggcacccaagagtgaggtggggtcacagggacagccagataatggggagccatgagtccctggggccctacttcctggtcttcctgctgctgctgctgcttcctccaccgctttttagagcaggaagccttcggtaccatggacctgactggagaatatttcaccgcctggccctgggctccaggagagcccaccaccaccatggcccaggatggaggcagcactggcgccaggggcaagcaggtcacagatgccagggctcatttgacctctacttcatcttggacaagtctggcagcgtgaacaataactggattgacctttatatgtgggtggaggaaacagtggcgaggttccaaagcccaaatattcggatgtgcttcatcacctactccacagacggccagactgtcttgccactcacctcagacaagaatagaataaaaaacggtcttgaccaacttcagaaaattgtgcctgacggtcacacattcatgcaggcaggatttagaaaggcaattcaacagatcgaaagtttcaactccggaaacaaggttcccagcatgattattgctatgactgatggagaactggtggcacatgcatttcaggacactctcagagaagctcaaaaggctcggaaactgggggccaacgtttacaccctgggtgtggctgattataatctggatcagataacagcaattgcagacagccctggccacgtgtttgcagtggagaatggcttcaaggccctgagaagcaccattgatgccctcacgtcaaaggtctgtcttgatgtgacatcggtggagccttcctctgagtgtgtaggagaaccctaccatgtggttattcatggaaatggctttcagaatctaaagaaacgggatgaagttatttgcagatttatcttcaatgaaagcactatcattgatgaaaagccaaccagtatcgacaataattccatgaattgccctgggccaaaactagaaaaacctggagaggagtactctattgaagtcagcttgaacaaaggcaaaacattcttcaagagcaatgtcagcatcaccagcaccacatgtggcattttccgcaactggctctattttgtgccactcctgctgcttgtgccactgctgctgtgttgtgtctggcggctgtgccgcaagcagactgtcaaggagccaccacctgtgcagaagccagaaaaggagccagagcaggaaaaaccaccatcaccaccaccaccgcctccgcctccaccacctccactcccgcctccgcccccagctcctgtaaacacctgccccactgtgattatttgttgctgtggatgccaaggagtgggcgggatgagaaggatagagggcaatctggataccttttgtgacctctctcacgcaagctgccaccaggtgccatggatgtgttgtcagagcagggaccaggggaggtacctcagcttagcccttgcacagtcccaatatgcacaggctccctgctgcccaaggatctgctttccacacagccaggagtgcctttccctaccacaggctccctgcagcccaaggatgtgcctgagacacagccgggagtgcctcgccctcaaacaggctcgctgcagcccaaacatctgcctgagacacagccaacacagcagggagtgccttgcccgcaaacaggctccctgcagcccaaggatctgcctgagacacagcccggagtacttttcccaagcacagactctgtgcaacccaaagagctgccttcaacccagccgggagtgcctccccctcacctgctcctccaggtgccgcctccccccagctaggtgcttgaggcctccctccaggatgctgccgctgctgtccccactgctcaggcacacggcagaaccccctttgtcactccccccctcagagcccaacttctaaggcaccaaacacccaagattaacaggcttttgttgctgaactgga

SEQ ID NO: 107987 - DNA, 2125 bp, Homo sapiens
  Payload ID: 1200
  Gene Symbol: ANTXRL
  Gene Name: anthrax toxin receptor-like
  ENST ID: ENST00000617088
  CDS Start-End: 253-1026
ataacagagaattctgtccccagggtgggggaagggccaggcagagcaggaagccttcggtaccatggacctgactggagaatatttcaccgcctggccctgggctccaggagagcccaccaccaccatggcccaggatggaggcagcactggcgccaggggcaagcaggtcacagatgccagggctcatttgacctctacttcatcttggacaagtctggcagcgtgaacaataactggattgacctttatatgtgggtggaggaaacagtggcgaggttccaaagcccaaatattcggatgtgcttcatcacctactccacagacggccagactgtcttgccactcacctcagacaagaatagaataaaaaacggtcttgaccaacttcagaaaattgtgcctgacggtcacacattcatgcaggcaggatttagaaaggcaattcaacagatcgaaagtttcaactccggaaacaaggttcccagcatgattattgctatgactgatggagaactggtggcacatgcatttcaggacactctcagagaagctcaaaaggctcggaaactgggggccaacgtttacaccctgggtgtggctgattataatctggatcagataacagcaattgcagacagccctggccacgtgtttgcagtggagaatggcttcaaggccctgagaagcaccattgatgccctcacgtcaaaggtctgtcttgatgtgacatcggtggagccttcctctgagtgtgtaggagaaccctaccatgtggttattcatggaaatggctttcagaatctaaagaaacgggatgaagttatttgcagatttatcttcaatgaaagcactatcattgatgaaaagccaaccagtatcgacaataattccatgaattgccctgggccaaaactagaaaaacctggagaggagtactctattgaagtcagcttgaacaaaggcaaaacattcttcaagagcaatgtcagcatcaccagcaccacatgtccttctcttaagtagagctctggacatgaggaaggcctgagcagcctgccttcccacggatgccgcccaagattcctttattgcgaagaacacccagagaactgttcccgttgcttataccccatgtggccctggttctgagccaggacttggagctctctaaacctcacaagtgcccccagggagggcggctcattccctttgcacagggcattttccgcaactggctctattttgtgccactcctgctgcttgtgccactgctgctgtgttgtgtctggcggctgtgccgcaagcagactgtcaaggagccaccacctgtgcagaagccagaaaaggagccagagcaggaaaaaccaccatcaccaccaccaccgcctccgcctccaccacctccactcccgcctccgcccccagctcctgtaaacacctgccccactgtgattatttgttgctgtggatgccaaggagtgggcgggatgagaaggatagagggcaatctggataccttttgtgacctctctcacgcaagctgccaccaggtgccatggatgtgttgtcagagcagggaccaggggaggtacctcagcttagcccttgcacagtcccaatatgcacaggctccctgctgcccaaggatctgctttccacacagccaggagtgcctttccctaccacaggctccctgcagcccaaggatgtgcctgagacacagccgggatgccttgcccgcaaacaggctccctgcagcccaaggatctgcctgagacacagcccggagtacttttcccaagcacagactctgtgcaacccaaagagctgccttcaacccagccgggagtgcctccccctcacctgctcctccaggtgccgcctccccccagctaggtgcttgaggcctccctccaggatgctgccgctgctgtccccactgctcaggcacacggcagaaccccctttgtcactccccccctcagagcccaacttctaaggcaccaaacacccaagattaacaggcttttgttgctgaactggacatatacattgagtcttttcttgcggtcaaaggagttgaattcttgctgatcaactaaagttgattgtgtttgacacc

SEQ ID NO: 107988 - DNA, 3963 bp, Homo sapiens
  Payload ID: 1201
  Gene Symbol: MFI2
  Gene Name: antigen p97 (melanoma associated) identified by monoclonal antibodies 133.2 and 96.5
  Uniprot ID: P08582
  ENST ID: ENST00000296350
  CDS Start-End: 115-2331
cacttaaggagctcgggccagcgcgagggggagcagggaggaagcccggctgctgcggacctcctcggacccggacccagccccagcccggccccagccagccccgacggcgccatgcggggtccgagcggggctctgtggctgctcctggctctgcgcaccgtgctcggtggcatggaggtgcggtggtgcgccacctcggacccagagcagcacaagtgcggcaacatgagcgaggccttccgggaagcgggcatccagccctccctcctctgcgtccggggcacctccgccgaccactgcgtccagctcatcgcggcccaggaggctgacgccatcactctggatggaggagccatctatgaggcgggaaaggagcacggcctgaagccggtggtgggcgaagtgtacgatcaagaggtcggtacctcctattacgccgtggctgtggtcaggaggagctcccatgtgaccattgacaccctgaaaggcgtgaagtcctgccacacgggcatcaatcgcacagtgggctggaacgtgcccgtgggctacctggtggagagcggccgcctctcggtgatgggctgcgatgtactcaaagctgtcagcgactattttgggggcagctgcgtcccgggggcaggagagaccagttactctgagtccctctgtcgcctctgcaggggtgacagctctggggaaggggtgtgtgacaagagccccctggagagatactacgactacagcggggccttccggtgcctggcggaaggggcaggggacgtggcttttgtgaagcacagcacggtactggagaacacggatgggaagacgcttccctcctggggccaggccctgctgtcacaggacttcgagctgctgtgccgggatggtagccgggccgatgtcaccgagtggaggcagtgccatctggcccgggtgcctgctcacgccgtggtggtccgggccgacacagatgggggcctcatcttccggctgctcaacgaaggccagcgtctgttcagccacgagggcagcagcttccagatgttcagctctgaggcctatggccagaaggatctactcttcaaagactctacctcggagcttgtgcccatcgccacacagacctatgaggcgtggctgggccatgagtacctgcacgccatgaagggtctgctctgtgaccccaaccggctgcccccctacctgcgctggtgtgtgctctccactcccgagatccagaagtgtggagacatggccgtggccttccgccggcagcggctcaagccagagatccagtgcgtgtcagccaagtccccccaacactgcatggagcggatccaggctgagcaggtcgacgctgtgaccctgagtggcgaggacatttacacggcggggaagacgtacggcctggttcccgcagccggggagcactatgccccggaagacagcagcaactcgtactacgtggtggccgtggtgagacgggacagctcccacgccttcaccttggatgagcttcggggcaagcgctcctgccacgccggtttcggcagccctgcaggctgggatgtccccgtgggtgcccttattcagagaggcttcatccggcccaaggactgtgacgtcctcacagcagtgagcgagttcttcaatgccagctgcgtgcccgtgaacaaccccaagaactacccctcctcgctgtgtgcactgtgcgtgggggacgagcagggccgcaacaagtgtgtgggcaacagccaggagcggtattacggctaccgcggcgccttcaggtgcctggtggagaatgcgggtgacgttgccttcgtcaggcacacaaccgtctttgacaacacaaacggccacaattccgagccctgggctgctgagctcaggtcagaggactatgaactgctgtgccccaacggggcccgagccgaggtgtcccagtttgcagcctgcaacctggcacagataccaccccacgccgtgatggtccggcccgacaccaacatcttcaccgtgtatggactgctggacaaggcccaggacctgtttggagacgaccacaataagaacgggttcaaaatgttcgactcctccaactatcatggccaagacctgcttttcaaggatgccaccgtccgggcggtgcctgtcggagagaaaaccacctaccgcggctggctggggctggactacgtggcggcgctggaagggatgtcgtctcagcagtgctcgggcgcagcggccccggcgcccggggcgcccctgctcccgctgctgctgcccgccctcgccgcccgcctgctcccgcccgccctctgagcccggccgccccgccccagagctccgatgcccgcccggggagtttccgcggcggcttcgcgctggaatccagaaggaagctcgcgaaggccgggcccggcgtgggcgggagcaggcgcctccccgggagccccgccgcccacgggcgccacctggcgctgctacctgaggcgccgcccccgggcccgcgcggcccttcccgccaaccgccgcctcccgccacctggagccgcgcgggccgcgccggaggaggccggttgcccaggaaaccgctgagtccgggcttcccgccgcccgccccgcggtgtcgcccgaggggcccgcccgcctcctccccgcagccccgcgcccccgtccgcgaggccccctggggacgcggtggccgccgaggcgcctacacccgcaggccgcggccaggccgtcccaggaggccccggcgccaacgggacccggcgcgtgggacagcggcctctgctggcggcggcgggagggaggccggaccggggcgacggggagaagccttcgcccgcgggaccgtgtccggggtgggggctccagttcctccgaccgcccgtgcgctgggagggaggccgagcccggggaacgccgcgtgccctgcctcgtcccccactgtggccgcgccagctccatcccgggccagccgcgtccacgggccccctcccgagtctcctcaggctctcgcctcccctacccccgtgggatgcccaccgcccgcacccacgcccgagcctggcggcagcagccgccccccgcctgaagggagccggaggtgacccaggccgcgggctcccgaggcccctgaagggctgcgcgtggggacccgccatgcttctgggttccgaacgggggtgagctccgtctcctcacccggccccgcacccgctgggcctggggacccctcactccccgtgcccgcccctccgcgaggcagcagaaagcgcccggccggggcctctctctactccatcttgccacagttgtctgagaagccagaaaaagtttccagaactggcagcccttaaaaaaaatgaagaggaagagaagaaatgggagcaggcagccctcgtcagcagaccgggagccgcgtgggcgcggagccatttgcattccggtctgcgggggctcggggatgctggtgacaggcccggttcccggtggctcgcccccacctgcgggcgtcgggaaggatcccttccatctctcagccgcagaggaggccctggcagcgccccggctgtagccatgcaaccccgaggagtcccgggcaccttcaccccaccgggaggggccacaaggacctgggcctcggccaccaagctttgtcccctctcgctgtggggggctagtgattctcctccgacctgacgattgcttggttttttcaaaagggagttttgtgcggtgagaagtgtgtttctgtgtggctaactctgggctagcgtgccgtggccattgaaggtgtggcctgcgtgggtgcagtgtaagtgacgctggattgtcaggtggcagcaggggacccctgctgtgtcagtgctaatgaaacatgttggttggtttctaaaataaagccaaacaagccagcacatgcagaggcttggaccctgatagaaa

SEQ ID NO: 107989 - DNA, 1650 bp, Homo sapiens
  Payload ID: 1201
  Gene Symbol: MFI2
  Gene Name: antigen p97 (melanoma associated) identified by monoclonal antibodies 133.2 and 96.5
  Uniprot ID: P08582
  ENST ID: ENST00000296351
  CDS Start-End: 90-998
agggggagcagggaggaagcccggctgctgcggacctcctcggacccggacccagccccagcccggccccagccagccccgacggcgccatgcggggtccgagcggggctctgtggctgctcctggctctgcgcaccgtgctcggtggcatggaggtgcggtggtgcgccacctcggacccagagcagcacaagtgcggcaacatgagcgaggccttccgggaagcgggcatccagccctccctcctctgcgtccggggcacctccgccgaccactgcgtccagctcatcgcggcccaggaggctgacgccatcactctggatggaggagccatctatgaggcgggaaaggagcacggcctgaagccggtggtgggcgaagtgtacgatcaagaggtcggtacctcctattacgccgtggctgtggtcaggaggagctcccatgtgaccattgacaccctgaaaggcgtgaagtcctgccacacgggcatcaatcgcacagtgggctggaacgtgcccgtgggctacctggtggagagcggccgcctctcggtgatgggctgcgatgtactcaaagctgtcagcgactattttgggggcagctgcgtcccgggggcaggagagaccagttactctgagtccctctgtcgcctctgcaggggtgacagctctggggaaggggtgtgtgacaagagccccctggagagatactacgactacagcggggccttccggtgcctggcggaaggggcaggggacgtggcttttgtgaagcacagcacggtactggagaacacggatgaaagtccatcacgaaggcaaacatggaccagatctgaggaggaagaaggcgagtgccctgcacacgaggaagcacgtaggacgatgcgctctagtgctgggcaagcctggaaatgggctcccgttcacaggccccaggacgagtctgacaaaggagaatttggaaaacgggcaaagagtagggatatgttgggttaagaatcagctctttcaaacttggggttttttttgagatgggggtctcaccatgttgcccaggctggtctcaaacccccagcctcaactgatcctcgcatctcagcctcctgagtagctgggatgacaggcgtgcacctggcagctttttcaaagtgttgatggtaatctgaggcaatctaagggagtcattttttaagtgactttatacagaaagattggtaagagccaaggggtagaagtggcataaatgtctaaagcagggaagtgacaggactttcattgttcttggctgaggagaagcgggagtggctgatggaagcacctaaatgatgcctttgtctgtgggaaggcaaatgatgccccagagctctaaccaaaggttttgcagccgccgaaaaacaggaaagttgggaagcgggggtaggactacactgaatcattaacagtgctgtaaactaccatgtggccattaacaatgacctttagggagttttcctaaacgatcactctggtgcgggtgtttggttttgttttaaaatagctttgcagtgaaagctttcatgaccatacaaattatcttttttcttcctatttccttgtagaggtttttttcctccttgtcttaaggtcataaaaatattgttatgtggga

SEQ ID NO: 107990 - DNA, 629 bp, Homo sapiens
  Payload ID: 1201
  Gene Symbol: MFI2
  Gene Name: antigen p97 (melanoma associated) identified by monoclonal antibodies 133.2 and 96.5
  ENST ID: ENST00000439320
  CDS Start-End: 86-629
ggagcagggaggaagcccggctgctgcggacctcctcggacccggacccagccccagcccggccccagccagccccgacggcgccatgcggggtccgagcggggctctgtggctgctcctggctctgcgcaccgtgctcggtggcatggaggtgcggtggtgcgccacctcggacccagagcagcacaagtgcggcaacatgagcgaggccttccgggaagcgggcatccagccctccctcctctgcgtccggggcacctccgccgaccactgcgtccagctcatcgcggcccaggaggctgacgccatcactctggatggaggagccatctatgaggcgggaaaggagcacggcctgaagccggtggtgggcgaagtgtacgatcaagaggtcggtacctcctattacgccgtggctgtggtcaggaggagctcccatgtgaccattgacaccctgaaaggcgtgaagtcctgccacacgggcatcaatcgcacagtgggctggaacgtgcccgtgggctacctggtggagagcggccgcctctcggtgatgggctgcgatgtactcaaaggacccaaacgaggtgccgacttgcacccagaaagctcccaagtggctcatcagccca

SEQ ID NO: 107991 - DNA, 1821 bp, Homo sapiens
  Payload ID: 1202
  Gene Symbol: AMH
  Gene Name: anti-Mullerian hormone
  Uniprot ID: P03971
  ENST ID: ENST00000221496
  CDS Start-End: 23-1705
ccagcccctggcagcacccacgatgcgggacctgcctctcaccagcctggccctagtgctgtctgccctgggggctctgctggggactgaggccctcagagcagaggagccagctgtgggcaccagtggcctcatcttccgagaagacttggactggcctccaggcagcccacaagagcctctgtgcctggtggcactgggcggggacagcaatggcagcagctcccccctgcgggtggtgggggctctaagcgcctatgagcaggccttcctgggggccgtgcagagggcccgctggggcccccgagacctggccaccttcggggtctgcaacaccggtgacaggcaggctgccttgccctctctacggcggctgggggcctggctgcgggaccctggggggcagcgcctggtggtcctacacctggaggaagtgacctgggagccaacaccctcgctgaggttccaggagcccccgcctggaggagctggccccccagagctggcgctgctggtgctgtaccctgggcctggccctgaggtcactgtgacgagggctgggctgccgggtgcccagagcctctgcccctcccgagacacccgctacctggtgttagcggtggaccgccctgcgggggcctggcgcggctccgggctggccttgaccctgcagccccgcggagaggactcccggctgagtaccgcccggctgcaggcactgctgttcggcgacgaccaccgctgcttcacacggatgaccccggccctgctcctgctgccgcggtccgagcccgcgccgctgcctgcgcacggccagctggacaccgtgcccttcccgccgcccaggccatccgcggaactcgaggagtcgccacccagcgcagaccccttcctggagacgctcacgcgcctggtgcgggcgctgcgggtccccccggcccgggcctccgcgccgcgcctggccctggatccggacgcgctggccggcttcccgcagggcctagtcaacctgtcggaccccgcggcgctggagcgcctactcgacggcgaggagccgctgctgctgctgctgaggcccactgcggccaccaccggggatcctgcgcccctgcacgaccccacgtcggcgccgtgggccacggccctggcgcgccgcgtggctgctgaactgcaagcggcggctgccgagctgcgaagcctcccgggtctgcctccggccacagccccgctgctggcgcgcctgctcgcgctctgcccaggtggccccggcggcctcggcgatcccctgcgagcgctgctgctcctgaaggcgctgcagggcctgcgcgtggagtggcgcgggcgggatccgcgcgggccgggtcgggcacagcgcagcgcgggggccaccgccgccgacgggccgtgcgcgctgcgcgagctcagcgtagacctccgcgccgagcgctccgtactcatccccgagacctaccaggccaacaattgccagggcgtgtgcggctggcctcagtccgaccgcaacccgcgctacggcaaccacgtggtgctgctgctgaagatgcaggtccgtggggccgccctggcgcgcccaccctgctgcgtgcccaccgcctacgcgggcaagctgctcatcagcctgtcggaggagcgcatcagcgcgcaccacgtgcccaacatggtggccaccgagtgtggctgccggtgacccctgcgccgcgcggactcctgccccgagggtccggacgcgccccagctcgcgccccttcccatatttattcggaccccaagcatcgccccaataaagaccagcaagcaaccggc

SEQ ID NO: 107992 - DNA, 1863 bp, Homo sapiens
  Payload ID: 1203
  Gene Symbol: AMHR2
  Gene Name: anti-Mullerian hormone receptor, type II
  Uniprot ID: Q16671
  ENST ID: ENST00000257863
  CDS Start-End: 81-1802
gtatctgaagaaagatttggccaggggcagctgtgctggcttatgctcttctccttctgctgctgccatcctccagcaagatgctagggtctttggggctttgggcattacttcccacagctgtggaagcacccccaaacaggcgaacctgtgtgttctttgaggcccctggagtgcggggaagcacaaagacactgggagagctgctagatacaggcacagagctccccagagctatccgctgcctctacagccgctgctgctttgggatctggaacctgacccaagaccgggcacaggtggaaatgcaaggatgccgagacagtgatgagccaggctgtgagtccctccactgtgacccaagtccccgagcccaccccagccctggctccactctcttcacctgctcctgtggcactgacttctgcaatgccaattacagccatctgcctcctccagggagccctgggactcctggctcccagggtccccaggctgccccaggtgagtccatctggatggcactggtgctgctggggctgttcctcctcctcctgctgctgctgggcagcatcatcttggccctgctacagcgaaagaactacagagtgcgaggtgagccagtgccagagccaaggccagactcaggcagggactggagtgtggagctgcaggagctgcctgagctgtgtttctcccaggtaatccgggaaggaggtcatgcagtggtttgggccgggcagctgcaaggaaaactggttgccatcaaggccttcccaccgaggtctgtggctcagttccaagctgagagagcattgtacgaacttccaggcctacagcacgaccacattgtccgatttatcactgccagccgggggggtcctggccgcctgctctctgggcccctgctggtactggaactgcatcccaagggctccctgtgccactacttgacccagtacaccagtgactggggaagttccctgcggatggcactgtccctggcccagggcctggcatttctccatgaggagcgctggcagaatggccaatataaaccaggtattgcccaccgagatctgagcagccagaatgtgctcattcgggaagatggatcgtgtgccattggagacctgggccttgccttggtgctccctggcctcactcagccccctgcctggacccctactcaaccacaaggcccagctgccatcatggaagctggcacccagaggtacatggcaccagagctcttggacaagactctggacctacaggattggggcatggccctccgacgagctgatatttactctttggctctgctcctgtgggagatactgagccgctgcccagatttgaggcctgacagcagtccaccacccttccaactggcctatgaggcagaactgggcaatacccctacctctgatgagctatgggccttggcagtgcaggagaggaggcgtccctacatcccatccacctggcgctgctttgccacagaccctgatgggctgagggagctcctagaagactgttgggatgcagacccagaagcacggctgacagctgagtgtgtacagcagcgcctggctgccttggcccatcctcaagagagccacccctttccagagagctgtccacgtggctgcccacctctctgcccagaagactgtacttcaattcctgcccctaccatcctcccctgtaggcctcagcggagtgcctgccacttcagcgttcagcaaggcccttgttccaggaatcctcagcctgcctgtaccctttctcctgtgtaaatatgcagtttatgtgtcatcaatgtacatgccaacataaatatggcgattgtatagctgt

SEQ ID NO: 107993 - DNA, 1437 bp, Homo sapiens
  Payload ID: 1203
  Gene Symbol: AMHR2
  Gene Name: anti-Mullerian hormone receptor, type II
  Uniprot ID: Q16671
  ENST ID: ENST00000379791
  CDS Start-End: 1-1437
atgctagggtctttggggctttgggcattacttcccacagctgtggaagcacccccaaacaggcgaacctgtgtgttctttgaggcccctggagtgcggggaagcacaaagacactgggagagctgctagatacaggcacagagctccccagagctatccgctgcctctacagccgctgctgctttgggatctggaacctgacccaagaccgggcacaggtggaaatgcaaggatgccgagacagtgatgagccaggctgtgagtccctccactgtgacccaagtccccgagcccaccccagccctggctccactctcttcacctgctcctgtggcactgacttctgcaatgccaattacagccatctgcctcctccagggagccctgggactcctggctcccagggtccccaggctgccccaggtgagtccatctggatggcactggtgctgctggggctgttcctcctcctcctgctgctgctgggcagcatcatcttggccctgctacagcgaaagaactacagagtgcgaggtgagccagtgccagagccaaggccagactcaggcagggactggagtgtggagctgcaggagctgcctgagctgtgtttctcccaggtaatccgggaaggaggtcatgcagtggtttgggccgggcagctgcaaggaaaactggttgccatcaaggccttcccaccgaggtctgtggctcagttccaagctgagagagcattgtacgaacttccaggcctacagcacgaccacattgtccgatttatcactgccagccgggggggtcctggccgcctgctctctgggcccctgctggtactggaactgcatcccaagggctccctgtgccactacttgacccagtacaccagtgactggggaagttccctgcggatggcactgtccctggcccagggcctggcatttctccatgaggagcgctggcagaatggccaatataaaccaggtattgcccaccgagatctgagcagccagaatgtgctcattcgggaagatggatcgtgtgccattggagacctgggccttgccttggtgctccctggcctcactcagccccctgcctggacccctactcaaccacaaggcccagctgccatcatggaagaccctgatgggctgagggagctcctagaagactgttgggatgcagacccagaagcacggctgacagctgagtgtgtacagcagcgcctggctgccttggcccatcctcaagagagccacccctttccagagagctgtccacgtggctgcccacctctctgcccagaagactgtacttcaattcctgcccctaccatcctcccctgtaggcctcagcggagtgcctgccacttcagcgttcagcaaggcccttgttccaggaatcctcagcctgcctgtaccctttctcctgtgtaa

SEQ ID NO: 107994 - DNA, 1787 bp, Homo sapiens
  Payload ID: 1203
  Gene Symbol: AMHR2
  Gene Name: anti-Mullerian hormone receptor, type II
  Uniprot ID: Q16671
  ENST ID: ENST00000550311
  CDS Start-End: 70-1506
aagatttggccaggggcagctgtgctggcttatgctcttctccttctgctgctgccatcctccagcaagatgctagggtctttggggctttgggcattacttcccacagctgtggaagcacccccaaacaggcgaacctgtgtgttctttgaggcccctggagtgcggggaagcacaaagacactgggagagctgctagatacaggcacagagctccccagagctatccgctgcctctacagccgctgctgctttgggatctggaacctgacccaagaccgggcacaggtggaaatgcaaggatgccgagacagtgatgagccaggctgtgagtccctccactgtgacccaagtccccgagcccaccccagccctggctccactctcttcacctgctcctgtggcactgacttctgcaatgccaattacagccatctgcctcctccagggagccctgggactcctggctcccagggtccccaggctgccccaggtgagtccatctggatggcactggtgctgctggggctgttcctcctcctcctgctgctgctgggcagcatcatcttggccctgctacagcgaaagaactacagagtgcgaggtgagccagtgccagagccaaggccagactcaggcagggactggagtgtggagctgcaggagctgcctgagctgtgtttctcccaggtaatccgggaaggaggtcatgcagtggtttgggccgggcagctgcaaggaaaactggttgccatcaaggccttcccaccgaggtctgtggctcagttccaagctgagagagcattgtacgaacttccaggcctacagcacgaccacattgtccgatttatcactgccagccgggggggtcctggccgcctgctctctgggcccctgctggtactggaactgcatcccaagggctccctgtgccactacttgacccagtacaccagtgactggggaagttccctgcggatggcactgtccctggcccagggcctggcatttctccatgaggagcgctggcagaatggccaatataaaccaggtattgcccaccgagatctgagcagccagaatgtgctcattcgggaagatggatcgtgtgccattggagacctgggccttgccttggtgctccctggcctcactcagccccctgcctggacccctactcaaccacaaggcccagctgccatcatggaagctggcacccagaggtacatggcaccagagctcttggacaagactctggacctacaggattggggcatggccctccgacgagctgatatttactctttggctctgctcctgtgggagatactgagccgctgcccagatttgaggcctgcagtccaccacccttccaactggcctatgaggcagaactgggcaatacccctacctctgatgagctatgggccttggcagtgcaggagaggaggcgtccctacatcccatccacctggcgctgctttgccacagaccctgatgggctgagggagctcctagaagactgttgggatgcagacccagaagcacggctgacagctgagtgtgtacagcagcgcctggctgccttggcccatcctcaagagagccacccctttccagagagctgtccacgtggctgcccacctctctgcccagaagactgtacttcaattcctgcccctaccatcctcccctgtaggcctcagcggagtgcctgccacttcagcgttcagcaaggcccttgttccaggaatcctcagcctgcctgtaccctttctcctgtgtaa

SEQ ID NO: 107995 - DNA, 887 bp, Homo sapiens
  Payload ID: 1203
  Gene Symbol: AMHR2
  Gene Name: anti-Mullerian hormone receptor, type II
  ENST ID: ENST00000550839
  CDS Start-End: 371-887
caggtttgggtcagtgctctccagcctgcattcttgccttgatgtccagccctgctacagcgaaagaactacagagtgcgaggtaatccgggaaggaggtcatgcagtggtttgggccgggcagctgcaaggaaaactggttgccatcaaggccttcccaccgaggtctgtggctcagttccaagctgagagagcattgtacgaacttccaggcctacagcacgaccacattgtccgatttatcactgccagccgggggggtcctggccgcctgctctctgggcccctgctggtactggaactgcatcccaagggctccctgtgccactacttgacccagtacaccagtgactggggaagttccctgcggatggcactgtccctggcccagggcctggcatttctccatgaggagcgctggcagaatggccaatataaaccaggtattgcccaccgagatctgagcagccagaatgtgctcattcgggaagatggatcgtgtgccattggagacctgggccttgccttggtgctccctggcctcactcagccccctgcctggacccctactcaaccacaaggcccagctgccatcatggaagctggcacccagaggtacatggcaccagagctcttggacaagactctggacctacaggattggggcatggccctccgacgagctgatatttactctttggctctgctcctgtgggagatactgagccgctgcccagatttgaggcctgacagcagtccaccacccttccaactggcctatgaggcagaactgggcaatacccctacctctgatgagctatgggccttggcagtgcaggagaggaggcgtccctacatcccatccacctggcgctgctttgccacag

SEQ ID NO: 107996 - DNA, 488 bp, Homo sapiens
  Payload ID: 1204
  Gene Symbol: ATOX1
  Gene Name: antioxidant 1 copper chaperone
  Uniprot ID: O00244
  ENST ID: ENST00000313115
  CDS Start-End: 99-305
gcgcactctcggaagcgcagccgaacccgccctccgaatccagagaggcgctgctgacaccgccgccacaccgccgccacaccgccgctgcctcagtcatgccgaagcacgagttctctgtggacatgacctgtggaggctgtgctgaagctgtctctcgggtcctcaataagcttggaggagttaagtatgacattgacctgcccaacaagaaggtctgcattgaatctgagcacagcatggacactctgcttgcaaccctgaagaaaacaggaaagactgtttcctaccttggccttgagtagcaggggcctggtccccacagcccacaggatggaccaaagggggcaggatgctgatcctcccgctggcttccagacagacctgggacttggcagtcatgccgggtgatggtgttcctgcggagaccctcagttgtcctattccttcctagcttccctgcaataaaatcaagctgcttttgttgg

SEQ ID NO: 107997 - DNA, 4341 bp, Homo sapiens
  Payload ID: 1204
  Gene Symbol: ATOX1
  Gene Name: antioxidant 1 copper chaperone
  ENST ID: ENST00000521264
  CDS Start-End: 111-332
agactaggagccggggatcccttcctgcctggcctccaacccactggggaacccaggcaatcctttctttccctggacccagatgctgcctctgagaatgcggcccttggatgaaagcagaatcacctgggaagcacgagttctctgtggacatgacctgtggaggctgtgctgaagctgtctctcgggtcctcaataagcttggaggagttaagtatgacattgacctgcccaacaagaaggtctgcattgaatctgagcacagcatggacactctgcttgcaaccctgaagaaaacaggaaagactgtttcctaccttggccttgagtagcaggggcctggtccccacagcccacaggatggaccaaagggggcaggtgggtaaggccccagcacttgctgaacaaacctacagctcacacctctcatcagagcgaacaccttggcctttgagagcttgagtggagcgggagagccctctgggttcttttcaatccactgtccaccttctttggagtggttacaaatattttattattgtctaatgcaaatcacaagttcagggaattcttacagaccctgtgagtggacagagcactgtgtaatgtctcccagagtcctctttcagacttgagggttgcagttcatggttagcagggtttaagtttacagtatgtgaccctaagcagtgcacctttgacttctttatttgttcattggtttgagacagtgtttcactatatggcccaggctggagggtagtaactcttcataggtgtgatcatagtgcactatagcctttaactcctgggctcaagtgatgctcctgcctcagccttctaagtaactggaactataggcacctatcaccacacatggctctggctttgataaactgactatctcatcagagttgacacttgtgccttgggccttgttctcctgtgccctgaccaagtgagttaattcagactgtgccgctctctctacttgaaactgttgtcagcttcctgagcatgccctctgtccagactggtacaaaaacaatagcatgtttgagctagatgttcccttcacttttatgtaatccagtgatgcagtaaggggcactgtgccagcactcttcgctctggaaccaggcagaccttactcattgatccagccacagtctcagcagggcactcctggctgccactgcccatgtagtgcatttgactcgtgaattacaatgatcgccacacctctgatgtggtttggtgccctgacgtgactgagaaaaatgaggccaagagaggggaagtgattcaaccagagtcccaccctggtgagtagcagaggcaggaagaaagtcagatatcctgaatcggagttctgtaactgttactggtggcattgtccctgtgaatgggcccacagagaccccctggacagaggctagccacactgactggtaggtcctctttgaggatagcctccttcccaaaggcatacatttggaacctgagtcatagcagtgttctgtgtatgtggtaacatcacatgcaagttacaagatgtcagatgcatctgttttcgtcatgcactttccatccatagatagaacccatattcaggaatgaacccaggatgaataatgaggaatctaggattctaattccaactttcctcatttcacactgactttggggactttttacattacagagatttggtcttcccatcggtaaaatggggctaaaacctccaacctgctttcctgccttgtggggactgctgtgcaatctctccacatatgaaagtttatcctctagggaagtaaaacatcagcggtttccagcatgttgaagaacagtgtttcttacatcattcctccacccctagggttttgtagggagggtgagtggatggggctttggaccctccatagctcccaaacggtcctgtgtcatattgggcttcccgtaagactgtattttataaaaacgctctgtaacaagaaggaatggaggcagagaaggaaaaaaatactcttcctgaactagctatatacatggggagccctaatgcacacatcttggattagaaactccaggcctgggcatacgaacttttttaactaaaaaagtaatatctgttggatgtaaaccatgtgtagcttaatgtgtttttctcatagaaaacatgttttctcatgttattttattgagatgaaattcacaagacataataactattttaacccatttatgctgaatattgcaaagttttttatgtgaaaaatcaaaccttggtgatgaccttgaacagtaggatataaataactcctgcaagcttagcgttccaataatggaacactaggcataaatgggttaaagtctatcatttagtggcatttggtgtgttcacaatgttgtatgaccaccatctctctctagtttcaaaattttttcatcatctcagaaacacaccctgtatccattaagaagtcactccccactacccatctctccatcccctggcagccactaatttgctttctgctactctggatttgcctaccctggacatgtcatataaaaagaattacattatatgtgacctttttgtgtctgcctttttccatgtagcataatgttttcaagattcattcaagtcatagcatgtgttgtaaatcattccttccaatacttaataattttcatggtacttttaatctactttagattttttatgataggaagtttcaaacatgtgtaagtagagtaatagaatgaatccccaagtacccgtcactcagatccaacagttagtatttatttcaccaaggcctgttattttttgataaaagtgctctgtgacaagaaggaattaaggaagagaaggaaaaaaactcttctggagctatctgtatccatgtgggggagccctaatgcacacatcttggattagaaactccactgtcctcattgtttcatctgggtgatgaaacacccagattattttgaagcaaattctagacatcatgcccactccctcctgcccagattattttgaagcaaattctagacatcatgcaatcttacctgtacatatttcagtaaccatgtattgtttggaaaggctcctggaaattcagatgcacagtactcagtaagaatcacccaataagccagctttagtccacatgctcaggcagcatgtctttgaagtctgttttaagaggctcctcagtgactgatttgaagccaggcttgggaacctcaaagatagagtgtttattggttttgaagtcaccttgatcatctgactcttggcagatttatttgccatgattttgttcattgcctttccaacctgtaacaggatagagagtgctgttgactgggtatcctggcagccctggaaattccccagaagagggctttggcagtgattggcttagcaaggttaatgcgttccagccaacctaagtataacagacttcatgggagcagtgtgcagggctggacactggggctctagtcctgctcctgcatctgcaccctgcgttttccacctcacccctgccttttagtgcaagactcttagtgcacccctgcgtcacccctgtctcttagtgcatttattgcctttgcaatgtcgctatgtccacaccagatggcacctttgttccatctaactttccatctttcctaggatgctgatcctcccgctggcttccagacagacctgggacttggcagtcatgccgggtgatggtgttcctgcggagaccctcagttgtcctattccttcctagcttccctgcaataaaatcaagctgcttttgttggagatgttgtcttgcctggtcttggtgttgcttgctcacatgtaggtggttatgcttacttgggttggagttttgagagttcccacctgggagtcagacaccctgtagattctgattctttgctgtgtgatctttagcaaatcacttcccctctctgggcctcattttttcctcacctataaagtggaggcattgacccagaacagtgatcccctttcttttcaccagtttcatagactctatattttgaaaaaatttgtctatcaagtgaattgcacaagagattatcaaatgttaagcaagtggaatagtaggaagaggctgtggagacaaactgcctgggatagagttcaagctccagtacctcctagctgggccacttaacctctcagtgtccacagacaaaatgtgatgatagcatctactgcaaatggtggttgtggggattaaatgaaatgaaacatgtaaattaattacagcagtgattgctggttaaaaaatcactcag

SEQ ID NO: 107998 - DNA, 591 bp, Homo sapiens
  Payload ID: 1204
  Gene Symbol: ATOX1
  Gene Name: antioxidant 1 copper chaperone
  Uniprot ID: O00244
  ENST ID: ENST00000522710
  CDS Start-End: 106-312
ctctagtgcgcactctcggaagcgcagccgaacccgccctccgaatccagagaggcgctgctgacaccgccgccacaccgccgccacaccgccgctgcctcagtcatgccgaagcacgagttctctgtggacatgacctgtggaggctgtgctgaagctgtctctcgggtcctcaataagcttggaggagttaagtatgacattgacctgcccaacaagaaggtctgcattgaatctgagcacagcatggacactctgcttgcaaccctgaagaaaacaggaaagactgtttcctaccttggccttgagtagcaggggcctggtccccacagcccacaggatggaccaaagggggcaggtgggtaaggccccagcacttgctgaacaaacctacagctcacacctctcatcagagcgaacaccttggcctttgagagcttgagtggagcgggagagccctctgggttcttttcaatccactgtccaccttctttggagtggttacaaatattttattattgtctaatgcaaatcacaagttcagggaattcttacagaccctgtgagtggacagagcactgtgtaatgtct

SEQ ID NO: 107999 - DNA, 466 bp, Homo sapiens
  Payload ID: 1204
  Gene Symbol: ATOX1
  Gene Name: antioxidant 1 copper chaperone
  ENST ID: ENST00000520382
  CDS Start-End: 103-282
gagcacagtgacaatccagactcagcggtgtttagagacttggaaagagtttgagaagccacttagccactttattttcagaagcacgagttctctgtggacatgacctgtggaggctgtgctgaagctgtctctcgggtcctcaataagcttggaggagttaagtatgacattgacctgcccaacaagaaggtctgcattgaatctgagcacagcatggacactctgcttgcaaccctgaagaaaacaggaaagactgtttcctaccttggccttgagtagcaggggcctggtccccacagcccacaggatggaccaaagggggcaggatgctgatcctcccgctggcttccagacagacctgggacttggcagtcatgccgggtgatggtgttcctgcggagaccctcagttgtcctattccttcctagcttccctgcaataaaatcaagctgcttttgttgga

SEQ ID NO: 108000 - DNA, 724 bp, Homo sapiens
  Payload ID: 1204
  Gene Symbol: ATOX1
  Gene Name: antioxidant 1 copper chaperone
  ENST ID: ENST00000522314
  CDS Start-End: 361-540
gagacaaagctcatagctcaagaatcagtgttttgaaggtaggactgggaaaaagcattttaaactagatctccaggtgattctatttactatgtgccagacactgctaaaggatttatagggatgattccattgaatacaacttgtgaggtagaaactcttagctactctatagttgaagagacgggctcagaaacaggcttctgatgagtctgatgccaaccaggtcctgcccagtctctctgtcttctgtcttgaccctgagtgggcctgtctgctggcactgtgtgggggtcactctacagggctcgggtcatggtccccctgtgtttgtttcagaagcacgagttctctgtggacatgacctgtggaggctgtgctgaagctgtctctcgggtcctcaataagcttggaggagttaagtatgacattgacctgcccaacaagaaggtctgcattgaatctgagcacagcatggacactctgcttgcaaccctgaagaaaacaggaaagactgtttcctaccttggccttgagtagcaggggcctggtccccacagcccacaggatggaccaaagggggcaggatgctgatcctcccgctggcttccagacagacctgggacttggcagtcatgccgggtgatggtgttcctgcggagaccctcagttgtcctattccttcctagcttccctgcaataaaatcaagctgcttttgttgga

SEQ ID NO: 108001 - DNA, 749 bp, Homo sapiens
  Payload ID: 1204
  Gene Symbol: ATOX1
  Gene Name: antioxidant 1 copper chaperone
  Uniprot ID: O00244
  ENST ID: ENST00000524142
  CDS Start-End: 359-565
gcaaaaccgaaggcgcttctgcgacgcgcggaccgcaagactccaatcagactttagtgctgcccccaccctaaacgaaagcctccttctggtccgaaccgactggatcccttggccaggggaggaaaaggccgggtgaccacgggcccggcccgcagaaaggaggcggcgcggccggcagggatcaggactggagggggcggagcctccctcgcggccgggcccggagtgggaggggcctccgggaccaggcctctagtgcgcactctcggaagcgcagccgaacccgccctccgaatccagagaggcgctgctgacaccgccgccacaccgccgccacaccgccgctgcctcagtcatgccgaagcacgagttctctgtggacatgacctgtggaggctgtgctgaagctgtctctcgggtcctcaataagcttggaggagttaagtatgacattgacctgcccaacaagaaggtctgcattgaatctgagcacagcatggacactctgcttgcaaccctgaagaaaacaggaaagactgtttcctaccttggccttgagtagcaggggcctggtccccacagcccacaggatggaccaaagggggcaggatgctgatcctcccgctggcttccagacagacctgggacttggcagtcatgccgggtgatggtgttcctgcggagaccctcagttgtcctattccttcctagcttccctgcaataaaatcaagctgcttttgttgga

SEQ ID NO: 108002 - DNA, 2362 bp, Homo sapiens
  Payload ID: 1205
  Gene Symbol: ASF1A
  Gene Name: anti-silencing function 1A histone chaperone
  Uniprot ID: Q9Y294
  ENST ID: ENST00000229595
  CDS Start-End: 195-809
gaaataggaaagctgcaaaacactgtggagtgctcccgtgtaaataaaaagaggaaaaaagtttctcaagtcgccgctgcacgacgtctggccggcgctggagcgggggtctgcgctctcccgagcggccgcgcgctggactttattgtgccgcaaccagccccagttcccattgtttgtgtttttttcaaaatatggcaaaggttcaggtgaacaatgtagtggtgctggataacccttctcctttctacaacccgttccagttcgagatcaccttcgagtgcatcgaggacctgtctgaagacttggaatggaaaattatctatgtgggctctgcagaaagtgaagaatacgatcaagttttagactctgttttagtgggtcctgttcccgcaggaaggcatatgtttgtatttcaggctgatgcacctaatccaggactcattccagatgcagatgcagtaggcgtaactgttgtgctaattacttgtacctatcgaggacaagaatttattagagttggctattatgtaaataatgaatatactgagacagaattaagggaaaatccaccagtaaaaccagacttttctaagcttcaaaggaatattttggcatctaatcccagggtcacaagattccacattaattgggaagataacacagaaaaactggaagatgcagagagcagtaatccaaatctacagtcacttctttcaacagatgcattaccttcagcatcaaagggatggtccacatcagaaaactcactaaatgtcatgttagaatcccacatggactgcatgtgaccacctaccatccctttagtacaaattaagctattaaaaatacacagaactatttccctgaaattccgtaagtacatagtcaaaacacaatgtgaagaatttgtttaaaaacatcctgtagaaagtttataagaaaaccagtatttgaacaaattgtggaatataaatacaactatttttaagtaatttttttctctaatgtgttattttatttgttctgaaactaatctgattaaagcatatatattattttcttctcctttatatgtaatgaaagcacttataaagaaacaggaatcattagaccaggttgtaaagatgtcttggcctcccagacagtctttggaccactattttactggcctttgaaagaacaaagtttacttcaactaaaatgtttcttcctgtgaagacatatggtatcattttaatttaaggggcagatttccattcttttttggcatgtccttaaaaagaggatttgaaatcaactatatgctaccaagaactttaggatccaattttccaagccaccgtgaagcctcttatggctactattatagttcatgagatgttggacagcatttggtttgtttggtaagagaagaacaaatatggctaattgttaataaggtcccctggctatggtttttgttcttataacagagtttagaatatcagagcatttcttgaatcatacatcattattgtccagtgaattcaagaccaaatacaatatcgggagaaaatacaaactccctgtgtttaagaataggggattacaatggctcaaattggttcatttgatttctaaaaataccatgacctttaaaaattcttttaatagatcatgttattggcagtatttatataaaaaccatggatttagaaaggtatatttagctttattataatagatacgttactattttggaaatatatatattttcacacctgtagtactcttccccatttcctctgacactcatgcagaatgagatcaggcatatttgtggttgacatactctagatagcttttccaacaaatctttgaaaagcaatcttggaaaggaattcattaactaaatggggtaaaaggtttctttttctttgagagttaagtccttcctcaaaaaattttcttatgctccataaaattgaggtagaatattttcattattcttgcagctaagcaagacagccatatgatgcaggttatgcagtgccttcatatctaaaacttttatactgcactttttaaagcttttatgttgaggaaaggaaaagggcatttgtctaaacatggattctgagttgtatatatttcctatcattctaaaaaagtgaatttgtgaagcaaagttttgccagatgttaaactttgaatttaatataccagattattaaaatattgtccattaactagttcatagattttaaaagtaaaatacttctgactgttaaaactatataaagaaaatctcatttgtctaattgcaattaaaagaaaaatgttaaaatattaaaatgaaaataaaagcattactttccaa

SEQ ID NO: 108003 - DNA, 2059 bp, Homo sapiens
  Payload ID: 1206
  Gene Symbol: ASF1B
  Gene Name: anti-silencing function 1B histone chaperone
  Uniprot ID: Q9NVP2
  ENST ID: ENST00000263382
  CDS Start-End: 501-1109
cgctgcgcgctgcgggatgcatctcccggaaaagcgaggcgaggggcgggccacgccggtgcgggaaccctcaggattggccagaaggaggccggcgctgtgactccgtccattcccgccgttgacatccaagtcggagacgctggggattggtttccagcggacacgctaagaagcttggagatagtttcgccctcctcacacgctgcggagagggagctccgctgattggtccgaggagtctgggcgcgcgccgatcggcgctccaggactggctgagggggtgcgcgcgccgccagggagcgttggcggtgattggccagagggcggaggccggctatttgaaggcggcgcgcggactaggtgcgcacttcagttctcggagagaagaggcgggagtggacctggtcagccctaccccactgaccccaccggacccaggcgcggcctccgccacagccacagcccctgcccctgctgcggcgcggcgaggcgaggcgatggccaaggtgtcggtgctgaacgtggcggtcctggagaacccgagccctttccacagccccttccggttcgagatcagcttcgagtgcagtgaagccctggcggacgacctggagtggaagatcatttatgttggctcggctgagagtgaggaatttgatcagatcctagactcggtgctggtgggccctgtgccagcagggagacacatgtttgtctttcaggccgacgcccccaacccatccctcatcccagagactgatgccgtgggtgtgactgtggtcctcatcacctgcacctaccatggacaggagttcatccgagtgggctactacgtcaacaacgagtacctcaaccctgagctgcgtgagaacccgcccatgaagccagatttctcccagctccagcggaacatcttggcctcgaacccccgggtgacccgcttccatatcaactgggacaacaacatggacaggctggaggccatagagacccaggacccctccctgggctgcggcctcccactcaactgcactcctatcaagggcttggggctccctggctgcatccctggcctcctccctgagaactccatggactgcatctaactgcaggaacccagagtgtcccagcacgccgggaggggcaaccaggcctcccagcgagtcctgcagggcccatctagaggactttgggggccatcagctgcaatccaggtctgtcaaactcagcccctaggaaagaacaggccttgggtctcccctagtcctggccagaaggatgatctcgcttttcctctacaggcctataagaagcaggtacttcagttctaaattctgacttgtgttcttttcgtcttcataaattctaactaaggccactgtgccactgtgcacccttgagtaccattgatccaaagctttcccacagacctccctggcccacctagaggctttcttggtcagtgcctgtcaaggctccagtcctgctgagccaaaggctttgtcattcctttctcttcctgtacatctgagcagacccactccagctttctggtgtcacaggcgggaatgttagttagtaggtagacttagatcccatttctgtcctgctcccaggaagattcttaggtcctcttcaatccagcagcccctcccagaggtgtgatcagcaggatgctgaggaaccatgttgcctttcctgtcaatcacagccaccttcctgttatctcctaaatggatctggcttttcctggaggctgccatggttggaagatggtatcagagggcctgcctgggcagtctgtctccgggccagggtcagggaccctctgcctctggcagccttaacctgtcctctgctaggaccagggtgatttcaagccagggaagcaactgggaccctgaaaactgtccctccccagcccgctccccctctctgtgccctggtccccttgctgccatgtggatgctgttgtgattgctgtttgtatattatcaaaatgtttttatattaaaaatgtttggtctgaaaattaaaagcacttcatttagaatga

SEQ ID NO: 108004 - DNA, 746 bp, Homo sapiens
  Payload ID: 1206
  Gene Symbol: ASF1B
  Gene Name: anti-silencing function 1B histone chaperone
  ENST ID: ENST00000590835
  CDS Start-End: 158-403
gaaggcggcgcgcggactaggtgcgcacttcagttctcggagagaagaggcgggagtggacctggtcagccctaccccactgaccccaccggacccaggcgcggcctccgccacagccacagcccctgcccctgctgcggcgcggcgaggcgaggcgatggccaaggtgtcggtgctgaacgtggcggtcctggagaacccgagccctttccacagccccttccggttcgagatcagcttcgagtgcagtgaagccctggcggacgacctggagtggaagatcatttatgttggctcggctgagagtgaggaatttgatcagatcctagactcggtgctggtgggccctgtgccagcagggagacacatgtttgtctttcagagactgatgccgtgggtgtgactgtggtcctcatcacctgcacctaccatggacaggagttcatccgagtgggctactacgtcaacaacgagtacctcaaccctgagctgcgtgagaacccgcccatgaagccagatttctcccagctccagcggaacatcttggcctcgaacccccgggtgacccgcttccatatcaactgggacaacaacatggacaggctggaggccatagagacccaggacccctccctgggctgcggcctcccactcaactgcactcctatcaagggcttggggctccctggctgcatccctggcctcctccctgagaactccatggactgcatctaactgcaggaacc

SEQ ID NO: 108005 - DNA, 765 bp, Homo sapiens
  Payload ID: 1206
  Gene Symbol: ASF1B
  Gene Name: anti-silencing function 1B histone chaperone
  ENST ID: ENST00000474890
  CDS Start-End: 119-616
gagagaagaggcgggagtggacctggtcagccctaccccactgaccccaccggacccaggcgcggcctccgccacagccacagcccctgcccctgctgcggcgcggcgaggcgaggcgatggccaaggtgtcggtgctgaacgtggcggtcctggagaacccgagccctttccacagccccttccggttcgagatcagcttcgagtgcagtgaagccctggcggacgacctggagtggaagatcatttatgttggctcggctgagagtgaggaatttgatcagatcctagactcggtgctggtgggccctgtgccagcagggagacacatgtttgtctttcaggccgacgcccccaacccatccctcatcccagagactgatgccgtgggtgtgactgtggtcctcatcacctgcacctaccatggacaggagttcatccgagtgggctactacgtcaacaacgagtacctcaaccctgagctgcgtgagaacccgcccatgaagccagatttctcccaggtggggcctgtttccacttcctgcttcccacaaggccgttctttatacttggggggagttcagccattcaaattgagagtcaaggtcacttcttaaggttttcaagtaatattcagttcttacagtactgtgttagaagaggagaaaaagacctttgtctctcaaaggcatgtcttagagaattaagattaggccagcctgggcaacatagtgagaccctgtccctaacccccgcaaaaaaaaaa

SEQ ID NO: 108006 - DNA, 587 bp, Homo sapiens
  Payload ID: 1206
  Gene Symbol: ASF1B
  Gene Name: anti-silencing function 1B histone chaperone
  ENST ID: ENST00000589468
  CDS Start-End: 134-280
gcacttcagttctcggagagaagaggcgggagtggacctggtcagccctaccccactgaccccaccggacccaggcgcggcctccgccacagccacagcccctgcccctgctgcggcgcggcgaggcgaggcgatggccaaggtgtcggtgctgaacgtggcggtcctggagaacccgagccctttccacagccccttccggttcgagatcagcttcgagtgcagtgaagccctggcggacggccgacgcccccaacccatccctcatcccagagactgatgccgtgggtgtgactgtggtcctcatcacctgcacctaccatggacaggagttcatccgagtgggctactacgtcaacaacgagtacctcaaccctgagctgcgtgagaacccgcccatgaagccagatttctcccagctccagcggaacatcttggcctcgaacccccgggtgacccgcttccatatcaactgggacaacaacatggacaggctggaggccatagagacccaggacccctccctgggctgcggcctcccactcaactgcactcctatcaagggcttggggctccctggctgcatc

SEQ ID NO: 108007 - DNA, 769 bp, Homo sapiens
  Payload ID: 1206
  Gene Symbol: ASF1B
  Gene Name: anti-silencing function 1B histone chaperone
  ENST ID: ENST00000592798
  CDS Start-End: 98-529
cctggtcagccctaccccactgaccccaccggacccaggcgcggcctccgccacagccacagcccctgcccctgctgcggcgcggcgaggcgaggcgatggccaaggtgtcggtgctgaacgtggcggtcctggagaacccgagccctttccacagccccttccggttcgagatcagcttcgagtgcagtgaagccctggcggacgacctggagtggaagatcatttatgttggctcggctgagagtgaggaatttgatcagatcctagactcggtgctggtgggccctgtgccagcagggagacacatgtttgtctttcagctccagcggaacatcttggcctcgaacccccgggtgacccgcttccatatcaactgggacaacaacatggacaggctggaggccatagagacccaggacccctccctgggctgcggcctcccactcaactgcactcctatcaagggcttggggctccctggctgcatccctggcctcctccctgagaactccatggactgcatctaactgcaggaacccagagtgtcccagcacgccgggaggggcaaccaggcctcccagcgagtcctgcagggcccatctagaggactttgggggccatcagctgcaatccaggtctgtcaaactcagcccctaggaaagaacaggccttgggtctcccctagtcctggccagaaggatgatctcgcttttcctctacaggcctataagaagcaggtacttcagttctaaattctgacttgtgtt

SEQ ID NO: 108008 - DNA, 2857 bp, Homo sapiens
  Payload ID: 1207
  Gene Symbol: AZIN1
  Gene Name: antizyme inhibitor 1
  Uniprot ID: O14977
  ENST ID: ENST00000347770
  CDS Start-End: 767-2113
aaatactggcgtcgctggcgccgccttctcacactttcaggctctgatcgcggccgcagtttttccttttttcttctgccgtcgccttctctgcctcttctcatcctttctcgctctgctgctctgcagtgtgacgagtccgaatcctcttcccacccagcccgcgcctttcttcttttgcctgcgctgttctatttctccttcggccgccgccgccactgctgcacacagctggtgtcggtgccgcgcttttacccccaagtcgttcccgcagcctatggcccaggccgccttgggtatttctgctcaaggtaaccacatccctctttaaaaattccgccgaaaaagagaagacgctttacccgactctttgggccgttatctcacggcgaactttctgaccaagtatacaactacccagagggcctaggagaagtgctgtatagagagcagttcgacttcaacgctgagccaccttgggaacctagctgatgataggggggttccatctcccaacttgtccatggaggtcttcacttcagaaatccaagactcatattcatccagcttggtgtcaagtgggctgttgctgccagaattatcttgtgattatttgagagatgtatcagtttcttctgaagtacaatcaactgtagaagcctttgtagcagtttgttgcatattctaaggacccagacataggcttggtggcccgtctcttgtctttcctggtttatgactttcggctttgtggaatacggctgagatgaaaggatttattgatgatgcaaactactccgttggcctgttggatgaaggaacaaaccttggaaatgttattgataactatgtttatgaacataccctgacagggaaaaatgcattttttgtgggagatcttggaaagattgtgaagaaacacagtcaatggcagaatgtagtggctcagataaagccattctacacagtgaagtgcaactctgctccagctgtacttgagattttggcagctcttggaaccggatttgcttgttccagtaaaaatgaaatggctttagtgcaagagttgggtgtacctccagaaaacattatttacataagtccttgcaagcaagtgtctcagataaagtatgcagcaaaagttggagtgaatatcctgacatgtgacaatgaaattgaattgaagaaaattgcacgtaatcacccaaatgccaaggtcttactacatattgcaacagaagataatattggaggtgaagagggtaacatgaagtttggcactaccctgaagaactgtaggcatctcttggaatgtgctaaggaacttgatgtccaaataattggggttaaatttcatgtttcgagtgcttgcaaagaatctcaagtatatgtacatgctctatctgatgctcgatgtgtgtttgacatggctggagaaattggctttacgatgaacatgttagacattggtggaggattcacgggaactgaatttcaattggaagaggttaatcatgttatcagccctctgttggatatctactttcctgaaggatctggtgttaagataatttcagaacccggaagctactatgtgtcttctgcatttacactcgcagttaatatcatagcaaagaaagttgttgaaaatgataaatttccctctggagtagaaaaaaccggaagtgatgaaccagccttcatgtattatatgaatgatggtgtttatggttcttttgcaagtaaactgtctgaggacttaaataccattccagaggttcacaagaaatacaaggaagatgagcctctgtttacaagcagcctttggggtccatcctgtgatgagcttgatcaaattgtggaaagctgtcttcttcctgagctgaatgtgggagattggcttatctttgataacatgggagcagattctttccatgaaccatctgcttttaatgattttcagaggccagccatttattacatgatgtcattcagtgattggtatgagatgcaagatgctggaattacttcagactcaatgatgaagaacttcttctttgtgccttcttgcattcagctgagccaagaagacagcttttccgctgaagcttaaacaggcattaacgcttctttagatctgaagttgcaggttaagcttgtctggtcaacattccagtgtggaaaaataatttaaacaatcttattctcttaattcttttggcaacaaaaactattagtaatagctatttgggaccagacaaaatcagctttcatctataattcattggggataatgggagatttagataatgtatccagatttaaacctaccagtttgtcctaccccttaagcgtttaaaataaaatatgcaacaaaatggatgacttagtggagatggaagcccattaattgggttccccattaaatcgtttacatacaagaacacagtttttatactaaggatttgtgtttaaagtcttgtaaagttcatgtctttcacccagatatatcaaatgttagaagaccagtgtgacttcattagataacgtttagtgtatttagaatgtgtaaatttgtgctttgaactgtagtttaataaatgtaaaattgcatcatagtatttgttgacctaatgtaacccttgtatgattgcaataaaattttgtgtagattttactgttttttcaggctaaaactttgggaaaggggctagctagcaaaggtagttttgaaatagatgtgtatatggactgttttgaagggtttttttctttatagcccagttaagttttgtttggctcggtgcatttttcatttatttaattagtaatttaagtaaagtgtttggtaaatcat

SEQ ID NO: 108009 - DNA, 4721 bp, Homo sapiens
  Payload ID: 1207
  Gene Symbol: AZIN1
  Gene Name: antizyme inhibitor 1
  Uniprot ID: O14977
  ENST ID: ENST00000337198
  CDS Start-End: 1165-2511
atcaccgagggcgggcgcctcagcccgggaggacactccccagggtaaactacaggcctcacaaagcggagggagctggacgcgaaggctcggcagcggcgccgacaggcttaccccaggcccactctaggccgcacagggttcgcgccacctccggcccaggacagctctcagacgctgccagcgtggagctcgacccggctcacaatgcgctgggccccgcagcgtgagcgcaggcgcccgagaggcggcgggggtcgggcggacggcgcgctccagccgagccgcctccctctctcggcccacacccgcgcggccgcccttcgcctgccggggagctgcgggtggctggagggcgggaagcgaccggccagtctgcacctgcatgacccggtcgcgcgccgacccctcccctctctctcccgggctcagtcctccttcctcttccgtccccctcccttttctccgggctgcaaccgggttccgccccgctcgcgcggctgcccggccagctgtgatgtcaccaggccacgccccctaatataaatactggcgtcgctggcgccgccttctcacactttcaggctctgatcgcggccgcagtttttccttttttcttctgccgtcgccttctctgcctcttctcatcctttctcgctctgctgctctgcagtgtgacgagtccgaatcctcttcccacccagcccgcgcctttcttcttttgcctgcgctgttctatttctccttcggccgccgccgccactgctgcacacagctggtgtcggtgccgcgcttttacccccaagtcgttcccgcagcctatggcccaggccgccttgggtatttctgctcaaggtaaccacatccctctttaaaaattccgccgaaaaagagaagacgctttacccgactctttgggccgttatctcacggcgaactttctgaccaagtatacaactacccagagggcctaggagaagtgctgtatagagagcagttcgacttcaacgctgagccaccttgggaacctagctgatgataggggggttccatctcccaacttgtccattttgttgcatattctaaggacccagacataggcttggtggcccgtctcttgtctttcctggtttatgactttcggctttgtggaatacggctgagatgaaaggatttattgatgatgcaaactactccgttggcctgttggatgaaggaacaaaccttggaaatgttattgataactatgtttatgaacataccctgacagggaaaaatgcattttttgtgggagatcttggaaagattgtgaagaaacacagtcaatggcagaatgtagtggctcagataaagccattctacacagtgaagtgcaactctgctccagctgtacttgagattttggcagctcttggaaccggatttgcttgttccagtaaaaatgaaatggctttagtgcaagagttgggtgtacctccagaaaacattatttacataagtccttgcaagcaagtgtctcagataaagtatgcagcaaaagttggagtgaatatcctgacatgtgacaatgaaattgaattgaagaaaattgcacgtaatcacccaaatgccaaggtcttactacatattgcaacagaagataatattggaggtgaagagggtaacatgaagtttggcactaccctgaagaactgtaggcatctcttggaatgtgctaaggaacttgatgtccaaataattggggttaaatttcatgtttcgagtgcttgcaaagaatctcaagtatatgtacatgctctatctgatgctcgatgtgtgtttgacatggctggagaaattggctttacgatgaacatgttagacattggtggaggattcacgggaactgaatttcaattggaagaggttaatcatgttatcagccctctgttggatatctactttcctgaaggatctggtgttaagataatttcagaacccggaagctactatgtgtcttctgcatttacactcgcagttaatatcatagcaaagaaagttgttgaaaatgataaatttccctctggagtagaaaaaaccggaagtgatgaaccagccttcatgtattatatgaatgatggtgtttatggttcttttgcaagtaaactgtctgaggacttaaataccattccagaggttcacaagaaatacaaggaagatgagcctctgtttacaagcagcctttggggtccatcctgtgatgagcttgatcaaattgtggaaagctgtcttcttcctgagctgaatgtgggagattggcttatctttgataacatgggagcagattctttccatgaaccatctgcttttaatgattttcagaggccagccatttattacatgatgtcattcagtgattggtatgagatgcaagatgctggaattacttcagactcaatgatgaagaacttcttctttgtgccttcttgcattcagctgagccaagaagacagcttttccgctgaagcttaaacaggcattaacgcttctttagatctgaagttgcaggttaagcttgtctggtcaacattccagtgtggaaaaataatttaaacaatcttattctcttaattcttttggcaacaaaaactattagtaatagctatttgggaccagacaaaatcagctttcatctataattcattggggataatgggagatttagataatgtatccagatttaaacctaccagtttgtcctaccccttaagcgtttaaaataaaatatgcaacaaaatggatgacttagtggagatggaagcccattaattgggttccccattaaatcgtttacatacaagaacacagtttttatactaaggatttgtgtttaaagtcttgtaaagttcatgtctttcacccagatatatcaaatgttagaagaccagtgtgacttcattagataacgtttagtgtatttagaatgtgtaaatttgtgctttgaactgtagtttaataaatgtaaaattgcatcatagtatttgttgacctaatgtaacccttgtatgattgcaataaaattttgtgtagattttactgttttttcaggctaaaactttgggaaaggggctagctagcaaaggtagttttgaaatagatgtgtatatggactgttttgaagggtttttttctttatagcccagttaagttttgtttggctcggtgcatttttcatttatttaattagtaatttaagtaaagtgtttggtaaatcattgtgaagttcagattcattatggagagttgatgtgcagtaagcatgatgtttaacaattttaacaccaaaaatgttaatcctgcataaatcaactgtaataataaataggtgtttctgtatagatagaatgcatagagtaccttagtaaatctttgaatcacaatcttttggctgaaatggaagattctgttaaatactttgaataaacttggggggagggaaataaaattgcagaaaactgcagagcactaaaacttaaagaagggctacatctttatccagaaacctgttgctcttttgcacggaatgtttaaattcagagttgggatgggggttggggtgaagcacacttattatcttcagttgcagtgatttcaaatttaggattttttgttgttggtttgaactgtccccttagtttcttgttatttccaatttgttctgcttagtcattacttttaattcttttcttactaaaattttatggtggttgggggaagggagttagcatcactaacctgacagttgttgccaggaatttgctttgtttactgctagtatattagaaatcctagatctcagaatcacaatagtaataaacaacaggggtcattttttcctaacttactctgtgttcaggtgtggaatttctgtctcccaagaggaaatgtgacttcactttggtgccaatggacagaaaattctacctgtgctacataggagaagtttggaatgcacttaatagctggtttttacaccttgatttcgaggtggaaagaaattgatcatgaatctctaataaatttaaatctcttaaaccagtaggtgcttaatattttttgatttgattaatgcccatttaaatctcatgggttctattaaaaatatatatatatagggccccaatccattgccatcaaattgcccttggacttttccaaggtatattatggggttttatgcaaaattccaagctaccatgtaactttttttaaccatttaacaaggagggggaactgtttcctaccttctttacatgttgtgcattgttgtggtccagaaatgccaaacctttttaaagatggtgcaactttgagtccttggcttgactatacaggccttgaacttcatggcatatcaactttgccatatctgcaggagagctgttctataagaaatagctcagagttgcaaatatcacatgtgaatgatacggtaacttttaagaaatgtctgtattgtatttgaagactgtttgccataaatctgaaatttgaacctatgtatttcaatttggtatgctaaaaagttctgaattaatgtaaagttttttgttataatattgtaatctcagttcaaaagttaactgcaaatataaaacccaatgatttctatatagtaaattgaactgtaaaggtaacttgtgtgtgattctgaatacatagataaatgtttttattcctca

SEQ ID NO: 108010 - DNA, 773 bp, Homo sapiens
  Payload ID: 1207
  Gene Symbol: AZIN1
  Gene Name: antizyme inhibitor 1
  ENST ID: ENST00000518353
  CDS Start-End: 675-773
cttttttcttctgccgtcgccttctctgcctcttctcatcctttctcgctctgctgctctgcagtgtgacgagtccgaatcctcttcccacccagcccgcgcctttcttcttttgcctgcgctgttctatttctccttcggccgccgccgccactgctgcacacagctggtgtcggtgccgcgcttttacccccaagtcgttcccgcagcctatggcccaggccgccttgggtatttctgctcaaggtaaccacatccctctttaaaaattccgccgaaaaagagaagacgctttacccgactctttgggccgttatctcacgagttctttcctcatcatccataaatgtcattcattgagcatgtgatcagcttctcctagatagatgaaacattttgcctccaccaggagtgccttgatcctggtgagatacactttagggcgaactttctgaccaagtatacaactacccagagggcctaggagaagtgctgtatagagagcagttcgacttcaacgctgagccaccttgggaacctagctgatgataggggggttccatctcccaacttgtccattttgttgcatattctaaggacccagacataggcttggtggcccgtctcttgtctttcctggtttatgactttcggctttgtggaatacggctgagatgaaaggatttattgatgatgcaaactactccgttggcctgttggatgaaggaacaaaccttggaaatgttattgataactatgtttatgaacatacc

SEQ ID NO: 108011 - DNA, 660 bp, Homo sapiens
  Payload ID: 1207
  Gene Symbol: AZIN1
  Gene Name: antizyme inhibitor 1
  ENST ID: ENST00000520402
  CDS Start-End: 370-660
acacatggaggttcctggagagtggcgggcccagggagggcatggaggtttcacatccctccccctgtatcttgccctatgtgtctcttcatctgtatccttcgcaatatcctttataataaaccagtaaacacagggcgaactttctgaccaagtatacaactacccagagggcctaggagaagtgctgtatagagagcagttcgacttcaacgctgagccaccttgggaacctagctgatgataggggggttccatctcccaacttgtccattttgttgcatattctaaggacccagacataggcttggtggcccgtctcttgtctttcctggtttatgactttcggctttgtggaatacggctgagatgaaaggatttattgatgatgcaaactactccgttggcctgttggatgaaggaacaaaccttggaaatgttattgataactatgtttatgaacataccctgacagggaaaaatgcattttttgtgggagatcttggaaagattgtgaagaaacacagtcaatggcagaatgtagtggctcagataaagccattctacacagtgaagtgcaactctgctccagctgtacttgagattttggcagctcttggaaccggatttgcttgttccagtaaaaatgaaatggcttta

SEQ ID NO: 108012 - DNA, 680 bp, Homo sapiens
  Payload ID: 1207
  Gene Symbol: AZIN1
  Gene Name: antizyme inhibitor 1
  ENST ID: ENST00000521536
  CDS Start-End: 186-680
gtgctgtatagagagcagttcgacttcaacgctgagccaccttgggaacctagctgatgataggggggttccatctcccaacttgtccattttgttgcatattctaaggacccagacataggcttggtggcccgtctcttgtctttcctggtttatgactttcggctttgtggaatacggctgagatgaaaggatttattgatgatgcaaactactccgttggcctgttggatgaaggaacaaaccttggaaatgttattgataactatgtttatgaacataccctgaatgaaatggctttagtgcaagagttgggtgtacctccagaaaacattatttacataagtccttgcaagcaagtgtctcagataaagtatgcagcaaaagttggagtgaatatcctgacatgtgacaatgaaattgaattgaagaaaattgcacgtaatcacccaaatgccaaggtcttactacatattgcaacagaagataatattggaggtgaagagggtaacatgaagtttggcactaccctgaagaactgtaggcatctcttggaatgtgctaaggaacttgatgtccaaataattggggttaaatttcatgtttcgagtgcttgcaaagaatctcaagtatatgtacatgctctatctgatgctcgatgtgtgtttgacatggctgga

SEQ ID NO: 108013 - DNA, 2182 bp, Homo sapiens
  Payload ID: 1208
  Gene Symbol: AZIN2
  Gene Name: antizyme inhibitor 2
  Uniprot ID: Q96A70
  ENST ID: ENST00000294517
  CDS Start-End: 588-1970
tgggcggggttatataagccagcggcgggcggaaggcggggcgtgggggtctgtggctgctgggctggcggggcgcaggccgcgggacccgagcccggggaagcgagagagcggaggcgccgaggatccgattcactccctggggagacctatgggccgaagccgtgtaaatgcgttttaagcagaggcctcggctccgcaactgccactcctcctcggggtgttgcacaagtttcgaggtcaccggcgaccccccctagcagcgcgcctggctctggcccccgcgaaggaggacggagtttggagcttgcggcccccacccaccgcgtggcgtccccaggcacgcctagaattctagcacctcaggatcagtccagcccccatttacaattggggaaactgcggctccgaaagggtcagagggtacccgaggtcaagcagtagagagcggactcgaacttaagctcttgctcttaggctgagacgccttgatgtggccaccggctaccctctagtgtgttgcatactttctaaggcggcggctgcagcagcggctccatccagcccgtcagctcctcctgcaaggcatggctggctacctgagtgaatcggactttgtgatggtggaggagggcttcagtacccgagacctgctgaaggaactcactctgggggcctcacaggccaccacggacgaggtagctgccttcttcgtggctgacctgggtgccatagtgaggaagcacttttgctttctgaagtgcctgccacgagtccggcccttttatgctgtcaagtgcaacagcagcccaggtgtgctgaaggttctggcccagctggggctgggctttagctgtgccaacaaggcagagatggagttggtccagcatattggaatccctgccagtaagatcatctgcgccaacccctgtaagcaaattgcacagatcaaatatgctgccaagcatgggatccagctgctgagctttgacaatgagatggagctggcaaaggtggtaaagagccaccccagtgccaagatggttctgtgcattgctaccgatgactcccactccctgagctgcctgagcctaaagtttggagtgtcactgaaatcctgcagacacctgcttgaaaatgcgaagaagcaccatgtggaggtggtgggtgtgagttttcacattggcagtggctgtcctgaccctcaggcctatgctcagtccatcgcagacgcccggctcgtgtttgaaatgggcaccgagctgggtcacaagatgcacgttctggaccttggtggtggcttccctggcacagaaggggccaaagtgagatttgaagagattgcttccgtgatcaactcagccttggacctgtacttcccagagggctgtggcgtggacatctttgctgagctggggcgctactacgtgacctcggccttcactgtggcagtcagcatcattgccaagaaggaggttctgctagaccagcctggcagggaggaggaaaatggttccacctccaagaccatcgtgtaccaccttgatgagggcgtgtatgggatcttcaactcagtcctgtttgacaacatctgccctacccccatcctgcagaagaaaccatccacggagcagcccctgtacagcagcagcctgtggggcccggcggttgatggctgtgattgcgtggctgagggcctgtggctgccgcaactacacgtaggggactggctggtctttgacaacatgggcgcctacactgtgggcatgggttcccccttttgggggacccaggcctgccacatcacctatgccatgtcccgggtggcctgggaagcgctgcgaaggcagctgatggctgcagaacaggaggatgacgtggagggtgtgtgcaagcctctgtcctgcggctgggagatcacagacaccctgtgcgtgggccctgtcttcaccccagcgagcatcatgtgagtgggcctcgttccccccggagaatcccagcggggcctcagagatgcatctgggagaggtggggaagatggcaggcaagggtacccttggccaggactctggtgcccaccctgccacccccgcgctccacctgcagtgtttctgccctgtaaataggaccagtcttacactcgctgtagttcaagtatgcaacataaatcctgttccttcca

SEQ ID NO: 108014 - DNA, 616 bp, Homo sapiens
  Payload ID: 1208
  Gene Symbol: AZIN2
  Gene Name: antizyme inhibitor 2
  Uniprot ID: Q96A70
  ENST ID: ENST00000373440
  CDS Start-End: 1-615
atggctggctacctgagtgaatcggactttgtgatggtggaggagggcttcagtacccgagacctgctgaaggaactcactctgggggcctcacaggccaccacggacgaggtagctgccttcttcgtggctgacctgggtgccatagtgaggaagcacttttgctttctgaagtgcctgccacgagtccggcccttttatgctgtcaagtgcaacagcagcccaggtgtgctgaaggttctggcccagctggggctgggctttagctgtgccaacaagattgcttccgtgatcaactcagccttggacctgtacttcccagagggctgtggcgtggacatctttgctgagctggggcgctactacgtgacctcggccttcactgtggcagtcagcatcattgccaagaaggaggttctgctagaccagcctggcagggaggaggaaaatggttccacctccaagaccatcgtgtaccaccttgatgagggcgtgtatgggatcttcaactcagtcctgtttgacaacatctgccctacccccatcctgcagaagtctaagaaccactcaccctgctacatgtctctagagtccattcatttcattgccgtgtagc

SEQ ID NO: 108015 - DNA, 1443 bp, Homo sapiens
  Payload ID: 1208
  Gene Symbol: AZIN2
  Gene Name: antizyme inhibitor 2
  Uniprot ID: Q96A70
  ENST ID: ENST00000373441
  CDS Start-End: 1-1443
atggctggctacctgagtgaatcggactttgtgatggtggaggagggcttcagtacccgagacctgctgaaggaactcactctgggggcctcacaggccaccacggacgaggtagctgccttcttcgtggctgacctgggtgccatagtgaggaagcacttttgctttctgaagtgcctgccacgagtccggcccttttatgctgtcaagtgcaacagcagcccaggtgtgctgaaggttctggcccagctggggctgggctttagctgtgccaacaaggcagagatggagttggtccagcatattggaatccctgccagtaagatcatctgcgccaacccctgtaagcaaattgcacagatcaaatatgctgccaagcatgggatccagctgctgagctttgacaatgagatggagctggcaaaggtggtaaagagccaccccagtgccaagatggttctgtgcattgctaccgatgactcccactccctgagctgcctgagcctaaagtttggagtgtcactgaaatcctgcagacacctgcttgaaaatgcgaagaagcaccatgtggaggtggtgggtgtgagttttcacattggcagtggctgtcctgaccctcaggcctatgctcagtccatcgcagacgcccggctcgtgtttgaaatgggcaccgagctgggtcacaagatgcacgttctggaccttggtggtggcttccctggcacagaaggggccaaagtgagatttgaagagattgcttccgtgatcaactcagccttggacctgtacttcccagagggctgtggcgtggacatctttgctgagctggggcgctactacgtgacctcggccttcactgtggcagtcagcatcattgccaagaaggaggttctgctagaccagcctggcagggaggccccactaccaccccctcacattgctacttgtgctgcctctgaaccctcccctcctgcagaggaaaatggttccacctccaagaccatcgtgtaccaccttgatgagggcgtgtatgggatcttcaactcagtcctgtttgacaacatctgccctacccccatcctgcagaagaaaccatccacggagcagcccctgtacagcagcagcctgtggggcccggcggttgatggctgtgattgcgtggctgagggcctgtggctgccgcaactacacgtaggggactggctggtctttgacaacatgggcgcctacactgtgggcatgggttcccccttttgggggacccaggcctgccacatcacctatgccatgtcccgggtggcctgggaagcgctgcgaaggcagctgatggctgcagaacaggaggatgacgtggagggtgtgtgcaagcctctgtcctgcggctgggagatcacagacaccctgtgcgtgggccctgtcttcaccccagcgagcatcatgtga

SEQ ID NO: 108016 - DNA, 2048 bp, Homo sapiens
  Payload ID: 1208
  Gene Symbol: AZIN2
  Gene Name: antizyme inhibitor 2
  Uniprot ID: Q96A70
  ENST ID: ENST00000373443
  CDS Start-End: 319-1701
ggctgctgggctggcggggcgcaggccgcgggacccgagcccggggaagcgagagagcggaggcgccgaggatccgattcactccctggggagacctatgggccgaagccgtgtaaatgcgttttaagaggcctcggctccgcaactgccactcctcctcggggtgttgcacaagtttcgaggtcaccggcgaccccccctagcagcgcgcctggctctggcccccgcgaaggaggacggagtttgtgtgttgcatactttctaaggcggcggctgcagcagcggctccatccagcccgtcagctcctcctgcaaggcatggctggctacctgagtgaatcggactttgtgatggtggaggagggcttcagtacccgagacctgctgaaggaactcactctgggggcctcacaggccaccacggacgaggtagctgccttcttcgtggctgacctgggtgccatagtgaggaagcacttttgctttctgaagtgcctgccacgagtccggcccttttatgctgtcaagtgcaacagcagcccaggtgtgctgaaggttctggcccagctggggctgggctttagctgtgccaacaaggcagagatggagttggtccagcatattggaatccctgccagtaagatcatctgcgccaacccctgtaagcaaattgcacagatcaaatatgctgccaagcatgggatccagctgctgagctttgacaatgagatggagctggcaaaggtggtaaagagccaccccagtgccaagatggttctgtgcattgctaccgatgactcccactccctgagctgcctgagcctaaagtttggagtgtcactgaaatcctgcagacacctgcttgaaaatgcgaagaagcaccatgtggaggtggtgggtgtgagttttcacattggcagtggctgtcctgaccctcaggcctatgctcagtccatcgcagacgcccggctcgtgtttgaaatgggcaccgagctgggtcacaagatgcacgttctggaccttggtggtggcttccctggcacagaaggggccaaagtgagatttgaagagattgcttccgtgatcaactcagccttggacctgtacttcccagagggctgtggcgtggacatctttgctgagctggggcgctactacgtgacctcggccttcactgtggcagtcagcatcattgccaagaaggaggttctgctagaccagcctggcagggaggaggaaaatggttccacctccaagaccatcgtgtaccaccttgatgagggcgtgtatgggatcttcaactcagtcctgtttgacaacatctgccctacccccatcctgcagaagaaaccatccacggagcagcccctgtacagcagcagcctgtggggcccggcggttgatggctgtgattgcgtggctgagggcctgtggctgccgcaactacacgtaggggactggctggtctttgacaacatgggcgcctacactgtgggcatgggttcccccttttgggggacccaggcctgccacatcacctatgccatgtcccgggtggcctgggaagcgctgcgaaggcagctgatggctgcagaacaggaggatgacgtggagggtgtgtgcaagcctctgtcctgcggctgggagatcacagacaccctgtgcgtgggccctgtcttcaccccagcgagcatcatgtgagtgggcctcgttccccccggagaatcccagcggggcctcagagatgcatctgggagaggtggggaagatggcaggcaagggtacccttggccaggactctggtgcccaccctgccacccccgcgctccacctgcagtgtttctgccctgtaaataggaccagtcttacactcgctgtagttcaagtatgcaacataaatcctgttccttccagctgtgtctgcctcctctgcagtgcaaggggcctggtcagccaggtgtgggggtgttcttggggtctcctttggtctccttcccacctttgtaaatataatgcaaataaataaatatttaggtttttaaaaactg

SEQ ID NO: 108017 - DNA, 891 bp, Homo sapiens
  Payload ID: 1209
  Gene Symbol:
  Gene Name: AP000275.65
  ENST ID: ENST00000431216
  CDS Start-End: 1-891
gggtctataatgggcggctcaaggtgcagcgcctctgctcagaaatggaagaattagccgaacatggcatatttctccctcctaatatgcaaggactgaccgatgatcagattgaagaattgaaattgaaggatgaatggggtgaaaaatgcgtacccagcggaggtgcagtgtttaaaaaggatgatattggacgaaggaatgggcaagctccaaatgagaagatgaagcaagtgttaaagaagactatagaagaagccaaagcaataatatctaagaaacaagtggaagccggtgtctgtgttaccatggagatggtgaaagatgccttggaccagcttcgaggcgcggtgatgattgtttaccccatggggttgccaccgtatgatcccatccgcatggagtttgaaaataaggaagacttgtcgggaacacaggcagggctcaacgtcattaaagaggcagaggcgcagctgtggtgggcagccaaggagctgagaagaacgaagaagctttcagactacgtggggaagaatgaaaaaaccaaaattatcgccaagattcagcaaaggggacagggagctccagcccgagagcctattattagcagtgaggagcagaagcagctgatgctgtactatcacagaagacaagaggagctcaagccattacagcagcagatcatcagactccaccaagagcttgggagacagaagtctctgtgggctgatgttcatggaaaactccggagtcatatagatgctttgagggagcagaacatggagctccgagaaaagctgagagctctgcagctgcagcggtggaaagccaggaagaaatctgcagcgtccccacacgcggggcaagaatcgcacactctggcattggaac

SEQ ID NO: 108018 - DNA, 929 bp, Homo sapiens
  Payload ID: 1209
  Gene Symbol:
  Gene Name: AP000275.65
  ENST ID: ENST00000553001
  CDS Start-End: 39-929
gggccttctcaacgcctcagtacctcggcgggaccgccatggttctgctgcacgtgaagcggggcgacgagagccagttcctgctgcaggcgcctgggagtaccgagctggaggagctcacggtgcaggtggcccgggtctataatgggcggctcaaggtgcagcgcctctgctcagaaatggaagaattagccgaacatggcatatttctccctcctaatatgcaaggactgaccgatgatcagattgaagaattgaaattgaaggatgaatggggtgaaaaatgcgtacccagcggaggtgcagtgtttaaaaaggatgatattggacgaaggaatgggcaagctccaaatgagaagatgaagcaagtgttaaagaagactatagaagaagccaaagcaataatatctaagaaacaagtggaagccggtgtctgtgttaccatggagatggtgaaagatgccttggaccagcttcgaggcgcggtgatgattgtttaccccatggggttgccaccgtatgatcccatccgcatggagtttgaaaataaggaagacttgtcgggaacacaggcagggctcaacgtcattaaagaggcagaggcgcagctgtggtgggcagccaaggagctgagaagaacgaagaagctttcagactacgtggggaagaatgaaaaaaccaaaattatcgccaagattcagcaaccattacagcagcagatcatcagactccaccaagagcttgggagacagaagtctctgtgggctgatgttcatggaaaactccggagtcatatagatgctttgagggagcagaacatggagctccgagaaaagctgagagctctgcagctgcagcggtggaaagccaggaagaaatctgcagcgtccccacacgcggggcaagaatcgcacactctggcattggaa

SEQ ID NO: 108019 - DNA, 1000 bp, Homo sapiens
  Payload ID: 1210
  Gene Symbol:
  Gene Name: AP000295.9
  ENST ID: ENST00000433395
  CDS Start-End: 1-1000
gtgacctcacagatgagtggagaagcacacacgaggcctatgtcaccgtcctagaaggattcagcgggaacacaacgttgttcagttgctcacacaatttctggctggccatagacatgtcttttgaaccaccagagtttgagattgttggttttaccaaccacattaatgtgatggtgaaatttccatctattgttgaggaagaattacagtttgatttatctctcgtcattgaagaacagtcagagggaattgttaagaagcataaacccgaaataaaaggaaacatgagtggaaatttcacctatatcattgacaagttaattccaaacacgaactactgtgtatctgtttatttagagcacagtgatgagcaagcagtaataaagtctcccttaaaatgcaccctccttccacctggccaggaatcagcattgggaatggtaccacctcccgaaaatgtcagaatgaattctgttaatttcaagaacattctacagtgggagtcacctgcttttgccaaagggaacctgactttcacagctcagtacctaagttataggatattccaagataaatgcatgaatactaccttgacggaatgtgatttctcaagtctttccaagtatggtgaccacaccttgagagtcagggctgaatttgcagatgagcattcagactgggtaaacatcaccttctgtcctgtggatgacaccattattggaccccctggaatgcaagtagaagtacttgctgattctttacatatgcgtttcttagcccctaaaattgagaatgaatacgaaacttggactatgaagaatgtgtataactcatggacttataatgtgcaatactggaaaaacggtactgatgaaaagtttcaaattactccccagtatgactttgaggtcctcagaaacctggagccatggacaacttattgtgttcaagttcgagggtttcttcctgatcggaacaaagctggggaatggagtga

SEQ ID NO: 108020 - DNA, 753 bp, Homo sapiens
  Payload ID: 1210
  Gene Symbol:
  Gene Name: AP000295.9
  ENST ID: ENST00000432231
  CDS Start-End: 1-338
ttgaaccaccagagtttgagattgttggttttaccaaccacattaatgtgatggtgaaatttccatctattgttgaggaagaattacagtttgatttatctctcgtcattgaagaacagtcagagggaattgttaagaagcataaacccgaaataaaaggaaacatgagtggaaatttcacctatatcattgacaagttaattccaaacacgaactactgtgtatctgtttatttagagcacagtgatgagcaagcagtaataaagtctcccttaaaatgcaccctccttccacctggccaggaatcagttataggatattccaagataaatgcatgaatactaccttgacggaatgtgatttctcaagtctttccaagtatggtgaccacaccttgagagtcagggctgaatttgcagatgagcattcagactgggtaaacatcaccttctgtcctgtggatgacaccattattggaccccctggaatgcaagtagaagtacttgctgattctttacatatgcgtttcttagcccctaaaattgagaatgaatacgaaacttggactatgaagaatgtgtataactcatggacttataatgtgcaatactggaaaaacggtactgatgaaaagtttcaaattactccccagtatgactttgaggtcctcagaaacctggagccatggacaacttattgtgttcaagttcgagggtttcttcctgatcggaacaaagctggggaatggagtga

SEQ ID NO: 108021 - DNA, 1078 bp, Homo sapiens
  Payload ID: 1211
  Gene Symbol:
  Gene Name: AP000304.12
  ENST ID: ENST00000429238
  CDS Start-End: 352-1078
aaggagccaagatggccgaataggaacagctctggtctacagctcccagcgtgagcgacgcagaagacggtgatttctgcatttccatctgaggtaccgggttcatctctctagggagtgccagacagtgggcgcagatgcagtcgaagccctgtggctccaccccgagggtccagcccttaccactgctaagaactacaactcccagcccgagggaggtctctgcgcctgcggcctgacgccctacgcctacacttcccagagaacctagcggttacgccaacgcgcgcgtgcgcccttgcgcgtttctctcttcccactcgggtttgacctacagccgcccgggagaagatggctgccccagcagtgtccgggctctcccggcaggtgcgatgcttcagtacctctgtggtcagaccatttgccaagcttgtgaggcctcctgttcaggtatacggtattgaaggtcgctatgccacagctctttattctgctgcatcaaaacagaataagctggagcaagtagaaaaggagttgttgagagtagcacaaatcctgaaggaacccaaagtggctgcttctgttttgaatccctatgtgaagcgttccattaaagtgaaaagcctaaatgacatcacagcaaaagagaggttctctcccctcactaccaatctgatcaatttgcttgctgaaaatggtcgattaagcaatacccaaggagtcgtttctgccttttctaccatgatgagtgtccatcgcggagaggtaccttgcacagtgacctctgcatctacttcacatgtatcattctccgagcctgatattccgtcctcaaaaagtactgagttacctgtggactggagtattaaaacgcgactccttttcacctcttctcaaccctttacctgggcagatcatttgaaagcacaggaagaagctcaaggtcttgtccagcattgtagggcaacagaagttactttgcctaaaagtatacaggatcccaaactctcctctgagctccgttgtaccttccagcagagccttatctattggctccaccctgctttgtcttggctac

SEQ ID NO: 108022 - DNA, 1050 bp, Homo sapiens
  Payload ID: 1212
  Gene Symbol:
  Gene Name: AP000322.53
  Uniprot ID: A8MWV9
  ENST ID: ENST00000450895
  CDS Start-End: 128-547
gtgcagctcaactgcagtaggactgattcttccctaggagacggagttctcctttcatcatcttccccttctgtgcatggtagccgcttgaacttgcccctccaagagtcaaggacaagaccaccccatggaatgggccaagtggactccccatgaagcctccaaccagacccaggccagcaccctcctggggctcctgctgggtgaccacacagaggggaggaatgacaccaactccaccagggctctgaaggtgccagacggaaccagcgctgcctggtatatactcaccatcatcggcatctacgcggtgattttcgtcttccggctggccagcaacatcctcagaaagaatgacaagtccttagaagatgtttattactcaaatctgacctctgaactcaaaatgacagggctgcagggcaaggtcgccaagtgctccaccctgtctatcagcaacagagctgtgctgcagccctgccaggcccacctgggggcaaagggcggaagcagcgggccccaaaccgcaaccccagagaccccctgagagtcaaggccaggaggccttccctagggtggccccagacttcttggaggggagcagctttgggtttacttggagcccttgagggggactgggggtgcatcactgacaaggggtgcttctggctgctagtttgtgaccagagccagccacccagttccttctcagacttccaggtgcttcgagaagagagagcagggcagcggtttctagccaaattcaatcttcactggcaaaacctgtgctctggggaggagcactattccactgttctcggaggaatccgggagactcctgggggcatacaaggaggtgactccttgtcgtggaaagaagaatgaacttggagtcagttctgggttaaaattcaacttctggggagtcacataaactgagcagcttagttgctcacctgagacatttagggtttggagacagatggttttaaaagtctattttatttgaaagactctagcttgaatataggaccaaagttgttaatatca

SEQ ID NO: 108023 - DNA, 747 bp, Homo sapiens
  Payload ID: 1213
  Gene Symbol:
  Gene Name: AP000349.1
  ENST ID: ENST00000598975
  CDS Start-End: 1-747
atggggccccagcacccttgcttcagtgccagcccctggaaggaacctcacaacagggatacagcaaggacactccagttcccccagtcctgccatggtgctaccctgagggacagggatggagacagggcagccaggtttgccaggacctgcatagcgggcccaagactgcccttcctcttaagtcatgccaaagcctccctgcccagtctgagacagtcgctggcaggtgaccacgacctgcgtggccctcccggcagttgtcatggtggttgtaccccaccccatccccctgaggagacatgggctcagtcccatgcctggtgcccacagccacaaagatggccatgggtctctagcctgatattcgtggcctggcaggggtcagcacccctgagggcatccaagccatggtcagaggaaagtgttggcaggctcggcacagccaaagaagtcaggacccacgagacgggggaagccttccagagccttcaccttcacagggtcaaacttccagtagaggcggccgcgcaggaagtaggcatagccatcagcatcctggaaggcagcgtcgatctcagagggcacccctctccagtcagtggctgcggggcacgggactgtctacacgccgggtgctggggtggaaacgccagtagtccctgcctcggaagaagtagatcttgttcttctcgggaccccagaccaaggcagcatggaccgggaacctcaccaggcccagctcgg

SEQ ID NO: 108024 - DNA, 747 bp, Homo sapiens; identical to SEQ ID NO: 108023
  Payload ID: 1214
  Gene Symbol:
  Gene Name: AP000349.2
  ENST ID: ENST00000624319
  CDS Start-End: 1-747

SEQ ID NO: 108025 - DNA, 788 bp, Homo sapiens
  Payload ID: 1215
  Gene Symbol:
  Gene Name: AP000350.10
  ENST ID: ENST00000433835
  CDS Start-End: 1-630
aatgccccgaccttgcacattcaggaattcaccaatgagacatggcaggcgcgtactggagagccactgcccgatcacctagtcctgcttatgtggtccctcatcgtgtctctgtatcccctgggaggcctctttggagcactgcttgcaggtcccttggccatcacgctgggaaggaagaagtccctcctggtgaataacatctttgtggtgtcagcagcaatcctgtttggattcagccgcaaagcaggctcctttgagatgatcatgctgggaagactgctcgtgggagtcaatgcaggtgtgagcatgaacatccagcccatgtacctgggggagagcgcccctaaggagctccgaggagctgtggccatgagctcagccatctttacggctctggggatcgtgatgggacaggtggtcggactcagtacatcgcggtgcacgtggtcccggaccagctcatggccttcggcggctccagcgagccgtgcgcgctctgcagcctgcacagcatcggcaagatcggcggcgcgcagaaccgctcctacagcaagctgctgtgcggcctgctggccgagcgcctgcgcatcagcccggacagggtctacatcaactattacgacatgaacgcggccaatgtgggctggaacaactccaccttcgcctaagagccgcagggacccacgctgtctgcgctggctccacccgggaacccgccgcacgctgtgttctaggcccgcccaccccaaccttctggtggggagaaataaacggtttagagacta

SEQ ID NO: 108026 - DNA, 788 bp, Homo sapiens; identical to SEQ ID NO: 108025
  Payload ID: 1215
  Gene Symbol:
  Gene Name: AP000350.10
  ENST ID: ENST00000626965
  CDS Start-End: 1-630

SEQ ID NO: 108027 - DNA, 111 bp, Homo sapiens
  Payload ID: 1216
  Gene Symbol:
  Gene Name: AP000351.1
  ENST ID: ENST00000615157
  CDS Start-End: 1-111
caagtcgcctttggccaggattactgcaccaccgtgcccagcccagaatattattctaaaacacaatcagagcactccatacctgctaacagtttaaagccaagcacctag

SEQ ID NO: 108028 - DNA, 375 bp, Homo sapiens
  Payload ID: 1217
  Gene Symbol:
  Gene Name: AP000687.1
  ENST ID: ENST00000624569
  CDS Start-End: 1-375
atgactcttaacgagcatgctgccttcaagcatctgtttaacaaagcacatcttgcaccgcccttaatccatttaaccctgagtggacacagcacatgtttcagagagcacagggttgggggtaaggtcacagatcaacaggatcccaaggcagaagaatttttcttagtacagaacaaaataaaaagtctcccatgtctacttctttctacacagacacagcaaccatccgatttctcaatcttttccccacctttcccctctttcgattccacaaaaccgccattgtcatcatggcccgttctcaatgagctgttgggtacacctcccagacggggtggtggccgggcagaggggctcctcacttcccagtag

SEQ ID NO: 108029 - DNA, 559 bp, Homo sapiens
  Payload ID: 1218
  Gene Symbol:
  Gene Name: AP000721.4
  ENST ID: ENST00000535431
  CDS Start-End: 62-556
attttggcttcctgaccttgggctacggctgaccgttttttgtggtgtactccgtgccatcatgtccgtcctgacgccgctgctgctgcggggcttgacaggctcggcccggcggctcccagtgccgcgcgccaagatccattcgttgccgccggaggggaagcttgggatcatgggaaaagaaaacggaattggctccaggaggatctgcaatcaccaccgggaactttgggaggctgggaagatggagccaaaccaatgtgtggggtggaggtgcggatctggggcggccggcctctcctacaggtctcaggtccgcaggcctggcgtgccagcacctgccacgggactggaagcccattccttgacaacgcctaaggggatcccgttgctagggctgttgccaaggcggggcaacgaggaggggctcgcttccgggaggacggcaattggcaacccggaagcggtcggtagtgcggcgctgtttaaagatggcggcggaggaacctcagcagcagaagcaggagccgctgggcagcgactccgaaggtgttaactg

SEQ ID NO: 108030 - DNA, 826 bp, Homo sapiens
  Payload ID: 1219
  Gene Symbol:
  Gene Name: AP000866.1
  ENST ID: ENST00000624557
  CDS Start-End: 126-329
aattgtatctgtgtaatgttaaaacaaacgaaataaaatagaaggaaaaactttctgagtttcaaaaacaacagactagtactctaaagaactctttaaaacaattaactgttaggattgcagttatgattggatattatttaattctgtttctgatgtggggttcctccactgtgttctgtgtgctattaatatttaccattgcagaagcttcattcagtgttgaaaatgaatgcttagtggatctgtgcctcttatgcatatgttacaaattatctggagttcctaatcaatgcagagttcccctcccctccgattgttctaaataattgaaagatgtctgctgtggaaaaaggcatgtatttaaatctgtatgattctcaaccatctttagttgggaaaggtccttgaaagccaatggaaatactttttttttttcttggcactaatcaagtgagtgttaccttttcacttagtaggatgtgttgttacgctagtaaaatagaaacctgtgtttattctcaggtattttagaaacaacagccatcattttattttatgtgtgtgttcttggctgtattcataaattatatattttgggctatcaaatattacttcattcaatataaataacaatagtagaagttgtttacttagatatgctttctagttgcattttctcagcctatgtaagactactttgttgtaatagcctttgaaatttacagtactgtctctctactatcttcagattacttgattcaaataaaccaattatgtttgtaattgatattaataaaaccagaataaaagttcatatctaccc

SEQ ID NO: 108031 - DNA, 42 bp, Homo sapiens
  Payload ID: 1220
  Gene Symbol:
  Gene Name: AP001888.1
  ENST ID: ENST00000627463
  CDS Start-End: 1-42
ttgagcattaggcaatggaagtccctcgacactccaccaggg

SEQ ID NO: 108032 - DNA, 571 bp, Homo sapiens
  Payload ID: 1221
  Gene Symbol:
  Gene Name: AP002884.2
  ENST ID: ENST00000532699
  CDS Start-End: 6-428
acgagatggcggttctctggaggctgagtgccgtttgcggtgccctaggaggccgagctctgttgcttcgaactccagtggtcagacctgctcatatctcagcatttcttcaggaccgacctatcccagaatggtgtggagtgcagcacatacacttgtcaccgagccaccattctggctccaaggctgcatctctccactggactagcgagagggttgtcagtgttttgctcctgggtctgcttccggctgcttatttgaatccttgctctgcgatggactattccctggctgcagccctcactcttcatggtcactgtctccagtgccagatagtccacagctgtcctctcttggaaaatcagattcatctttctctgaaatttccggactattttataaagatgaagccttggagaaagatttaaatgatgtgagcaaggaaattaatctaatgttgtctacctatgcaaagcttttaaggtacaatcattggtttgatgggatggcgctgcttcaccagttcagaatggcaaagggcacagtgacatacaggagcaagtttctacag

SEQ ID NO: 108033 - DNA, 566 bp, Homo sapiens
  Payload ID: 1221
  Gene Symbol:
  Gene Name: AP002884.2
  ENST ID: ENST00000531744
  CDS Start-End: 6-428
acgagatggcggttctctggaggctgagtgccgtttgcggtgccctaggaggccgagctctgttgcttcgaactccagtggtcagacctgctcatatctcagcatttcttcaggaccgacctatcccagaatggtgtggagtgcagcacatacacttgtcaccgagccaccattctggctccaaggctgcatctctccactggactagcgagagggttgtcagtgttttgctcctgggtctgcttccggctgcttatttgaatccttgctctgcgatggactattccctggctgcagccctcactcttcatggtcactgtctccagtgccagatagtccacagctgtcctctcttggaaaatcagattcatctttctctgaaatttccggactattttataaagatgaagccttggagaaagatttaaatgatgtgagcaaggaaattaatctaatgttgtctacctatgcaaagcttttaagttttcaaaaggtacatgggaaatactcctcagaaaaaagccgtctttgggcagtgtcggggtctgccatgtgttgcaccgctg

SEQ ID NO: 108034 - DNA, 942 bp, Homo sapiens
  Payload ID: 1222
  Gene Symbol:
  Gene Name: AP002962.1
  ENST ID: ENST00000623963
  CDS Start-End: 1-942
atgcaggaggcagatgctagcattaagactgcggaaacaaagggaagaacttggaagtatcaaaacatagagcctgggggaggacctcagacctctgggaaagggggctttggcagtctggtgctggtgtttctggggcagagggtagggtgtaacgagactggttccatgaatttggaaaaactgcaaactagacccaacatgactatttttacccgaaacaacatagccacgaatttctcctcctcctcctcttcctcttatttttcccctcctcctcctcctgtcctccttcccctcctccttcttctcccccaacttttttcttcttcttcctcctcctttttcttctccttttccccttctacttctcctcttgtttctccttgttttttctcttcctcctcctccttttgcttctcagtttctcttcttccatcttcttccccaacctccatgactaagtttccaaaagcagttacgacaaaaataaaaactgacaaaagggacctgattaaactaaagggcttctgcacagcaaaagaaactatcaacagaacaaacagacaacctatagaatgggagaaaatattcacaaactatgcatccaacaagggtctaatatctagaatctataaggaacttgggcaatctgacaagcaaagaccaaataaccccattaaaaagtgggcaaaggacatgaacagacacttctcaaaagaagacatacaagtggccaacaaacacgaaaaaatgctctcaacatcactaatcattggaaaaatgcaaatcaaaaccacagtgagataccatctcatgccagcaaggaaagctactattaagaagtcagaaaataacagatgttggcaaggctgcagaggaaagggaacgtttacacactgttggtcgaaatgtaaattaaaatgtaaatgtaaaatgtaa

SEQ ID NO: 108035 - DNA, 711 bp, Homo sapiens
  Payload ID: 1223
  Gene Symbol:
  Gene Name: AP003419.11
  ENST ID: ENST00000543494
  CDS Start-End: 46-288
gcctccgggagaggagccgcacccggccggcccggccccagccccatggacctccgagcaggggaggagccccagccccgcgacgaggaggaagcggagctggagctgctgaggcagtttgacctggcctggcagtacgggccctgcaccgggatcacacggctgcagcgctggtgtcgggccaagcagatgggcttggagcctcccccagaggtgtggcaggtgctgaagacccaccccggagacccccgcttccagtgcagtctctggcatctctatcccctatgaggcaccacgtaagacctcctgcccttagctctcttgctcaccacccaagaacctcaggacagaagcgagagcccattgctcctgctcagctcagcccggctgcggaggaacccttggcaggcagaacctggaggtgtcagaggctcaactcctccatctaaccagcaggctcccagagtccccggaagagcctgcgcagctgaagcagagtgcttctagatggagagtggtcactggggaaaaggacctggccatcaccttccaatacctgctgcctgtctccctgacccatgatctggcaagttaggcacagtcagacatggacagttgatccatgaggaaaagatgctctcccacctaaggccaggaatctgagagcaggactggctgagctcccagggcaaggggttcactaatgcttat

SEQ ID NO: 108036 - DNA, 308 bp, Homo sapiens
  Payload ID: 1224
  Gene Symbol:
  Gene Name: AP005242.1
  ENST ID: ENST00000623604
  CDS Start-End: 86-274
cttctgcaaagatctatttgtttagccatgtgcaaatattgccctaaaatgttcacaggttccaggataaccagatgactgaggaatgttgaagattgcagtgatggaagtgcctcagtcagcctggaagactgtatggatggaggttgcctggccacactgtcatgtccctctctccctgaaaaagagacacatttgcctttgggcaaggcaatacatacatttggtctatgtatacactttggtctatgcattctgttatttaacattctaataatgttgatgaccttaaaatatgcttgacaatg

SEQ ID NO: 108037 - DNA, 2175 bp, Homo sapiens; identical to SEQ ID NO: 103610
  Payload ID: 1225
  Gene Symbol:
  Gene Name: AP006285.1
  ENST ID: ENST00000617253
  CDS Start-End: 1018-1614

SEQ ID NO: 108038 - DNA, 2175 bp, Homo sapiens; identical to SEQ ID NO: 103610
  Payload ID: 1226
  Gene Symbol:
  Gene Name: AP006285.2
  ENST ID: ENST00000624434
  CDS Start-End: 1018-1614

SEQ ID NO: 108039 - DNA, 4499 bp, Homo sapiens
  Payload ID: 1227
  Gene Symbol: AAK1
  Gene Name: AP2 associated kinase 1
  Uniprot ID: Q2M2I8
  ENST ID: ENST00000406297
  CDS Start-End: 378-2969
gatcagctggcgggcgggcgggagccgagcgcggccccggctctcgctgcagcgccgcctcttctctgcgtcgcaggccggcccggcggccgtgacaatgtcgcggggctggtagcagggcgccggccgccgagccgtctcaagtttaaacttacacgaatcgctttctggaggaggaggggacccgctgcgcgattgacacgcatattcctataggcatcctccctcagcccccacccccacggccggattcgggtggctcctctccgaggtgaaatctgagaagaaatccttggatctcttttcttaaaaaaaaaaaaaaaaaaaaaaaatctagaaaccatcggtattttgctttgctgctccctattcgcaagatgaagaagtttttcgactcccggcgagagcagggcggctctggcctgggctccggctccagcggaggagggggcagcacctcgggcctgggcagtggctacatcggaagagtcttcggcatcgggcgacagcaggtcacagtggacgaggtgttggcggaaggtggatttgctattgtatttctggtgaggacaagcaatgggatgaaatgtgccttgaaacgcatgtttgtcaacaatgagcatgatctccaggtgtgcaagagagaaatccagataatgagggatctttcagggcacaagaatattgtgggttacattgattctagtatcaacaacgtgagtagcggtgatgtatgggaagtgctcattctgatggacttttgtagaggtggccaggtggtaaacctgatgaaccagcgcctgcaaacaggctttacagagaatgaagtgctccagatattttgtgatacctgtgaagctgttgcccgcctgcatcagtgcaaaactcctattatccaccgggacctgaaggttgaaaacatcctcttgcatgaccgaggccactatgtcctgtgtgactttggaagcgccaccaacaaattccagaatccacaaactgagggagtcaatgcagtagaagatgagattaagaaatacacaacgctgtcctatcgagcaccagaaatggtcaacctgtacagtggcaaaatcatcactacgaaggcagacatttgggctcttggatgtttgttgtataaattatgctacttcactttgccatttggggaaagtcaggtggcaatttgtgatggaaacttcacaattcctgataattctcgatattctcaagacatgcactgcctaattaggtatatgttggaaccagaccctgacaaaaggccggatatttaccaggtgtcctacttctcatttaagctactcaagaaagagtgcccaattccaaatgtacagaactctcccattcctgcaaagcttcctgaaccagtgaaagccagtgaggcagctgcaaaaaagacccagccaaaggccagactgacagatcccattcccaccacagagacttcaattgcaccccgccagaggcctaaagctgggcagactcagccgaacccaggaatccttcccatccagccagcgctgacaccccggaagagggccactgttcagcccccacctcaggctgcaggatccagcaatcagcctggccttttagccagtgttccccaaccaaaaccccaagccccacccagccagcctctgccgcaaactcaggccaagcagccacaggctcctcccactccacagcagacgccttctactcaggcccagggtctgcccgctcaggcccaggccacaccccagcaccagcagcaactcttcctcaagcagcaacagcagcagcaacagccaccgccagcacagcagcagccggcaggcacgttttaccagcagcagcaggcccagactcagcagtttcaggcagtacatccagcaacccagaaaccagcaattgctcagttccctgtggtgtcccaaggaggctctcaacagcagctaatgcagaatttctaccagcagcagcagcagcagcaacaacaacagcaacagcaacagctggccacagccctgcatcaacaacagctgatgactcagcaggctgccttgcagcaaaagcccactatggcagcaggacagcagccccagccacagccagctgcagccccacagccagcccctgcccaggagccagcgattcaagccccagtaagacaacagccaaaggttcagacaaccccacctcctgccgtccaggggcagaaagttggatctctcactccaccctcatcccccaaaacccaacgtgctgggcacaggcgtattctcagtgacgtaacccacagtgcagtctttggggtccctgccagcaaatcaacccagctgctccaggcagctgcagctgaggccagtctcaataagtccaagtctgcaaccaccactccatcaggctctcctcggacctctcaacaaaacgtttataatccttcagaagggtctacgtggaatccctttgatgacgataatttctccaaactcacagctgaagaactgctaaacaaggactttgccaagcttggggaaggcaaacatcccgagaagcttggaggctcagctgagagtttgatcccaggctttcaatcaacccaaggtgatgcttttgctacgacctcattttctgctggaactgctgaaaaaaggaagggtgggcagactgtggactctggcctcccgcttctaagcgtgtctgatcctttcattcctcttcaagtacctgatgcaccagaaaaactaattgagggactcaaatctcctgacacttctcttctgctccctgacctcttgcctatgacagatccttttggtagcacttctgatgctgtaattggtaaagtcatcatctctgtttcttcagtcatgcatgatatgtgtgcctgtttcaagaatgacaagtacctagttaaccaatccctggggaatagccctgccaccccagaagccaaggctatttaatctcacttgtatcactccaaatgaagtgttttccttgcttttcgggggtacaacgtctattttttgcctttcttgatatctggagatttctagagtggatctcttatgaatgaggaggaatgtggaaagtttcacatttagttagaagaactttaaaaaattggtttctaactagactacctttactgaacttaatgaaatttagcagattcttcttttttttttttttgtttgagacagagtttcactcttgttgcctaggctggagtgcaatggcaagatctcagctcactgcaacctccatctcccgggttcaagcaattctcctgcctcagcctcccgagtagctgagattacaggcatgcaccaccatgcctggctaatttttatatttttagtagagatagggtttctccatgttggtcaggctggtctcgaactcctgacctcaggtgatccacctgccttggcctcccaaagtgctgggattacaggggtgagccaccatgcccagcccagattcttctttagaaggcccatgtacatccagctgcagtgggacgagcctgggaagcataggaagaccccatccctacaaaaaaaatgttgttagttagccaggtgtgggggtgcacacctgtgctaccagctctttgggaggctgagacggaagatcactttgagccagggggtttgaggctgcagtgagccctgatcatgccactgccctccagcttaagtgacagagacccatcttaaacaaaattaaaaaatttaaaaaggtccatgtatataccaagtatcagtaactgagaaaacattttgcccactggttaagccccataaatagaatccagggcaggggcttggtctgcttcctctctcacattttcctatgttccaacagcaaggcaggcaagatttgcaaaatgtccaaggcccctgtactccaggagggtccaatcatgaggcacctaataatgcctttgggcagaaagtcctagaactcagaagtgccatgaccttgcataggggtaggcctgcagctgaggggtgtcacgtggtgcaaaaggcctcccagctacatcctgggatggggtttgagatggattaatggcctttgcatggcacagaggatgtttgcccccaggtttatcccttaataaaagtgaaattaccagaaaaaattaaggtgcctttcagcccatctcttctgacatggaagaggtttgctgagcggcttatgttctgaatttgtttatgagaactgatcattagtgagactggccacagtatttaaccttgcacatgcatgctcagtgaagcctagacattcagagcagcagaaataaagtaacttatttttctttccaccttgcctgagactggcattttagagacctgttaaaagaaagtcttcacatggctgggtgcagtggctcacacttgtaaccacaggactttgggaggccaaggtgggatagatcgcttgagctcaggagcaagacaccatctcaaaaaatgagaatt

SEQ ID NO: 108040 - DNA, 2606 bp, Homo sapiens
  Payload ID: 1227
  Gene Symbol: AAK1
  Gene Name: AP2 associated kinase 1
  ENST ID: ENST00000409068
  CDS Start-End: 315-2339
ctctgcgtcgcaggccggcccggcggccgtgacaatgtcgcggggctggtagcagggcgccggccgccgagccgtctcaagtttaaacttacacgaatcgctttctggaggaggaggggacccgctgcgcgattgacacgcatattcctataggcatcctccctcagcccccacccccacggccggattcgggtggctcctctccgaggtgaaatctgagaagaaatccttggatctcttttcttaaaaaaaaaaaaaaaaaaaaaaaatctagaaaccatcggtattttgctttgctgctccctattcgcaagatgaagaagtttttcgactcccggcgagagcagggcggctctggcctgggctccggctccagcggaggagggggcagcacctcgggcctgggcagtggctacatcggaagagtcttcggcatcgggcgacagcaggtcacagtggacgaggtgttggcggaaggtggatttgctattgtatttctggtgaggacaagcaatgggatgaaatgtgccttgaaacgcatgtttgtcaacaatgagcatgatctccaggtgtgcaagagagaaatccagataatgagggatctttcagggcacaagaatattgtgggttacattgattctagtatcaacaacgtgagtagcggtgatgtatgggaagtgctcattctgatggacttttgtagaggtggccaggtggtaaacctgatgaaccagcgcctgcaaacaggctttacagagaatgaagtgctccagatattttgtgatacctgtgaagctgttgcccgcctgcatcagtgcaaaactcctattatccaccgggacctgaaggttgaaaacatcctcttgcatgaccgaggccactatgtcctgtgtgactttggaagcgccaccaacaaattccagaatccacaaactgagggagtcaatgcagtagaagatgagattaagaaatacacaacgctgtcctatcgagcaccagaaatggtcaacctgtacagtggcaaaatcatcactacgaaggcagacatttgggctcttggatgtttgttgtataaattatgctacttcactttgccatttggggaaagtcaggtggcaatttgtgatggaaacttcacaattcctgataattctcgatattctcaagacatgcactgcctaattaggtatatgttggaaccagaccctgacaaaaggccggatatttaccaggtgtcctacttctcatttaagctactcaagaaagagtgcccaattccaaatgtacagaactctcccattcctgcaaagcttcctgaaccagtgaaagccagtgaggcagctgcaaaaaagacccagccaaaggccagactgacagatcccattcccaccacagagacttcaattgcaccccgccagaggcctaaagctgggcagactcagccgaacccaggaatccttcccatccagccagcgctgacaccccggaagagggccactgttcagcccccacctcaggctgcaggatccagcaatcagcctggccttttagccagtgttccccaaccaaaaccccaagccccacccagccagcctctgccgcaaactcaggccaagcagccacaggctcctcccactccacagcagacgccttctactcaggcccagggtctgcccgctcaggcccaggccacaccccagcaccagcagcaactcttcctcaagcagcaacagcagcagcaacagccaccgccagcacagcagcagccggcaggcacgttttaccagcagcagcaggcccagactcagcagtttcaggcagtacatccagcaacccagaaaccagcaattgctcagttccctgtggtgtcccaaggaggctctcaacagcagctaatgcagaatttctaccagcagcagcagcagcagcaacaacaacagcaacagcaacagctggccacagccctgcatcaacaacagctgatgactcagcaggctgccttgcagcaaaagcccactatggcagcaggacagcagccccagccacagccagctgcagccccacagccagcccctgcccaggagccagcgattcaagccccagtaagacaacagccaaaggttcagacaaccccacctcctgccgtccaggggcagaaagttggatctctcactccaccctcatcccccaaaacccaacgtgctgggcacaggcgtattctcagtgacgtaacccacagtgcagtctttggggtccctgccagcaaatcaacccagctgctccaggcagctgcagctgaggcagaattgcttgacccagggaggcagactttgcagtgagccaagattgtgtcattgcactccagcctgggcgagaagagcaaaactccgcctcaaaaaaaaaaaaaaaattgtcactggagacatgatgggtggagactctacataccttctttgaatacagaaacggatgcaaacacatgcaaattacttttttttttttttttggtgatgcatgaaaaaactttgacttgtggattacattaattattagtaacagttagattctgccgacttgtattacagtagggtcttatttccttaaag

SEQ ID NO: 108041 - DNA, 11345 bp, Homo sapiens
  Payload ID: 1227
  Gene Symbol: AAK1
  Gene Name: AP2 associated kinase 1
  Uniprot ID: Q2M2I8
  ENST ID: ENST00000409085
  CDS Start-End: 378-3263
gatcagctggcgggcgggcgggagccgagcgcggccccggctctcgctgcagcgccgcctcttctctgcgtcgcaggccggcccggcggccgtgacaatgtcgcggggctggtagcagggcgccggccgccgagccgtctcaagtttaaacttacacgaatcgctttctggaggaggaggggacccgctgcgcgattgacacgcatattcctataggcatcctccctcagcccccacccccacggccggattcgggtggctcctctccgaggtgaaatctgagaagaaatccttggatctcttttcttaaaaaaaaaaaaaaaaaaaaaaaatctagaaaccatcggtattttgctttgctgctccctattcgcaagatgaagaagtttttcgactcccggcgagagcagggcggctctggcctgggctccggctccagcggaggagggggcagcacctcgggcctgggcagtggctacatcggaagagtcttcggcatcgggcgacagcaggtcacagtggacgaggtgttggcggaaggtggatttgctattgtatttctggtgaggacaagcaatgggatgaaatgtgccttgaaacgcatgtttgtcaacaatgagcatgatctccaggtgtgcaagagagaaatccagataatgagggatctttcagggcacaagaatattgtgggttacattgattctagtatcaacaacgtgagtagcggtgatgtatgggaagtgctcattctgatggacttttgtagaggtggccaggtggtaaacctgatgaaccagcgcctgcaaacaggctttacagagaatgaagtgctccagatattttgtgatacctgtgaagctgttgcccgcctgcatcagtgcaaaactcctattatccaccgggacctgaaggttgaaaacatcctcttgcatgaccgaggccactatgtcctgtgtgactttggaagcgccaccaacaaattccagaatccacaaactgagggagtcaatgcagtagaagatgagattaagaaatacacaacgctgtcctatcgagcaccagaaatggtcaacctgtacagtggcaaaatcatcactacgaaggcagacatttgggctcttggatgtttgttgtataaattatgctacttcactttgccatttggggaaagtcaggtggcaatttgtgatggaaacttcacaattcctgataattctcgatattctcaagacatgcactgcctaattaggtatatgttggaaccagaccctgacaaaaggccggatatttaccaggtgtcctacttctcatttaagctactcaagaaagagtgcccaattccaaatgtacagaactctcccattcctgcaaagcttcctgaaccagtgaaagccagtgaggcagctgcaaaaaagacccagccaaaggccagactgacagatcccattcccaccacagagacttcaattgcaccccgccagaggcctaaagctgggcagactcagccgaacccaggaatccttcccatccagccagcgctgacaccccggaagagggccactgttcagcccccacctcaggctgcaggatccagcaatcagcctggccttttagccagtgttccccaaccaaaaccccaagccccacccagccagcctctgccgcaaactcaggccaagcagccacaggctcctcccactccacagcagacgccttctactcaggcccagggtctgcccgctcaggcccaggccacaccccagcaccagcagcaactcttcctcaagcagcaacagcagcagcaacagccaccgccagcacagcagcagccggcaggcacgttttaccagcagcagcaggcccagactcagcagtttcaggcagtacatccagcaacccagaaaccagcaattgctcagttccctgtggtgtcccaaggaggctctcaacagcagctaatgcagaatttctaccagcagcagcagcagcagcaacaacaacagcaacagcaacagctggccacagccctgcatcaacaacagctgatgactcagcaggctgccttgcagcaaaagcccactatggcagcaggacagcagccccagccacagccagctgcagccccacagccagcccctgcccaggagccagcgattcaagccccagtaagacaacagccaaaggttcagacaaccccacctcctgccgtccaggggcagaaagttggatctctcactccaccctcatcccccaaaacccaacgtgctgggcacaggcgtattctcagtgacgtaacccacagtgcagtctttggggtccctgccagcaaatcaacccagctgctccaggcagctgcagctgaggccagtctcaataagtccaagtctgcaaccaccactccatcaggctctcctcggacctctcaacaaaacgtttataatccttcagaagggtctacgtggaatccctttgatgacgataatttctccaaactcacagctgaagaactgctaaacaaggactttgccaagcttggggaaggcaaacatcccgagaagcttggaggctcagctgagagtttgatcccaggctttcaatcaacccaaggtgatgcttttgctacgacctcattttctgctggaactgctgaaaaaaggaagggtgggcagactgtggactctggcctcccgcttctaagcgtgtctgatcctttcattcctcttcaagtacctgatgcaccagaaaaactaattgagggactcaaatctcctgacacttctcttctgctccctgacctcttgcctatgacagatccttttggtagcacttctgatgctgtaattgaaaaagctgatgttgctgttgagagtctcataccaggactggagcccccagttccccagcgcctcccatctcagacggaatctgtgacctcgaatcgcacagattctctcaccggggaagattccctgcttgattgctctctgctctctaaccctactactgaccttctggaagagtttgcccccacagcaatctctgctccagtccataaagctgcagaagatagtaatctcatctcaggttttgatgtccctgagggctcggacaaggtggctgaagatgagtttgaccctattcctgtattgataaccaaaaacccacaaggtgggcactctagaaacagcagtgggagctctgagtccagtcttcccaacctagccaggtctttactgctggtggatcagctcatagacctgtagccgtgacccagtagcagatgcagttctgtaaccttcataccgtaaaatacattttcattacggagttatgaaaaaaatgatttttttaaaaaaatctgcaaataaggggccctccagcccttttctcctaccccttgccttctcctgtagaaatgataaggaaagaaaatcactttggccctccagatattccttggccagttcctccttgttagtttgctgtgttttctcattacccttcttcaatagcattatcttaaatcaagcactagatgccatgagcttcacctctgctggaatcaactccaccaaaagcttaactgtaactgaaactagtgaattgacacttttgtctcgttcttgctaggaatggcctcccagatcaattctcccaacccccgtctcctttggccagatgctgatgaatgtatttccctgtttttgctttttatcctgatgcattatcatgaggacatggctacttcagttggtcttaactctaggcagtagcctggagatgggtgtgtggtttaagaaagggtaaaacttactgactggtagtatatatttgagaagagaaattgagcccagctctagccaaccaactttgaccttgtttgatcatagacttagccaagggattttacaccccatgcaacctgcccagcattcgtccagctttctggcttccattgaaccgtgatttctcagatctggagacgtgactgcaagtatttgagatccttggatacaatgtgtacgttatataaatcccaagtattgccattccttttcatgttaactgttccaagtgggatctcagaattagaccaaaacaagacggtggtaatatgataccttttattagaagacttttcactggggcgggggtggggggaggatggggaggggaaggaattgtagcagaaacagatgtatttttcttgtgatttttattttgaatcaaatattgtaaattgtgtataaatgaagatgctgaatagttctgtttccacttggcatttcaagtctgatatcaggtgtctgtacagggttttgatttctttcccttgtataactacacaacaatcctacagtgtaacatatggaatcattttgaatagacttgtgtgctataagctttcagcaggtcctctgtctctagaataagcatgttgtttattttcagataatcagaaataagtgtgctgacaagctggacacaatctgggtgtgcccagcttacctttctttctgatgtttaaattgaaggctgcagccaatggaatatgttcagctggttttccttggcttcctagattaaaaaaaaataataaagcatagttctttattaactttaggatattgttcataaaataaataaaggcccctgcactaacatgacaacatgcctcatggtcaccctctctatatgtacttactcattaaagtgtattttatttccttatgtggaaagcacttttataaaatcacccttttgaaaagaagtgggcacagagaaccccactcctgttcttttcctctagtgccattgtccatcatcaaaagggaaactcttagttaatcagatctgtacaaataaaattccaagtccatttgcttgttttgctatctagtacttttgtttcttcttcctcacatttgcactttatgggggaaaaaagtttaacagcaacaacagcctataaaacactgcattctggagggcaaggtttgaccctaggaatgtgcgagtagcctttgaaaggcattggaggaaaagtctgaatcttccagccttccttctgtctttaaatacttcccgtgctggctgaaacaagatgagctaggtaaaggcctctagttgaataacagaccatttccaaaactgagagaggcacaagcttcctgccgaggattaaaaagcaaaagatatccacgaagggctctctgtggttggatagcagtgaaaataggacttggtttacccctttatggacaggaaaattgctgcaggtcagaattgtattctctttcctggacatagaaagaatgtataaattaatgaaggaaatgtttatttttaaataagaataatgtttgagttctatgttttcatatttgatttttttcgtatatacatgttagaaatataatgaaatatctagtttctcaatttaattgaaactatgaagagtacagtttagaaattaggtatctctaaattgttcttttcatatattacccataattacattgaaatatattatctagtcatttggctcagtaaagcttaatggaggcagttaatgaaaatgagcagactagaagccagagacggcagtagaagcctaagggagataatgacaagaaattgtcttgggcttatttagagtaaggcctcctcaaaggggagaactatttttctgttaaggaacacatatgagtgctttggtaaacggagccttccttggtttagagcatcatccctgagctgaaagagtttatttgagttgagcatagtgtcctggtacctgtggaatcatagcctgagctacaaagggacctttgagaccatcctctagtccaccatcctcttcattttacaggtgtgggacctgagctggattgaacagggtcgggggagaagaggcctgggcaggacaggccacctgggatctcatcctggcccttgccagccactggctgagtgaccttcagcaggcacttcacctctcagagttgctgttccttagagttatacgatgggtttggactagatggtctttaagattatagaagtatagggtcctaagtatatattattatattgagaagggctatgaaggatttatataatcctgatgttcttcagttatcttctgtagttcctgctattacggtagcagtgtttacattttaaagaattataatgggcttttactaacttgctctttcttgattatctgaatagaagcctaaatcataatcttagagattttcctttttaagtattacagaaacacatgcgtggacacacacctacctattctaataaaatggtatcagaagatttctttttaaatgtataatcaggcatctaccagtttaaaacgggcaaatactataagcatatgtttctgatttgcttttattccagctatgtaagaggagtaactatagcagaaaacatgacaaattgatttttccctttacaacattcaaatgagtcccaatgttttcaaaaatacatacctcagaggagataaggcttaagtggacacttctaagtatgattataattattataattaatgatttctttagcagacatatcagaattttgacatctaattaagtgttgttcccctcaatgtcatctagttttacttaagaagttaatacttattctaatgatgctgccatccttaaagttatttttgaaactcctctccttagaaataatatcaaggaaggtaataaggtataagaaaatcagctatattatttaattagtatcactttgagaaagcacctggaagtatattctttctttgtctactttttctactactcttggttctgagtaacatttagccatttccagaaagcaaattcaaccctgtaagatgaagagtggttactgttgaagacagtaaaaaggataatccacaaaaaattctcagagaggaccttataatagaaagtgaacatgattaagacttaatttctgtaattttctgaataaggaaacttctgtgattccttagtctttagaatggtttaaaacattgaaagatatgggtattaaaacacctctgaaagaagttgtcactttgttcagtgttatttgatattggacttcgctcttcctgaattagaattacacaacttggattgctaatacttgtggaaaaacaaacccaagaaacgaactactttctcaagatgtaatatttgttttattattaatacttttggttgttttgattacttatttcctactctcctgacagataattgatcaaccaatataaccttccccaggttaggaacagttctgccttcagcagtgctgtgggaatgaagggatctttggggctgacagcctatgatgtggagggatctgcactcagctaaataaatacatgctatagataccttgggccaaaataaagtctctcttgataaggtttttctgtgatttcccagagtccttaaccttctctgtctgcaagattatcaggctcccatagccactaactttgagctttgggatgaaaatgacaggattgcccagtgtgccgggttaagcaaattagaggctgcctggcagaacagaaaaactatcacatgaatatttagaatggaagctttcctgaaacactccagatactgcaaagctatctttattcctctctaaaggctataattttatcaacacaaagtcagccttttctttttccacattagtaatgtttctgaagttggatgtgcttagatttcttaaatcagaatgagtgctaggaaatctataacaagaaacctcttttgcttctcccagatttcctttcactaatacgggatagggaggctccttgggtaatgctaacctatgcaaagaagttaccaaatggtggtagttgctagaattaaagacacgttcttggttcacactttgatgtagtgacctgaatttactcttttcctgtgagtattctactctgccctattgcactctcctttgtcatgtggatgtgtgtttatcataggtctttaacgcgtccttcccaagaagacaaagcatacagttgtacatgaagatatcttatgcagtaaaaacgtgaaatttgaacattgctgcacaagtattgtataaaaaaaagtctgtaaagaactttcttatgtaaacatacaggggaataaagacttttatctgttcaaatgggagcatgatgtttagagatgtaaataacttaaaataagttgctcttttcctgagctgaaaacccacttttttgcagaaaggatttaatcacagtattgagtgacaataagtacctgggcacaagaaaagtatagctacacactgaggacatattaatgaatcatggctacctgagagagtaaaacccctgttttagtctcaaggagaataagacgcctgccagcctacactggatatgaccagactcagggttgtaaaatggagcgcaggtttgcagcttccctcctctaacttaatccctaatatacccaggccaacttaattaaacattttgtgttggcaagaataattttatccccagtgagaaaactcactcatttaattgcctcattggcctgagaggcacagctggccatttttggcttccatgaggtccctcatttcccagtcgtgggttttaatgcagctacctaatatatggtggaaccaaatgcttaattttgttatgtgagctagaaggtcatggtaattattagtttgatgtacgtctcttgatttccccagtttggttctaaaattttacgtttcaattgctgctgcatttccaagttcttgtgaagggatattttgctttctgtttactaactatatgtgagaaggcttcttctcaatgctccaagtcttcgttttctgtttttggcaagaatcatatctttgatactccctgtaaccgttctttcagtttttggtatgaggaaaagtaaacttctggtgttgtgtgatgtatttcattaaggaatatccagcctgacatttaagtcttcagattttaattctgtagggagcattctgatggccctcactatgtcaatcagatggagtttccaggggaaacccatcctaaatgattcagcactttgggttgctttggaagtgaatagggagctggtgaggatagttgccaagttgtcaggtattttaggaactccttctcttccctgaagcatgtgagttcttgctgaaatctacataatttggagcctcaaaatagactaatatggagttacccatattgaaagtgtcaacgtgcctaacctggcacacagtcctacatcagagcaagaaaaagaagtatgttttgacttcttgcttaattttatgtgtgaaaccaaaataaaaagaggcatgatccagtttgagggaattataacaaaaccctacgttaggctctatgataagtaagaccctgtgcagactatgaagccaggccctgggctttagcccctgaggtacaacaggcagtgtttactgagctctatggccacagggtatctgctatgacgtgccattggttaccaaaggaactgggtcaaggcatgtggttaggttagtataaatccttcaatgctagtaaagagactgcttcaaacacgttttcttgttgacacaatgctaccttcatataaaggaactgttcaccctgaaaacacattttccctgtaagaacacattcacatactcaaaaaaagacttttatctgccaacaagatttaatggttaccttctgtttctagtatatttggaatttatccttctctcgactaccttgtttctggtgctgccaccaccagaattccttaagggaatgtggaggtctgggcttcccccatattctctggcatttctttgcccttcagagtgccaggcctggagagttgcaaagtgtggttgctctccgcctcagccacactgtacctcctctaacaagaatagaaaggttaagggacttggccttctcaggacaaccctttaaatgtacttttccattcctacaaagcctgttgatgctgaaagaaagataggaaatagctcttgtccttgttttgaaggacaggagactaattttcccttcaaacttgatattctggtgtttttgtgactgtttttgtaaattattcaaagttgttggaattttaagtctgattttcccagtactcatcatgaaggtcatagaatatgctctgagttggaaggttttccaaatgggttctcgaccaaaaacccactttttaacaaataattttgatgggttagacatgttcttccatcctctccaaccctgaatatgggcacatacacacaccccttggtacttcctagttctcaaaatgtaatctagcacttcaggcatccaaagtgcccctggttcaatagatagctgcttttttgccagtctctgtgcacaaattgttttaactgaattcagtttaaatttccaaaaaacactgactctgttcaaactagtgttcattggattattgacctgtatgatgccagagttggtcactggcttgactaagttttccattttttttccctaagagatattttgctctcctgcagaacaagcttaataacatcaactttcaaggtagttttggaagatgagaaattgtgcttttgttttggcaactgaaaactttgtccaactgatactatgtgaggaaggtggttcaaggagttttagggccctcttgtccttctttaaggctctgcaaaccttattttggaaaacttatttttctcccttttatttgaatttcctcccagaaattatcatcttggtatcactgagacaaatctaatatcaatttacttgcctgagaaattaggattatgtctgtccacataaatcgcaaggaagaaggtattctgtttatttcctgtccactgactgatgctttcgtatcaccatgtagctgcacatactaaaattataatacaaggaaaaatttattcttttcaaaatcttattcttcaaatactattctgaaagccatttggcaccagtacagaatttaacttaacgccccaatctggaattcactgaacgcattcaaactgttagaaaggaaaataaaaatggaggacaaacacatttttgttctgtttctgaaaacaatatttaaggtcagaactgtttaaaaagaagcactgctaaaaagttataggattcagagaaacatagtatttttgtacagtatcttataaaatgttcagacctctctctacattctctttacaatgtaatgtctctaagtgactggtttcccaataaactgattttaatgcct

SEQ ID NO: 108042 - DNA, 1019 bp, Homo sapiens
  Payload ID: 1227
  Gene Symbol: AAK1
  Gene Name: AP2 associated kinase 1
  ENST ID: ENST00000623317
  CDS Start-End: 1-1019
acccagctgctccaggcagctgcagctgaggccagtctcaataagtccaagtctgcaaccaccactccatcaggctctcctcggacctctcaacaaaacgtttataatccttcagaagggtctacgtggaatccctttgatgacgataatttctccaaactcacagctgaagaactgctaaacaaggactttgccaagcttggggaaggcaaacatcccgagaagcttggaggctcagctgagagtttgatcccaggctttcaatcaacccaaggtgatgcttttgctacgacctcattttctgctggaactgatctccagagggagtccaatccctgtcctgtaataactgtagagcactttaaagaatcactgggtgttaaaggccttccgctgtatccagacccctccagagtacctggcacaaagactcagaacaacttagaatctgactacttggccagagatggcccttcaagcaacagctcattccacagcagcgaagaggaagggactgaccttgaaggagacatgctggactgcagtgggtctcggcctctccttatggagtctgaagaagaagatgagagctgcagaccccccccggggaagctgggaggagccgttccattcgctccaccagaagtctctcctgagcaagcaaagacagtgcaaggtggaagaaagaaccagtttcaagccttcacacagccagccactgatgggctcagtgagccagatgtttttgccatagctcccttcaggagctcaagggttccaaatgatgacatggacattttctccaaagccccatttgtctccaagagcagtatggctccttcccagccagaggagtcagacgtgtttttgagagctcctttcactaagaagaaaagcatggaggagttaacagttatccaatgcacctcccaggagctgcctgcacagaccggtctcctcagtcagacaggtgatgtccccctgcccgcgggccgtgagagagctgtgtacacctctgt

SEQ ID NO: 108043 - DNA, 8964 bp, Homo sapiens
  Payload ID: 1227
  Gene Symbol: AAK1
  Gene Name: AP2 associated kinase 1
  ENST ID: ENST00000606389
  CDS Start-End: 1-1536
acccagctgctccaggcagctgcagctgaggccagtctcaataagtccaagtctgcaaccaccactccatcaggctctcctcggacctctcaacaaaacgtttataatccttcagaagggtctacgtggaatccctttgatgacgataatttctccaaactcacagctgaagaactgctaaacaaggactttgccaagcttggggaaggcaaacatcccgagaagcttggaggctcagctgagagtttgatcccaggctttcaatcaacccaaggtgatgcttttgctacgacctcattttctgctggaactgctgaaaaaaggaagggtgggcagactgtggactctggcctcccgcttctaagcgtgtctgatcctttcattcctcttcaagtacctgatgcaccagatctccagagggagtccaatccctgtcctgtaataactgtagagcactttaaagaatcactgggtgttaaaggccttccgctgtatccagacccctccagagtacctggcacaaagactcagaacaacttagaatctgactacttggccagagatggcccttcaagcaacagctcattccacagcagcgaagaggaagggactgaccttgaaggagacatgctggactgcagtgggtctcggcctctccttatggagtctgaagaagaagatgagagctgcagaccccccccggggaagctgggaggagccgttccattcgctccaccagaagtctctcctgagcaagcaaagacagtgcaaggtggaagaaagaaccagtttcaagccttcacacagccagccactgatgggctcagtgagccagatgtttttgccatagctcccttcaggagctcaagggttccaaatgatgacatggacattttctccaaagccccatttgtctccaagagcagtatggctccttcccagccagaggagtcagacgtgtttttgagagctcctttcactaagaagaaaagcatggaggagttaacagttatccaatgcacctcccaggagctgcctgcacagaccggtctcctcagtcagacaggtgatgtccccctgcccgcgggccgtgagagagctgtgtacacctctgtccaagctcagtattccacagctggttttgtgcaacagtctaacctcctgtcccattctgtacaagcagcagaccatctggacagcatctctcccaggggatcctgcctggaatctgggggtcattctaatgacagaaacaaaggacctcagctccagaaagaagctgtctcaggccccatggctggcaaaccattccgcccccagtccttatccaagtattcccgtcactatagcccagaagacgagccaagtccagaagcccagcccattgctgcctacaaaattgtttcacaaaccaacaagcagtcgatagctgggtctgtttctatcacatccctttcctccaggactacggagctgccagctgctgatccatttgctctagcacccttcccttcaaaatcaggcaagaaaccctaggagcaaaacctgagcctcaagcctcttgtctctatcccaccctcaatacccgccatggcactcccagcttagccttctgaagaagaaatattatcagttcttatatttcaattccctgcgtcagagcagaatttcttgagtcaacaaactcagttgcagtgatatttagttgaagcccctttaagttatgttcatttttgtttgtttgtttgtttgtttatattgatttctggacttggaggcattttcatctccttcacagaggtcatccacttccaccaagaactctgctttccccccgccccacccacagaaactgtttaaatcctgaaatacttcttcaccccaatcccaaaggggccctattgttgctagttttaattcctgtagctcctgttctaagtcatgcccatcgaagaatcaagattagtccctccactaaatcaagatttagtactcttgaaaaggggagatgtctggaaagaagagcaagataaaaaccctgcacatcaacaggaagtataatcctgcagttactaataattcctgtagaagcagcagctctaggagtctccagatctgattctcagtctgtgtgcaagccaggctggctctcgtgcatgactgtctatgggtgtggaatgtacgtcagagcctgtgtagagatacaggcagatgggctaactcctcatgtctagtcatgctggcagggctttccccacatccatgcttttgaaattagtgtgagtgtacaggtttgtgtgtgcatgtatacgtgtgtgtgcacaggaagcatttccacttgagggaaatcctgccccatcatgcctacctccacaatgaaatcactcgttttttggtgtttgctcgcctaactgacttgaaccccattttatttatttagtttttttctcatggcaaagtagaatacgttggaaggtgtagggaaatcctgctggaactggtgtttcagagtaaatcttttttctctccggaatttcttgttttgctattaacaaattatatttacctgattatgaaaaattaattttccttatacattttccccttacaacactagaaaagagcaccttgttacagttccggcctctcagtatgtgggctaaatgccagcattagggaattcattaatcatgagactaggctacaaactaggcttgcttgttttggggtggttttgttgttgttgttgttgttgttgttgttgtttccaaatctctactgccttttgaggaaatgtaaatctgagacatggaaataagtgtttgggagaatggaaaagagctgaatcaggtaggcatgaaaacttttacattctctatcctctttagatgttgaaataggccagacaggttaactgatgttttttaaaattgtcttttatttctggaaagatctgacttattcctagcttttttcataccctttattattagtgccttaaaataaagctggccaggtgcagtgccacacacctgtaataccagcattttggaaggctgaggcaggaggatcagttgagcccaggaagttcaagaccaactctggcaacacagcgagaccctgtcccttcaaaaaataaataaaaaaataggctgggcatggtggctcacacctgtaatcccagcactttgggaggccaaggtgggcagatcacaaggtcaggagtttgagaccagcctggccaacatggtgaaaccccatctctactaaaaatacaaaaaattagctggacgtggtggtgcacacctgtagtcccagctactcaggaggctgaggcaggagaatcgcttgaacccgggaggcagaggttgcagtgagcagagattgcgccactgcactctggcctgggcgacagagcgagtctaaaaaataaaattaaataaaataatgaaaaaaattagctgggtatggtgacatatgcctgtagctactcaggaggctgagctggaaggatcacttgagcccaggagtttgaggctgcagtgagttgtgagtccagcctgggtgacagagtgagacactgtctccaaaaatataataataaaaataaagcctgtatctcaatgggaagatttctgctaaggcagttcaactcactggaaagaactgctgcattaggtttcaactttaatgctttctgttacttctagtaaaggttaagtgatttttccattagctgtagaagtttggagagctatttaccaagccagatcaatgatttaaaaattattggaaattcatctaagaatcaagtctgaatgcccaattctattgcggttgattaggtgtgatattctttaaagttcaggaatattggcagtaaaaaatgagcagctacttttcaatactttgtccttttttggtggtctctgcctatttcaaatgtcctgatcaaaagataaataattggcactgtgccaaggtttggttttccaactaaggtttcaactgtgccagaaacctatgtccttcactttggtggatgctaaatgttattctaagaatatgctttttcccaattctcctttctgatttttatgtattagtggatgcaaaattgtctttctagttgaatgaataatttcggctaatgcacgtggaactttgcaccccagattcttcccatggtcattatcaagtgaagccctcaaaaacatgagcgaagagcctagaaatactcagggagatttctcaccccaactcagaaattttttttttttttttcaagacggcgtcttgctctgtcgctcaggcgggagtgcagtggtgtgatctcggctcactgcaacctccattttccgagttcaagcgattctgcctcagcctcccgagtagctgggattataggcacacaccaccgcgcctggctaatttttgtattcttagtagagatggggtttcaccatgttggccaggttggtcttgaactcttgaccttgtgatccacccaccttggcttcccaaagtgctaggattacaggcgtgagccaccgcacctggcccagaaattctttttttttttttaaattattattatactttaagttttagggtacatgtgcacaatgtgcaggttagttacatatgtatacatgtgccatgctcgtgtgctgcacccactaactcgtcatttagcattaggtatatctcctaatgctatcccgcccccctccccccaccccacaacagtccccagagtgtgatgttccccttactgtgtccatgtgttctctttgttcaattcccacctatgagtgagaacatgcggtgtttggttcagaaattcttaaagtaagagatcattctaattcccctttccaaatattcaggattatctctgtaacagcccagcaaaatgtttttcctttggttatttgataattcccttctaatcaagtgactattttaattctcaaggtgcaaatcaggataaaatcatggtgattttactacatagttgaatacttcgtcaagtatgagcttgtatcctttttaaatttttcactggaggccaggcgcggtggctcacgcttgtaatcccagcactttgggaggccgaggtgggtggatcacttgagggtaggagtttgagaccagcctggccaacatggtgaaaccctgtctctaccaaaaatacaaaaagtagctgggcgtgatggcacgcacctgtagtcccagttactagggaggctgaggcagaattgcttgacccagggaggcagactttgcagtgagccaagattgtgtcattgcactccagcctgggcgagaagagcaaaactccgcctcaaaaaaaaaaaaaaaattgtcactggagacatgatgggtggagactctacataccttctttgaatacagaaacggatgcaaacacatgcaaattacttttttttttttttttggtgatgcatgaaaaaactttgacttgtggattacattaattattagtaacagttagattctgccgacttgtattacagtagggtcttatttccttaaagagaaaaaaaaatacagtcatgccccacttaatgatgagggagacattcagagaaatgcatccttaggtgattttgtcattgtgtgaacatcacagagtgtacttaacacaaacctagatggcacggcctactacctacctaggctatatggtccagcctgttgctcctgggctacaaacctgtacagcatgttactgtactgaatactgtaggcagttgtaacacaatggtaagtatttctgtatccaaacattttagacatagaaaaggtacagtaaaaatatggtataatcttatgggaccatcatggtatatgtggtccatcattgatggaatcgtttttatgcagcacatgactgtatataatcaacaaacaactctactttcttgttttcgtttgttgtgtttttgctttacacatttgatagggaacatagaagttgtgacctttcatttcagtggaaagcattgagccagaatatatttattcctaaaccatcgagccacacatgcattgatgaaccctgaaagaatccacagtaattgactaacaggcagtactgaatgaaagatgtcatatgtggtgaaaaatatttaatatatcagtttcttgggctcacatacagccctttagttccaagtgcttggttagattagaaaatgggatgaacacaatttgatgctgaagcagctgctgagcagcacccagggagtctaggtcatacgccctatattgttttcggcccacttattgttgagttgaaaagtctcatatttgtagactagagtgtatgtgtttagaggctcatgttgtatctgagttttctctggcaactaagatctctttctaaacgttctagaaagatactggtatcttactggcccattatttagtaagttttagaatacatgtacatcagtgttttcaactgcttggtggacatttcactgatgcataatcaaagtagcagattataatcatcagagtgatctgacaaggaaattctgtatttgcttccataaagaaaaataatcaaaacatatatcagatataatatatatgcagtatatcacataggaaattttattgtaggaaattagagaaggatgctactcaattcattctctagcaggaagaatacagcttaaaaatcacttgggtccctttaataaagaaaagtgtgattctgtgttgtgtgtttggaactgaaattggagaacacgtgccagtcgactgtgaaatggttgctggataaaaccacagatgtggttttatccgagaaatgtgggactgaaattattttgatgagaggtacataagagagctgcagaaaagactgtagcttctgaggaggcaggagtaccttgttaatatccaaaccacccctgagttctaatgttccaactccacctaaacgaggaattggaaactttaaatggaattatctaatttaaattcttagttttttctttgtctttctcagctgatacttgtagttttgttttgttttttaaccaccaagaacacttgcaagtttgttactgaaaacatcactaaaggaaaagaagagtttcaaaatgcttgaaaagtagtatgtggttgggaattgtttttgttcaagtccctggaagtcctcttggcttagctcccttgttcctgttcccacttcatttccttacttaacattcccctattttgagcatgtcaataagtgcatgatgaatggcacagttgaatgatcatgttaactttaattgcttcctttgttgctgtaaacagtttcttgttaagtttcagccaagtctgtgacaatctcaccaaataagaatgaaatgggcggggtgtggtggctcacacttggaatcccagcactctgggaggctgtgttgggccgatcgcttgagctcatgagttcaagaccaacctgggcaacatggcaaaaccttgtctctacaaaaaatacaaaaattagccaggcatggtggtgcacacctgtagtcccagctacttgggaggcttaggtgggaggatggcttgagcacgggaggcagaggttgcactaagccaagatcgtgtcactgcactccagcccaggcaatagagccagaccctgtctcaaaaaaacaaaacaaacaaaacatgaatgaatgaaatggctcaccttccctattatgaactagaagaaaggatgaaggaaggttggcaggaccccagccttactctgtagtgacaacccagaggtacttttcccggaatgcagggtcaagtttatgtgtgaagggactctagaatagctggtaaaaatggctacatggtaaccattcttgacttagtccagtattcccataatttgtaattccataaatttattctcagctgtcccccagccatttctaatagaaggatgtgtaccccagttttgacaatgttcttgaaatcaagttagtgttacctgcattgcattataatggaactatatgtacatgttaaagggatccgtttgattcctttcggcaaggaattgcaaaaatagtttttaccaataccagttaaaataggataggttagactttgggggcagggtgagacagtgcagccttttcactctgaaatggcaaatcagctgtactctttgagtctaccagagattcctatttgagtgtgaatggggtgtgtgtgtgtgtgtgtgtgctcattcatcttcatgctttcttccatggtgttaattcaagctctcctaataaaggtatccaaagagtactgagaagtgaccataggtatttggcatgagtaaatgtagttccttttgccaaaaaaactctcaaaagttacaactggagttcttcgcgataaaaggttggggaaatcagccatggctttagccttgttcccaagtacacatcttcttatccacaaggatgaaactctgtagggctcaccctgagggctcatgtgtggcattgagagggtagcagtgaccagaacaccacaaggcccacaagatgttttgaatgagggaacatttaatgtcatttgttaggagatagaaaccaaataataaaggacaaggaccacgctcattccgtggagaagaggtgaactccctctgctgactatttggaatggactgaatgaggaggtctctccagccagaaggagtattgaggtcatcaggcctcagaaaacaatgtacacataatctcgggctgtgaacaagagaaaggagggggggaaacatgaaagtcaatcttaacaatttttgcaatacctcttatttgcagaccattggatttatgttattgcactctcggtgtgatttatcgtatgtatctgataggttttatgaattgttttgagttgtaaactcctataccctttattaaaatggacctaattaagtga

SEQ ID NO: 108044 - DNA, 728 bp, Homo sapiens
  Payload ID: 1227
  Gene Symbol: AAK1
  Gene Name: AP2 associated kinase 1
  ENST ID: ENST00000624900
  CDS Start-End: 1-300
gctgcagctgaggccagtctcaataagtccaagtctgcaaccaccactccatcaggctctcctcggacctctcaacaaaacgtttataatccttcagaagggtctacgtggaatccctttgatgacgataatttctccaaactcacagctgaagaactgctaaacaaggactttgccaagcttggggaaggcaaacatcccgagaagcttggaggctcagctgagagtttgatcccaggctttcaatcaacccaaggtgatgcttttgctacgacctcattttctgctggaactgtgtaaatgtttcttttctgtgacaccttcattctttacaaatgaaagaaaattacatctagatcccaggaactcatttgctctcgtttgtacaaagggcaagatgacatcattttctataaattttctaactgaactcagactgtttacagattttaaaccttctgattgatcaaaggagaaactaagcaggaaatgtcataatgggttcgggaggatggcacggggctatattaaacatttgtatggtaaaagctgcaaaaatgacagactgtgtctatacattggaggagaaacaggcaaacatttaaaacttcacatggtgcctctttattttcatatgttttcctgtgtataatttacacatgttcatttataaaaatgtggagaaatgaataaggcccaaagtaaagaaaataaaatcttataacccc

SEQ ID NO: 108045 - DNA, 1366 bp, Homo sapiens
  Payload ID: 1228
  Gene Symbol: APIP
  Gene Name: APAF1 interacting protein
  Uniprot ID: Q96GX9
  ENST ID: ENST00000395787
  CDS Start-End: 216-944
acgttggccttgcctcccgggaagtcaggtgcgccgctggatatctcagccggcggggccttaccagaccccggcccccgccccgttcgccccgcccccgggctgccctcagcgccgcctgattgcatttgcggcctcgctgccgtatcccaggctaagcgccgcgcgcaaagccgtgcggagattggaggccgcgcgggtccctggtctgggccatgtctggctgtgatgctcgggagggagactgttgttcccggagatgcggcgcgcaggacaaggagcatccaagatacctgatcccagaactttgcaaacagttttaccatttaggctgggtcactgggactggaggaggaattagcttgaagcatggcgatgaaatctacattgctccttcaggagtgcaaaaggaacgaattcagcctgaagacatgtttgtttgtgatataaatgaaaaggacataagtggaccttcgccatcgaagaagctaaaaaaaagccagtgtactcctcttttcatgaatgcttacacaatgagaggagcaggtgcagtgattcatacccactctaaagctgctgtgatggccacacttctctttccaggacgggagtttaaaattacacatcaagagatgataaaaggaataaagaaatgtacttccggagggtattatagatatgatgatatgttagtggtacccattattgagaatacacctgaggagaaagacctcaaagatagaatggctcatgcaatgaatgaatacccagactcctgtgcagtactggtcagacgtcatggagtatatgtgtggggggaaacatgggagaaggccaaaaccatgtgtgagtgttatgactatttatttgatattgccgtatcaatgaagaaagtaggacttgatccttcacagctcccagttggagaaaatggaattgtctaagccaaaagaaagtctaattatatacagagataaagctaaacgtaattattatttaaatgaaagctatttttttaaatgaattgaaatttttcatgatgctactaatttgccactaaatactgcaaatggtcaccctgaatctcttctgacattggatgttatttgcttatattcttataattttaaatgagggcacagtgaaatgaaaattttatactctatgtttctgtttatttttaaatccttaacagcaaaatatttgcctttaatttcttttttatatatactctcagagaattcctcttaatttttaaagatgctggtgataataaaattcattagaaaatttcctcattgtggaatgagcattctcttgttttaatgttggtgtcagaaaataaatatgaaacattaagtccaaa

SEQ ID NO: 108046 - DNA, 4583 bp, Homo sapiens
  Payload ID: 1228
  Gene Symbol: APIP
  Gene Name: APAF1 interacting protein
  ENST ID: ENST00000532428
  CDS Start-End: 173-760
atgccaccagcactacaaaggcattgatgtagtttggctttctttctatgcagccaaaatccataattaaatcaagcaactggctgtattgcttgatttataaagaacatgcatgattggactgcaaacttttctttgtgcaaaagcaggaaataaataaataccaatttgtatgttttgtgttgccagcgatgaaatctacattgctccttcaggagtgcaaaaggaacgaattcagcctgaagacatgtttgtttgtgatataaatgaaaaggacataagtggaccttcgccatcgaagaagctaaaaaaaagccagtgtactcctcttttcatgaatgcttacacaatgagaggagcaggtgcagtgattcatacccactctaaagctgctgtgatggccacacttctctttccaggacgggagtttaaaattacacatcaagagatgataaaaggaataaagaaatgtacttccggagggtattatagatatgatgatatgttagtggtacccattattgagaatacacctgaggagaaagacctcaaagatagaatggctcatgcaatgaatgaatacccagactcctgtgcagtactggtcagacgtcatggagtatatgtgtggggggaaacatgggagaaggccaaaaccatgtgtgagtgttatgactatttatttgatattgccgtatcaatgaagaaagtaggacttgatccttcacagctcccagttggagaaaatggaattgtctaagccaaaagaaagtctaattatatacagagataaagctaaacgtccctcccacaacacggaattatgggagctacaagatgagatttgagtggggacacagagccaaaccatatcatccagcgtccaggaagattcaggtcactcagacttgaaggatggggtcagtaaaactctgtggaaacaaaaaggtgtagcagaaagaccactagatgggtgtcaggaaactttgactctaaccccagcaaggccactcgcattttctctgtgattttgtatctcaagtattttaaccatctcttgaaatgttcttgggcctcagcctaggcactatgcctatagaaactaatggataaagcaaccctgcttctttaaaggcctggaggcaagtgcaatcacgtttaatgctgaatatggcaaacttattttccctgttgaagccaagtatctgtgtggaggattagttggatgcatgcttccaaaagaaaccagctgttcttgtaagtaaaggcctgctgaaagaagaaaccaacctatttagcttggagaatatgggggcacagattgccttttcccatcacctgccaggaacaccatgcacttatttcatctcaatgcaagatacaagatctaggatccaaaacactattttctatcacaaagccagttctcacacctttttcagatcaaatgttccagcctcttcagaaaagcttagaaaatagtctttctttcactccccaccagtcttcattgtgacatatgttgcatatcataacccttggtactggatgaaagctcccaatctgaatcaagaacaggtaaaggtaaacaaaaaattgaggctaaaagaatcacttaacctgaaccacatggtaggaaaagcatgctagaatggaatatccaaccggctatggacattgtttttggcagacaaatgaatggccccattataaaggcatcagggttggtgtattgtccaactctagggggcaacattgaattgtatcctatcgttatggtgctccctggagttctgtaaacacataggtctgagagtgattatcacatgcctatcttatccagggaaataaggagcaaaatggcccagaagaagagaaagaacattctaccaagtcacacgtaacctaccaacagtccacaactgcaattgatttcatgcccaactcttgctacacctaagatttgcataacttagtactggggaggttttgggggaaaccagaattccacctctgaagccaagccaaatcttcagtgactggagactgggaaagctgcctttttcaaatttagtttgtctttcccaatagcacttaaaggacaaacgtgttctgttctgcatctttggaactcactattcatggttaagtcattgcctttgagactttataagggctattggcagtttagctttacagtaaatgtagtgtaatttacacaataaaatgcagtcacttgtttaattacttacctcacctattgggactttttctcatctctcaggtcacagtttttacttagggccataacaatggggttgacattggtatgaaacacttttgaaccccccagaatgaagacttcttaactgcacctgaagagtgactcgccaaaaacaatgaaaggtgtttcacaatctgagtgggtgaacttcatctaactgatatgtaaataaaggagtggcgggttaacagctcaatacgcagaagcggcctctcaagaaagcttggctactagaaatgaagggcaacttcactcaaatcctgtgacactgtggaatttaggcacagcaagatgcttgggcctggaccaatggaaggacaaaaggttcctttctctctctgcagttcatccatgtccaaagagagagaacaccaggaggtgggacttctgagttgattctaaatcttcctgtgtaattcaaggcgtgtgtgtgtatctgtgtgtgtgttttctgtttaaaaccaccagagaaatatagatagtccctgagaagaaaagattaatatggcaccttggccttgcccttctggctcacatgagggggatagcccagtagaccagcttggcccaagggagcagaaccgccccagatccaaccacacaaagaaaacagagaccttgaaagaggaaaaataatatttgtggctattaatgaaatcacaatcacaataataattctaatgtcagtagctagcacttgcccacacttaaacatggaaactcagattctggcaaattctgcccactttccaaggctttctgggagtcccaggtgatgttttataggcatttgcacacagccctgttgttttgcactccagcctctgtgttgaagtctgatacctgagagtccctctatgtccttcataataattctggtatcagccagagctgtgtctcttggtagtctcagagccagtaactcaaaaggagccaaactgacatttatcttcctacctgggcatcaaagcattccagatctcatggggtctgctgtgaaaacagctgcttctgcatctctttctctctgggagggtttagacaggagtcaaggagccagactcatccatttgggaattgatatctgcgacagatgattcttttcttttcacctcatccctttccttaccatttactctccctccacccattctgtttcactatatcaggtaaaccccaataatctacactttaatgagcccccttcctggggggagcacagataccacctctgagaagcaaagatgtattcattaaaggctgtatggcctcgtggctgaagctgtgaagtcagacctggatctcaatacaggctctactccttcatactatctccttgagcaagtgacataatctctttgtagcctggtctccttgattaccaaatgaagacagtaacagacttagctcataggattgtggttagaattctacaagatcattcattgattacttccttgtataaataccttattgaggatctgtaatgttccaagtactattctaggtgttagggatacaacatagaacaaaacatacaaaatatctgtcttcatggagcttaagtttcagttagggagatagacaataagcaggaatacaatagaataaaatgttgggcggtgatacagtctataaagcataaatctgattagggatggagagggatggcagggaaagtatttgagaaaagatagtaagatagttaggaaagccctctttgacaaggtggcatatgagcaaagatctgaatgaaaaataattcagcactttgggaggccgaggcgggtggatcatgaggtcaggagttcaagaccagcctgaccaacatggtgaaacccgtctctactgaaaatacaaaaattagccaggcgtggtggtgtgcgcctgtaatcccagctactcatgaggctaagccaggagaatcgcttgaacccaggagtcagaggttgcagtgagccgagatcacgccattgcactccagcctgggtgacaaagcgagactccatctcaaaaaaaaaaaaagaaaaggaaagaaaaagaaaaatacttagcgtatttcaggcatagaatgtttaataaatgggacaatattactttccaggttctcatcttcaagatgctcatagcctatgtacctggaaatgtggcagttgcttgactttattttaaaaaatacatccctaggtcaggtaccgtggctcatgcttgtaattccaacagtttgggaggctgaagtgggaggatcacttgaggccaggagtttgagatcagcctgtctcaaaaaaaaaaaaaaaaa

SEQ ID NO: 108047 - DNA, 8443 bp, Homo sapiens
  Payload ID: 1229
  Gene Symbol: AMER1
  Gene Name: APC membrane recruitment protein 1
  Uniprot ID: Q5JTC6
  ENST ID: ENST00000330258
  CDS Start-End: 274-3681
atgggggagctacccaaagcctggggaaggggagtcagtgctggaggtgactggagccgcggcgacggcggcagcagctgcggtggcggcgctctcagccgtggcagccgaggctgcagcccggcccagggcggctcagcggacaataaccgggctaggaacctgaccgggctggaccccactgtgatgcttcctgactgataatgttataacagtgcctggaagcctgaggctgcatttccagctggacgtacctcagttgtccccatcatcatggagacccaaaaggatgaagctgctcaggccaagggagctgcagcctctgggagtacccgtgaacaaacagcagaaaaaggagccaagaacaaggcagctgaggcgacagaaggaccaacctcagagccatcctcatccggcccaggtaggctgaagaaaactgccatgaaactctttggtggcaagaagggtatctgtactctgcctagtttctttggagggggacggagcaaaggttctgggaaaggcagctccaagaaaggtctcagcaagagcaagacccacgatggcctgagtgaagcagcccatggccctgaagatgttgtcagtgaaggaactggcttctccctgcctttgcctgagttaccctgccaatttcccagctctcagagtgcccatggggctttggagacaggctccagatgtaagacatctgtggctggagccacagagaaagctgtggctgagaagtttccctctatgcccaagccaaagaaaggcctaaaaggcttttttagcagtatccgccgtcaccggaagagcaaggtcactggggctgagcaaagtgagccaggggccaaggggcctgagagggtcagagccaggcctcatgagcacgtgagctcagcccctcaggtgccctgctttgaggagaccttccaagcccctagaaaggaaaatgctaacccccaagatgcccctgggccaaaagtttctccaacaccagaaccttctccaccagctactgagaaaatggcctgtaaagatccagaaaaacccatggaggcctgtgcctcagcacatgtgcaacccaagcctgcccctgaagccagtagcctagaggagccccatagcccagaaacaggggagaaggtagtagcaggagaggtaaacccacccaatggccctgtgggggacccactgagcctcttgtttggggatgtgacatccctgaaaagctttgattcattgacaggttgtggtgacataatagcagaacaggacatggacagtatgacagacagcatggcctctgggggccagagagcaaaccgagatgggaccaagcgaagttcctgcctggtgacctaccaaggaggtggggaggagatggccttgccagatgatgatgacgaggaggaagaagaggaagaagaggtggaattagaggaggaagaagaggaggttaaggaggaggaagaagatgatgacttagaatatctgtgggaaactgcccaaatgtatccacggcccaatatgaacctgggctaccatcccaccacatccccaggccaccacggctacatgctccttgacccagttaggtcttatcctggcctagcccctggggaacttttgactcctcagagtgaccagcaagaatccgcccccaatagtgatgaaggttattatgactccaccacacctggatttgaggatgattcaggtgaggccctggggcttgtccgcagggattgtctaccccgagacagctacagtggagatgccctatatgagttctatgagccagatgacagccttgagaactctccacctggagatgactgcctttatgacctccatggtcgaagctctgagatgtttgaccccttcttaaactttgagccctttttgtcctcccggccacctggggcaatggagacagaggaagaacggctagtgaccatccagaaacagttgttgtattgggagcttcggcgggagcagcttgaggcccaggaggcacgtgcccgagaagctcatgccagggaggcccacgccagggaggcctatactcgagaggcttatggcagggaagcctatgccagggaggcccacacttgggaagctcatggcagggaggccagaacccgagaagcccaggcccgagaggttcgttgtagagagactcaagtccgagagacccaggcccggcaggagaagcccgtcttagagtatcagatgaggcccttaggcccatcagtgatgggcctggcagcaggggtatcagggacctctcagatttcccaccggggaattacctcagctttccccaccactgcaagcagcgagccagactggagggacttccgtcctctggagaagcgttatgaaggaacctgctccaagaaagatcaaagtacctgcctgatgcagctcttccagagtgatgccatgtttgagccagacatgcaagaagcaaattttggaggatctcccaggagggcctaccctacttattcaccccctgaagatccagaggaagaggaggttgagaaggaagggaatgccactgtgagtttctcacaggccctggtagagttcaccagcaatgggaacctcttttccagcatgtcctgcagctctgactctgactcatctttcactcaaaacctccctgagctgcctcccatggtgacctttgacatcgctgatgtggaacgggatggggaaggcaagtgtgaagagaatcctgagttccacaatgatgaagatcttgcagcctccttggaagcctttgagctgggctactatcacaaacatgccttcaacaactaccatagtcgattctaccaaggcctgccctggggtgtgagcagcctccctcgatacttgggactgcctggcctgcaccctcgacctccacctgctgctatggccctcaacaggagaagccgctctctcgacactgcagagaccctggagatggagctctccaattcccacttggtccagggctacctcgagtctgatgagctgcaggcccagcaggaagattcagatgaggaggacgaagaggaggaagaaggagaatggagccgagacagtcccctttccctctatactgaacccccaggggcctatgattggcctgcttgggctccctgtcctcttccagtggggccaggtcctgcctggataagccccaaccagttggacaggccttccagccagtctccatataggcaggcaacctgttgcatacctcctatgaccatgtcaatatcactatcagtgccagagtcaagggcacctggggaatctgggcctcaactagctcgtccctcacacctacacctgcccatgggcccttgctataacctccagccacaggcctcccagagcatgagggccaggcctcgagatgtgctgctgcctgttgatgagcccagttgctcttccagttctggaggcttcagccccagccctctaccacaggccaagcctgtgggcatcacccatggcattcctcagctgcccagggtccggcctgagcacccccagcctcagcccactcactatgggccttccagccttgacctgtcaaaggagagggctgagcaaggtgcctctcttgccaccagctactcctccactgccatgaatggaaacctagccaagtagttattatcaattctggagtagggacacggggcctgagcatgtgaatggggatcaggggttgggcagaagggtgggggggtgggggttgttgtttaacttgaaaaccctttgggccaaggaaaactcctgtgagttttcaccttggttttcccacttgcctcttctgccatctatggccacgttcaactcaagtgcatctgcccagggaggctgctgctgctactgcactccagtttttgctttcgaggtttcttcttgtgacccacgctgggtttgggatgctgtaattttgtgcctattccagttgccaagttagtgattatatatatatatatatatatatatatatatatatatatatatacacacacacacacacacacacacacacacatacatacacacacacacacaaacacacatgcacacacatatatagcatgcatccttgacacaggctaaacctttagtgccccctgcccctttcccccaatgaatgatgaaccactgattagcagccaagtctgcattgcctcccgcttggggaagtggggcttatttgctattagcaatgtgaaattatggtacagatcctccccacccctattccttttggcctggcatagctgccatcattatatcagatgactataagctattcatcccagctagctgtccttagagaggatcaagtagcgtgtgtctcacagcctatcgctgtggactttggcatcatgaccagatgggggccttttaactgtcctgccatagcttgggttaaagacaaaaatgctaatccccttgatggagtgataaaattcatccatttgcaaacagaagacaaaacaaggttctgttgtggacactgccatagagtgttgagctccggaatgataggattttttttccttcttttaagcttgtgactacctgagttgcagatgcttttgaatttttgttcttttttcctctaaaggaaattttcataatctcatcacaaggaacacggtcttttaattgagataagggaagagaagcaacctaaattaggcttgactataggggctggggtttttgtggagtgtaggggaaagatagaaaatgagggtccatttatcacagccagcaagaaaggggatttcagaccatgcagagcttaaggtatctcagtttcttaaaagggaaaactcccttctcaagcctcccaacacaaaatgttccttaagccttgcccatcccatcatttggactctgtaataaggccccaggtttgcactcccaagacaggataccaaaggcatctcagctgctgttctgggccctttaaagagcttttatcttccaattagccgagtccttagcatcatcaaatgacagggcttcttggcagttgcagccctttatggaatgaatggcaccctcccttctcctgcatccatgcagttttcatgttaaactaggttggaaatactggtggggaagagcttgctgtcaggaagacattggaacaggctaatcttgccaagctcaacctctcattaatcacctgtaggagagggttccttttacatgtctttattggaaatggcatatggaacattttttgcttggctgtgttcactcaaattatgattattgcaccctcgccctcacatcccaccatctccatgcctgttgagagaagaagtcaacagggttcttgccattcctgagatatggcaatttagcttgggaacagatgctgtttgccccctaagtcaaggtgactttgtgggcaaactgtttcttggccaggggatgtgtccatgctggtctttgtcaccatttctcagattggggttggcccagtgcccttactcacaaatagcagacctggctggtagaagctgcacccctggaagcaccacatgaatttgcatggcactaacaccaccactcaagggacccagaccagctcttcaggctgactttggctacagatacattgtgaagaaatgtatctgttgtggagctggagaatgaaagagggtgaggaaggccctccttaccccaagcacagcattccaagagagaagtgcccaaattccaactttctggcctcttaccaaagctgctctgggatggtggggctgaaattggcctggctatttggcaggaagtaaacactcaccaaatgcctttacaacagggaagaacccacctcttgcctcttctttcagggcagcttgagctcctgtctacatgtggactgtgccagccacagcaggcggtagagccatcaccagcctccagaccctgctggagaagggccaccagcctatctgggaagagaaaaaggaggtggccaacctttggctaagggctgagagctgccctcaggatcaggaaggcagcatgaggcattgtctctgaggggcactggcatagccctgacacactttgttgggctttggaaggtcacacaccacagagtagggcctggggctgagtgagagttcatggtttggacagccttgctgcctgcaagtcccttcactgccctagccagcccaggaataggatccttaccacctgaagtggggcagccaggatatgtggctgcagaagcaggttcctttgaatttctagagctaagcagtttgtggctgaaacccaatggcagcctaggggaggaaggaagacctgtctggggacccatggtgttgacagcacagggtgacattgggagagccagccaagcttcaggcctgtttccaaacacagactagtgctggcttgggtggcagcaaatacaccccagaccactaaaactgttgatatcatgtccacacctccaagagtactactagatgaacaacatgtctccattgcaaggtcctggaataatgcttttggatgtgattttaagggaaaatgggacttagtggaagtagctgccttcatcttattacccaataggcctagtgccagacagctgtgatcctgagaattcccagatgagactggtccttggaggaccagtgaatgtggatagagaaggccacctagtaggcctctcccagggccaggatgccagtttcttggtgctttagagtctccaaggaagcactgccttggggcccagttcaagccagccctacctatctggcctcagcttgggtaccaggccacaagactgcccggataatgggttcagtaaacaccagtctctctccctccttagtcctatgccaagaagggaagtagcttcacacactcaggaggctgggtgtgtacccttcatcctgctgccagcagctttccttacctgtgccagtgccaccaccccacctgccctcagcccccaggcccagttgctagagggaggcatggggtttagcagggagacttcaagtttacccatgtgtatgttgcattcaagttgtttttaatatatatatatatatatatcaaaagtcaattatctatttttatattgtttgcattttatattcatggaaaacaatgtttatcaattgttcttttctgatttatttttaagcggtgctgtttacagttttaaacaaaacaaagatgacacaaaaattgctgctgcttgtgcagagggctggcatctcaactgcctagggccctccctctttcccctctccctaccttagctgtaccacactgtccgttccctccccccatgatagggacagcagaagatgcccaggtactgaagacaaacgccaagtgactcaggcgtgtgggacctggtagacagcttgtcattttctggctttattttatgtttttctttcttttgaacccttcttccccatgtctagaccctctgagagtactcatgtgtcttattttttttcctcgttatgttttgtgctttagttttgaaatcagagtgcccatgttgtgctatttgtcttgttgagtttctccaaaggagcattttgggaacattctccacccaatggggaaggaagggggtttcaaccatgtcccctttccccaagaagctgtgggagacagatgacaatgatgcttgcactatcaggaatttaccatctcgttgaggaaacccttgcataggacttcctaggagctcagttgattgtgacattttcccagaagagaggctttggggaactccttcacccctcttgctgctttgggggaatctcctcccctaccaccattccccctcccctgccctgctccagctcacacgtggatggtactttggggaacagtgactttcagggtgatggcttgctggcctgatccctgactttccaatcctatagtcactccaaagaagaaaatccacatggtatgtatatgtgtgagggttgggtctattgagaggtgggactttaattattgttattattattggtgcttatttttcctgctgtatatgggggtgggggtgggggggaataaaacaggaatgtatatttaggtcatgttaaataaaatggctggaggaaggagggaagaaattaggaactgcagtacatcatcaccccaggtgtaagagttatttctctcccagtgcagaaaggggagtgtggcccctggctgtacctgagcttcctcttctccatccctgagacatcacagaatcacccgggttctgacctctccacttctagctctcactgacatctggatatcttgatgcactgcctgtttgtaacaacatatacttctttgctgaatgctaataaacttctgggttcaagagggaacccctcagtca

SEQ ID NO: 108048 - DNA, 3688 bp, Homo sapiens
  Payload ID: 1229
  Gene Symbol: AMER1
  Gene Name: APC membrane recruitment protein 1
  Uniprot ID: Q5JTC6
  ENST ID: ENST00000374869
  CDS Start-End: 274-2688
atgggggagctacccaaagcctggggaaggggagtcagtgctggaggtgactggagccgcggcgacggcggcagcagctgcggtggcggcgctctcagccgtggcagccgaggctgcagcccggcccagggcggctcagcggacaataaccgggctaggaacctgaccgggctggaccccactgtgatgcttcctgactgataatgttataacagtgcctggaagcctgaggctgcatttccagctggacgtacctcagttgtccccatcatcatggagacccaaaaggatgaagctgctcaggccaagggagctgcagcctctgggagtacccgtgaacaaacagcagaaaaaggagccaagaacaaggcagctgaggcgacagaaggaccaacctcagagccatcctcatccggcccaggtaggctgaagaaaactgccatgaaactctttggtggcaagaagggtatctgtactctgcctagtttctttggagggggacggagcaaaggttctgggaaaggcagctccaagaaaggtctcagcaagagcaagacccacgatggcctgagtgaagcagcccatggccctgaagatgttgtcagtgaaggaactggcttctccctgcctttgcctgagttaccctgccaatttcccagctctcagagtgcccatggggctttggagacaggctccagatgtaagacatctgtggctggagccacagagaaagctgtggctgagaagtttccctctatgcccaagccaaagaaaggcctaaaaggcttttttagcagtatccgccgtcaccggaagagcaaggtcactggggctgagcaaagtgagccaggggccaaggggcctgagagggtcagagccaggcctcatgagcacgtgagctcagcccctcaggtgccctgctttgaggagaccttccaagcccctagaaaggaaaatgctaacccccaagatgcccctgggccaaaagtttctccaacaccagaaccttctccaccagctactgagaaaatggcctgtaaagatccagaaaaacccatggaggcctgtgcctcagcacatgtgcaacccaagcctgcccctgaagccagtagcctagaggagccccatagcccagaaacaggggagaaggtagtagcaggagaggtaaacccacccaatggccctgtgggggacccactgagcctcttgtttggggatgtgacatccctgaaaagctttgattcattgacaggttgtggtgacataatagcagaacaggacatggacagtatgacagacagcatggcctctgggggccagagagcaaaccgagatgggaccaagcgaagttcctgcctggtgacctaccaaggaggtggggaggagatggccttgccagatgatgatgacgaggaggaagaagaggaagaagaggtggaattagaggaggaagaagaggaggttaaggaggaggaagaagatgatgacttagaatatctgtgggaaactgcccaaatgtatccacggcccaatatgaacctgggctaccatcccaccacatccccaggccaccacggctacatgctccttgacccagttaggtcttatcctggcctagcccctggggaacttttgactcctcagagtgaccagcaagaatccgcccccaatagtgatgaaggttattatgactccaccacacctggatttgaggatgattcaggtgaggccctggggcttgtccgcagggattgtctaccccgagacagctacagtggagatgccctatatgagttctatgagccagatgacagccttgagaactctccacctggagatgactgcctttatgacctccatggtcgaagctctgagatgtttgaccccttcttaaactttgagccctttttgtcctcccggccacctggggcaatggagacagaggaagaacggctagtgaccatccagaaacagttgttgtattgggagcttcggcgggagcagcttgaggcccaggaggcacgtgcccgagaagctcatgccagggaggcccacgccagggaggcctatactcgagaggcttatggcagggaagcctatgccagggaggcccacacttgggaagctcatggcagggaggccagaacccgagaagcccaggcccgagaggttcgttgtagagagactcaagtccgagagacccaggcccggcaggagaagcccgtcttagagtatcagatgaggcccttaggcccatcagtgatgggcctggcagcaggggtatcagggacctctcagatttcccaccggggaattacctcagctttccccaccactgcaagcagcgagccagactggagggacttccgtcctctggagaagcgttatgaaggaacctgctccaagaaagatcaaagtacctgcctgatgcagctcttccagagtgatgccatgtttgagccagacatgcaagaagcaaattttggaggatctcccaggagggcctaccctacttattcaccccctgaagatccagaggaagaggaggttgagaaggaagggaatgccactgtgagtttctcacaggccctggtagagttcaccagcaatgggaacctcttttccagcataagatgcccaggtactgaagacaaacgccaagtgactcaggcgtgtgggacctggtagacagcttgtcattttctggctttattttatgtttttctttcttttgaacccttcttccccatgtctagaccctctgagagtactcatgtgtcttattttttttcctcgttatgttttgtgctttagttttgaaatcagagtgcccatgttgtgctatttgtcttgttgagtttctccaaaggagcattttgggaacattctccacccaatggggaaggaagggggtttcaaccatgtcccctttccccaagaagctgtgggagacagatgacaatgatgcttgcactatcaggaatttaccatctcgttgaggaaacccttgcataggacttcctaggagctcagttgattgtgacattttcccagaagagaggctttggggaactccttcacccctcttgctgctttgggggaatctcctcccctaccaccattccccctcccctgccctgctccagctcacacgtggatggtactttggggaacagtgactttcagggtgatggcttgctggcctgatccctgactttccaatcctatagtcactccaaagaagaaaatccacatggtatgtatatgtgtgagggttgggtctattgagaggtgggactttaattattgttattattattggtgcttatttttcctgctgtatatgggggtgggggtgggggggaataaaacaggaatgtatatttaggtcatgttaaataaaatggctggaggaaggagggaagaaattaggaactgcagtacatcatcaccccaggtgtaagagttatttctctcccagtgcagaaaggggagtgtggcccctggctgtacctgagcttcctcttctccatccctgagacatcacagaatcacccgggttctgacctctccacttctagctctcactgacatctggatatcttgatgcactgcctgtttgtaacaacatatacttctttgctgaatgctaataaacttctgggttcaagagggaacccctcagtca

SEQ ID NO: 108049 - DNA, 10055 bp, Homo sapiens
  Payload ID: 1230
  Gene Symbol: AMER2
  Gene Name: APC membrane recruitment protein 2
  Uniprot ID: Q8N7J2
  ENST ID: ENST00000357816
  CDS Start-End: 477-2135
aggcaaactccaccccggggagctgttgtgcttgcattgctgggctgctgatagactgattgagtggtggcgtgtacttttgtcacaagaaccataaccacaatgacagccacacagcatggacctagcgtgtgctcagctctggacaagacatggatgtaggcagacatgcttcctgcctgctgggcttagtgcaccaatgctaaggacagacatgaagggcttgggaaaggcatgaagatgcagggagtctaggagagaggataagaaaaacaagcattttgtggtgggttgaattgcgttgtcgtttttagaggcatttcgtgatccatggttgcgctcccgtgaagagcgagtctagagaaggaatccgaagcggcggcggcgagcgcggctcaggttgatttagaatacgggtgacagtggcctggcgcgagcccactgctgacgaaagcggcttatcccgcgcggtttccatggagacgagccggagccgcggcggcggcggggctgtcagcgagcgcggcggagctggcgcgtccgtgggggtctgcaggaggaaggcggaggccggggccgggaccgggaccctcgcggcagacatggacttgcattgtgactgtgccgccgaaacgccggccgccgagccgccgtcggggaagattaataaagctgccttcaaattattcaagaagaggaaatcgggtggcaccatgcccagcatttttggggtcaaaaacaaaggggacgggaaaagctcgggtccgacggggctggtgaggagcaggacccacgacggacttgccgaggtgctggtgctggagagcggcaggaaggaggagccgcgcggcgggggcgacagcggcgggggcggcggggggcggccgaacccggggccccccagagccgcagggcccggcgggggctccctcgccagcagctcggtggccaagtcgcacagcttcttctcgctgctgaagaagaacgggcgctcggaaaacggcaagggagagcctgtggacgcgagcaaggccggcggcaaacaaaagcgggggctgcgggggctgttcagcggcatgcgctggcacaggaaagacaagcgggccaaggcggaggccgcggaggggcgcgcgcccgggggcggcttgatcctacccggctcgctcaccgccagcctggagtgcgtcaaggaggagacgcccagagccgcgcgcgagccggaggagcccagccaggacgccccgcgagacccagcaggctgtggagatattattgcagaccaagaggaagaggcaggtcccagctgtgacaagcatgtccccgggccaggcaagccggctctgtctaaaaagaaccccggcgtggtggcctaccaaggaggcggggaagagatggccagcccggacgaggtggacgacacctatctacaggagttctgggacatgctctcccagaccgaggagcagggacccgagccccaggagggcgcggctaaggtggcagctgcgctggaaaccaaggtggtgcccgagacccccaaagacaccaggtgtgtggaagcggccaaggacgcgtcctcggtcaagcgcaggaggctcaaccggattcccatcgagccccatcctaaggaggagcccaagcacccggagaaggagcagcaggaaggcgtccccaacagcgacgagggctactgggactccaccacgccaggcccagaggaagacagctcgagcagcgggaagaaggcgggcatcccccgggatagctacagcggggacgcgctctatgatctctatgctgacccggacggaagtccagcaacccttcctggagggaaggacaacgaggagacgtcctccctgtcccggttaaagcccgtatctccaggcaccatcacctgtccactgcgaacaccaggcagcttgctgaaggactctaagatccctattagcatcaagcacctgaccaaccttccatctagccatcccgtggtgcaccagcaaccctccaggagtgagatgcccagaacaaaaatcccggtttccaaagtgctggtccgcagagtcagcaaccggggcttggctgggaccaccatcagagcaacggcctgccacgacagtgccaaaaagttgtgaggtcttccaggccaaggtggatgggccccatgccaaggaatacaacttttccctggaaaccactaaagtaagttttgcttttcctaaagaaagtcttttaggacaccacccgtcccccgccctgctccagagcgtggaccgaggaggtctttgtgccctgagcagggaccggataacaccagaaagagggatgctacacgggggtttctcctctcaagataagtccctgagaattattttcaagcacttttttcttttttacctttaagtttttcttccttttgctttaatatactgaacacttggaagtcacctttacttgcctttgcagaaaacagaacttagccaaacctaagtaagagtcatgcctggatattgggataagccagtgtctagaggcctgaaggaaccgctgaagaaccagaggagatctcctcttccaagacacgtttccttccttcccttctttcctctttcctttccagttaaaaaaaaacaaaaacaaaaacaaaaccctttgctgtatcactgtgtggaaaatacctccaaagctgaaagagccaggtatttacctgatgagcagaggggaccactgattggcagaaaacttccctacgttcagttgttagatatgcaaattgataaggatctaacactaggaaaataaaggcgagttttggtttggttggtttcagtcatttgtttggggagatataaaaggctcaggagagcaggcttttgcttttgcttttgtttgtttcttcccccacccagtgcagaaatcaggatcagggaaagattttattaaatgccaatagatacagtatttaagcatttataaactgaaaccttttcatgtgaagataatgcatattttaccgtttatccagctgttaacattttgtaatcagtcaattcaatagaattattctggataattctatatctagaatataaaatctggtcttatagctagacatgatgatggtccccaaaccattgatgttctgttatgtactgtaatgggaagcgattctgattttgttttatatgggttctctggttctcaaaaaaaaaaaaaatctattgtgctggtgtcccagaggaatggctctgccttgttttgggtaagagtctgtttctcaccccaaaccctgttttcagatttttttttaccttgattgtaaaatttcagatccaaccattcctcaatataatgagtgcaaaatgaggaacacataaagaaaaacaatagaaagatacagtttttcacatcatttgccttttgctttatagacttatgacaaagacaagtgtgttcagaatatgacactggcaagcttatgtattgtaaacactttatgccaagttttttttgaaaagtggtttgcttctatgtatgttttctaatatttcagatgaaacatttatttcagaaagggttattatatgcctagtttgaatgataaactgaagcagttcctagaatgctattagtgtctaatgatgaaattaatatcctttttgaaatacacttcagtgtatttaatcaaaagaccagagcttctactaggaggtgattcatcataccaggaagattatgcatattcacgtgaaactgcacatatgtaaatgacatgaacacttctgtataagtctcatttccagagagattgcattagtaatgaactgttattacatgctttttaagtttgttttctgtttcataaatgaaagaacaaggcaagttaaatatatgaaaacctattttaataatatgaagaaagtaacaaaataaatggacatcaaaggaaagcaaattgagccagtagcagaaagtaggccattccccattttaaatttgcagtgattcaattaggagaggtttgctgaatttcttcattagtcatatgactggcttttattgcattgtctcagatccataatgttatttcaaagtaatcttttaatatttaatttctttatgtgtgtaaatgaggccctatatgcagtcatagccttaagcattctgaacacactaccaagaattcatataagcatctcacactcacgtgctcatgcactcaactgtgtacagactaacagacaaaagacatctactctagatctggaaattatttttgaaattatttctgtattaaacaagggatttacatttgatttcatgccgctggtactatttaggctcaaaatacattcatcttcccctagtgaatggagaaaatataaattttattcctagctgtaaaacaaaggatcttgatttccttgttgtacattttcctgcaagggttatattctcctttgcatgaatccatggcaaagttatgttggttcatttgttcaattgtacaggaaagttaagaatacctgaaaaacttatgagaatattgtaatagtaaaggcaatctatttcttaagcagtagaagaaaagtttttgctttcataattttaggacttaatcctccatttacaccattatgctgtgtctcctctttataagaaaaggaacacgtgagcaaagtttatcttaatttccactgacctgtcaattaaccagttataaaagatataaaatattttcttttaaaatttatattttccactttttttttaccttattttttaagaattgcacccacaccaatcaaataaaggatttgggcaatgaattaaacagcctcaatcacttgatgggaaatccctggagtggcaggaagagtagattctcaactttttccaaccatagaaaagggatcatagttgctttcttgtgccaagggctactttctctcatttgtgttcatggagattgttttttcaagaattttcctagatttacattccaatttttattaatacattatatctaatgaccttgtgaagattattcaggcccatatttgctgactttttaagggaaggattggatagaggctaattatatctttcccacatgtatgtatattctaagatacttggttgattgacttcctttagttgaaaggctgcccaaattagacaggaaaaagtcaaatcaattgttgggcgaaaatttatcggttggtttaatagctctgcacaaagacagcctgacttgaatgtctatattacacatacactgttatttgaaacactctgctttagtacagatggtggttgatgcgtttatcctgccattagcaccaattgggagaaattttactacagcattttaaataatcacaagagtaaatagatttctattattttatctaataacaacaatagaatatagaatacaaaggacttcctctagatacattttattttatctaataacaacaatggaatatagaatacaaaggacttcctttagatacattttccacaaattatctgcttatttaaatacaaagggtttaatatctatgaaggtaataactcaccgtgtttaaaggatttatttcttcatctcagaggtagtcttcaagtatttgcagttaaacagtatgcaaatagccctttgcttacacaattatccaggtaaaaagactatgtcaggtgttgagatttctttgaattttctaagagttttcattatttacgcctttgtcagattaattttaaaggcaactcttgactgttagcttggtgtgaagagatccactcaggcagctcatgtctcctaagtgccctcagacagcagtgacgggacacttcacatgacgctagcatgttggctctgtccgcatggcggaatgcattccctgctgttagttatctgaatttttctcctgaattacaaatatatggatttggctcccctgatgctgggcttctgctgagacctgttccagtacattcacgtatgctttgctccccttcattgttaagaaattaattcaagaagttttttgctgttaaacataaggaataagcatcacaattgcctcatctcatcactgaggaaagctggtttaaagtatctgagtgaaataagaggaaaaccccaaatacttcacctaacccagtttccctttcccctcctccaggcagagcaaggaaaagaacagttgtaatttgtgtaaactcagccttagaaaatttcaattcattacacacaaaaatatttatgaagcagtttggaaccaaaggggtagtatggtagacgagtgtcttacagagcctgtgtggggaagcaaaaggcaagggtgtagttcacaggcagaagcgagctgtgacattgtcagtgcagcgtgtaagtgtggctcctcacaggcggccattgattgtgagacctcatcttgctctgaagatttcccggtggctgtcatgcattgcttctcaaaagccttgcactgtgataaggtttaaggagacagattgttgcaacaatagccacttctaaggaatgttattatgtcactgcagatgatgtttttaagaggtgattcagaatgatagtttcgtgattacggaaaggagttccttctcaaactgcaaaaggaaagatgaaaatagtcatgaagcctccagaactgaaattgggcaccttttatgatggatatttactttaattcaatgcaacacatatttatggggcatagactgtatcaaatacttaataaaacccattcagtttggagctcacacctaagctgcgctgtaattggattttcttaatattcattaaaaacacaaaacaatattattttacttttttttggtatttgcatttgttgcttatagtttgtggggtgaagcaaagtggtgtgaagttgaagaagggcactatgaattaagccacacaaatgcctctaaaaaatagtaaatgtaacaatggttaacattcattgaatacttactatgtgtcaggcactgctaggagatttagaaataattacttagtcctcttaacagccatgtggggtaggtaatattatctccccagtaagacagctttaattcatcctttttgtttctatccctttccatctctgtctgtctgtctctctctctcttttcccctagtctctaggacagggatataaactctttagtgattttcagtaatagagagctaagcactgcttagtgtcattgtcagctcacttctaatagaaagagctaacccatgtccacgcagctgaaaattagttttgtgtctgagatgatggtgctcacaatcatatacagggaaccctgccactgtgctatgctgagtaggcaaacattggccttcccttggagggatcctcttctcttaggattaatgtgggaagtacagacagaaatctcttctgttgtcatggcgatacttcttccctgacagggtatcattcattcaaagcatatttgtttcatttgtttttattcctaccttaagccatcttggtgggttctgggtggtctatgcatatgtgtgtgtgttttaattgcagtaagaatattgaatatgagatctaccctctttaattttttttttttttttttttgagatggagtcttactctgtcacccaggctggagtgcagtggcttgatctcggctcactataacctccacctcccaggttcaagtgattctcctgcctcagcctcccaagtagctgagactacaggcgtgcaccaccatgcccgttagtttttgtatttttagtagagacagggtttcaccatgttggccaggctggtctcaaactcctgacctcaaatgatctgcccacctctacctccaaagtgttgggattacaggcaatgagccaccacgcccgggttaccttctttaatttttaagtacacaatacagtattgttaactatagccacagtgttgtacagcaaatctctctcacctatgcatcctgcgtaactgaaactctgtgcccattgaacagcagctcctcatttcctcccccatcagcccctggcagccatcattctactctctgcttctgtgagtctggctattttagatcccttatagaagtggaaacgcgcagtatttgtccttctgtgactggcttatttcattgagcataacgacccccaagtttagccatgttgttgcttatggcaggatttccttcttttttcaggctgaataatatttccttatatgtatatgctgcatttttaaaaaccctttcatctactgacagacgtttagattatttccacatcttggctattatgagtaatgctacaacgaacgagggagtgaaaatatctctttaagatcctgatttcagtttttttgaataaatacccagaagtggaatgactgggtcattcatatggtaattctaattaaacatagaattatttttaattttttgagaaacttctgtgctgctttccacagtggttgcatctgtttacatacttaccaatggtgcacaagggttccaatttctccacatctttgccaacttgttatctgtgtttgtttaaatgacagctgtatgagttgtcccttgcctccatgcaattctgaacttcagaaataagcacttggctcctttaatagctgtccgtcctatgttgtgtctacagccactgaatcctgtcctacattttctgattcattaactcattcaactaatagctattgaacaccatcaataagtcagccaccatgaagatgagtattttatattgaattctactaacatatcctgtatgtttactatgttgccagagaggatgctgtgtgctttttttacattgttatctttactcttcacaagaaccatgtaaggtaggtattggtaaaatgggtaattttggaaatgcttcaataatcgagtagaataacttttgctctatgtgagaagatacgttttaaataagatatggcttaggtttctggttacctgagacatactataccttctcagatactctcagacctgaatcatttaacaaactaaggcagaaatactaaaaatatctggttcaataacataggggcatggagtagacatgcagaaaatgcttgttcacttgccttgaaatggctccaggtggcctgaaggaatcaatgaaacttctcaagtatctacattacaaccactggtccccactacacatttatttctaaataaaggaggagaaactctagcaaagtaatatttaacattttcattgcttccaggataaatcttattgaatatggaggatctgatagtggtaggtctatcaggaatatcagggaaaatgcttttgatgttgttggcaaagtcaattcctatcatttgtacttgacaccagctacctagcaggctcattgtgaacttcaggtttcgcccacgttatttatataaagtatctcagtgtaatatagggagttgctggttatttgaaaatagtaacaaaaataacccaaacgagaaactccatttccataattagctttcctgaaagtcaggcatgtctttgaggacaggttttggcagtattatttttgtgcacaggaggaaaattgttagtaggtttatagatgttatttttataatagaatgttaaacccctgaaaaacatcaaaaattgtctcctagaactaattctatgttttaaaaacttgttttaaaaaggattctaaatagcaatagggtctttcctcctttctccactccaatggtttaatgggatagaggaatcaatgtttatatttttaaacctgtaaatattttattttgggtattttgtatatttgttgatataattccattttgtgcatatgtaccattgtgcatgttgctgtttttgatagtcactcttttaatgaatgtaagaagcttgggctaatagcacttttcttgttccattcaaacatctgaaaatgaaattacaacactgccattttactgttgtgtttaattcagtcaataaattttgttgctcctttgcatttaaa

SEQ ID NO: 108050 - DNA, 3197 bp, Homo sapiens
  Payload ID: 1230
  Gene Symbol: AMER2
  Gene Name: APC membrane recruitment protein 2
  Uniprot ID: Q8N7J2
  ENST ID: ENST00000515384
  CDS Start-End: 669-2684
ggcaaactccaccccggggagctgttgtgcttgcattgctgggctgctgatagactgattgagtggtggcgtgtacttttgtcacaagaaccataaccacaatgacagccacacagcatggacctagcgtgtgctcagctctggacaagacatggatgtaggcagacatgcttcctgcctgctgggcttagtgcaccaatgctaaggacagacatgaagggcttgggaaaggcatgaagatgcagggagtctaggagagaggataagaaaaacaagcattttgtggtgggttgaattgcgttgtcgtttttagaggcatttcgtgatccatggttgcgctcccgtgaagagcgagtctagagaaggaatccgaaggtgggtgagagttgagggaatttgaattccataattacgactcgaatttctgcaatcagctcgcggctgtgttgcctgctcctgccacaaaaacgccatgcagcgccgagccaagtcggatggaagtgggttagggtattatataagcccttgcgggagggaagatggtcttttatgtgtgtttcttttgcagcggcggcggcgagcgcggctcaggttgatttagaatacgggtgacagtggcctggcgcgagcccactgctgacgaaagcggcttatcccgcgcggtttccatggagacgagccggagccgcggcggcggcggggctgtcagcgagcgcggcggagctggcgcgtccgtgggggtctgcaggaggaaggcggaggccggggccgggaccgggaccctcgcggcagacatggacttgcattgtgactgtgccgccgaaacgccggccgccgagccgccgtcggggaagattaataaagctgccttcaaattattcaagaagaggaaatcgggtggcaccatgcccagcatttttggggtcaaaaacaaaggggacgggaaaagctcgggtccgacggggctggtgaggagcaggacccacgacggacttgccgaggtgctggtgctggagagcggcaggaaggaggagccgcgcggcgggggcgacagcggcgggggcggcggggggcggccgaacccggggccccccagagccgcagggcccggcgggggctccctcgccagcagctcggtggccaagtcgcacagcttcttctcgctgctgaagaagaacgggcgctcggaaaacggcaagggagagcctgtggacgcgagcaaggccggcggcaaacaaaagcgggggctgcgggggctgttcagcggcatgcgctggcacaggaaagacaagcgggccaaggcggaggccgcggaggggcgcgcgcccgggggcggcttgatcctacccggctcgctcaccgccagcctggagtgcgtcaaggaggagacgcccagagccgcgcgcgagccggaggagcccagccaggacgccccgcgagacccagcaggtgagcccgcagggggagaggaggtgcccgcccccgccgaccgcgccccagcgcggagctgccgagaggcagagggcctcgcgcaccccggcgacaccggcgcccggggagaggacgccgcggggcatcggcgcgccgagccggggcccggggaggtccgcacggcagaggacgcttccaggacgggggccgttcccgtaaagacggtcccccttgtcgactccgaaggcggcagcggccgggcgcccgccgccccagaccctgcctctgtcgatccaccctcagacccgtcggcagatcgtatttgtttgatgttttctgacgtgacttcactgaaaagctttgactctcttacaggctgtggagatattattgcagaccaagaggaagaggcaggtcccagctgtgacaagcatgtccccgggccaggcaagccggctctgtctaaaaagaaccccggcgtggtggcctaccaaggaggcggggaagagatggccagcccggacgaggtggacgacacctatctacaggagttctgggacatgctctcccagaccgaggagcagggacccgagccccaggagggcgcggctaaggtggcagctgcgctggaaaccaaggtggtgcccgagacccccaaagacaccaggtgtgtggaagcggccaaggacgcgtcctcggtcaagcgcaggaggctcaaccggattcccatcgagccccatcctaaggaggagcccaagcacccggagaaggagcagcaggaaggcgtccccaacagcgacgagggctactgggactccaccacgccaggcccagaggaagacagctcgagcagcgggaagaaggcgggcatcccccgggatagctacagcggggacgcgctctatgatctctatgctgacccggacggaagtccagcaacccttcctggagggaaggacaacgaggagacgtcctccctgtcccggttaaagcccgtatctccaggcaccatcacctgtccactgcgaacaccaggcagcttgctgaaggactctaagatccctattagcatcaagcacctgaccaaccttccatctagccatcccgtggtgcaccagcaaccctccaggagtgagatgcccagaacaaaaatcccggtttccaaagtgctggtccgcagagtcagcaaccggggcttggctgggaccaccatcagagcaacggcctgccacgacagtgccaaaaagttgtgaggtcttccaggccaaggtggatgggccccatgccaaggaatacaacttttccctggaaaccactaaagtaagttttgcttttcctaaagaaagtcttttaggacaccacccgtcccccgccctgctccagagcgtggaccgaggaggtctttgtgccctgagcagggaccggataacaccagaaagagggatgctacacgggggtttctcctctcaagataagtccctgagaattattttcaagcacttttttcttttttacctttaagtttttcttccttttgctttaatatactgaacacttggaagtcacctttacttgcctttgcagaaaacagaacttagccaaacctaagtaagagtcatgcctggatattgggataagccagtgtctagaggcctgaaggaaccgctgaagaaccagaggagatctcctcttccaagacacgtttccttccttcccttctttcctctttcctttccagttaaaaaaaaacaaaaacaaaaacaaaa

SEQ ID NO: 108051 - DNA, 3273 bp, Homo sapiens
  Payload ID: 1231
  Gene Symbol: AMER3
  Gene Name: APC membrane recruitment protein 3
  Uniprot ID: Q8N944
  ENST ID: ENST00000321420
  CDS Start-End: 260-2845
atcagcctctccccagcaccgactgtgcgctcccgctcccccctcctccccacaaccccgccccacactactggcactgctgcctgagccttcctggagttacttaatccaccccagccccaggcactgaaccacgcgtgcagacccctcgtcctcagttctgcggagacagagtccccacagcatttctgctcctccctcaagactgcggcagagcacagcaccagtagaccccacacacagctggggcactggcagcatggagctgaagagaggaaagaccttcatcaagtccagcctgcaggtttcccacgagaaacccccagacccagcagccgtggctgcagccagggaggggacaggcccctggtcagtccttccaggagggcaacagaggccccacagtgagaagggcccccaagccagccccagtgcccaagaatacgacagatgccccaacaaaggggcgcagctggaccccaaagggggacccgcagccctctgtggagccaccttcaaaccggtgcgaaagtgcaagactcacgacagcatgtctggggcaggcagggccacggctgccacagggcagctggtgggcagtgcaagcttcccgggctccccgggcagccggcgcatgatcgactaccgccactttgtgccccagatgccctttgtgccagctgtggccaagagcatcccgaggaagaggatttccctgaagaggcccaagaagtgctttcggaacctattccacattcggagaaacaagactgaggacttggcctcgctggcggccgaggggaaaagcctgccctccccaggggacccgtcagaccctggggggcggcgaagcaaagccttcctccccccgggtgaggggccggggctggacggcctgtgccaggacctgttggacagcgagctcctggccgatgcatcctttggtctctgcagggccctgtgtgaggacgtggcctcactccagagcttcgactcgctcacgggttgtggggaggtgttcgcagatgagagctcggtgccatctctggagctgaacgagggcccggagagcccaacccaggctgctcagggcctggagagcaaggttcccaggggccctctccagggcagtgtggagcagctggcctcgcccgcccagaatgaagcctctgacttcaccaggttctgggacagtgtgaatcgctcagtgcgtcagcagcagcgtgccctcctaggcccgtggctttcaggcccccaggggacagacagggaccaatcccggctggacacagctgggctcgctgagctgcccctctgcccctgcagggaccctcgcagcggctccaaagccagctccatcgacacaggcacccccaagagcgagcagcccgaatccgtgtccacaagtgacgagggctactatgattccttctcgccaggacttgaggaggacaagaaggaagctgagagcccaggcactcctgccgccaccttcccacgggacagctacagtggggacgccctctacgagctcttccacgaccccagcgagggtcctcttggccccagcccagatgatgacctgtgcgtgtctgagagtctgtcagggccggccctggggacgccactgtccatatgcagcttccgagtgggggccgaggagaacttggccccagcaccaggccctgacctgctcagccagggcttcctacagagctcctggaagggcaaggagtgcctgctgaagctgtgtgacactgagctcgccatcaccatgggcatcgtcagctggctgcgccgaggccccacgccccgtgccccacccacccctgggcagcctgcagctccacctggttcccagggagcccctagggcacccacagagaagctggggggcagggagggcctggcctcagatgcagggggggcgacagtttgctcagcacccagcaggcaggagctgtgggcacacccgggcaccacaggcctgctcgccggagagagcaaggccctcggaggggccacacaagggactggcacactgtccagggatgcctctcgagaggaagagacacgaggtcactctgaaggcttgttctcctctatggagtctgcagccacttcgacaacagatacttccggtaaaaataaggccccagttccttctacctggccctgctcccagaaggagcctgggccaccaggggtcctggggtgtttccgaggcccctggaggccaggtcacggaggtgacactctggatgcagagcccatgctggcaggctgtgtggcccgtgtggcagccctgaagatcagctcaaacgaacagcccccggccgcatggcctccaaggcaagacatgggcagtgggctctttgggcagcgctgggccaggggccctgacatgctggagcagaaacagtccagcagctcccccagcatgaccaccatccatggcctaccctactcagccagcacacaggaccagaggtgtcgagatcgtgtccaggacctgagctggctcagggtggagcccaccgggctaggtgtccaggcctgggcctctgtggaggaccagcccttgcagctcagcacagaggctgtggagcaggtggcacacggcagccagctggactctgagccccgctcagcccctgctgcccggtggagttcccagggccaccatccagaaagcctgggcctcactttgaacagccagcaggaagggggggtctctgcaagtgccccagaatgccgctgcagcctcctggcccgtgagggcctcctctgtggccagccagaagtgggggcctctgggccagccatggctgagccccatctgtaggacaggctcacatgcaccaggaactgcatgtgtcttcatgaccactttcaggagagcctaggactcaaatctctatcttttgtccctgatgtggggactgtgttgggggtggggggtggcaggactcaggcatgcagagggtagcatgttcatgtggaggcatccttgcctgaacccaccagctcaggcagcccaccgccaaagacagcgcgaagctgcaaccacctagctgctcctcatgcaggggctggagagaggggctagggcttgaaactgagggggagaaagagctgcacattgtaaatgggaagcagagagccaatgagtctgcctgggatgtgtgtgaatcccaaaagacgcaatcccaaatgccatagtcccaagtgttgagaatccaaaatattaaaattactatactctaaaatccg

SEQ ID NO: 108052 - DNA, 651 bp, Homo sapiens
  Payload ID: 1231
  Gene Symbol: AMER3
  Gene Name: APC membrane recruitment protein 3
  ENST ID: ENST00000458606
  CDS Start-End: 111-651
gagctgaccgtggtgctgagcgcggctcgcgctccgacgcggtgcccgagcctgtcgcggccgcgccctgctgcactgcgggcccccagcgcagctggggcactggcagcatggagctgaagagaggaaagaccttcatcaagtccagcctgcaggtttcccacgagaaacccccagacccagcagccgtggctgcagccagggaggggacaggcccctggtcagtccttccaggagggcaacagaggccccacagtgagaagggcccccaagccagccccagtgcccaagaatacgacagatgccccaacaaaggggcgcagctggaccccaaagggggacccgcagccctctgtggagccaccttcaaaccggtgcgaaagtgcaagactcacgacagcatgtctggggcaggcagggccacggctgccacagggcagctggtgggcagtgcaagcttcccgggctccccgggcagccggcgcatgatcgactaccgccactttgtgccccagatgccctttgtgccagctgtggccaagagcatcccgaggaagaggatttccctgaagaggcccaagaagtgctttcggaacctattccacattcggagaaacaagactgaggacttggcctcgctggcggccgagg

SEQ ID NO: 108053 - DNA, 6172 bp, Homo sapiens
  Payload ID: 1231
  Gene Symbol: AMER3
  Gene Name: APC membrane recruitment protein 3
  Uniprot ID: Q8N944
  ENST ID: ENST00000423981
  CDS Start-End: 111-2696
gagctgaccgtggtgctgagcgcggctcgcgctccgacgcggtgcccgagcctgtcgcggccgcgccctgctgcactgcgggcccccagcgcagctggggcactggcagcatggagctgaagagaggaaagaccttcatcaagtccagcctgcaggtttcccacgagaaacccccagacccagcagccgtggctgcagccagggaggggacaggcccctggtcagtccttccaggagggcaacagaggccccacagtgagaagggcccccaagccagccccagtgcccaagaatacgacagatgccccaacaaaggggcgcagctggaccccaaagggggacccgcagccctctgtggagccaccttcaaaccggtgcgaaagtgcaagactcacgacagcatgtctggggcaggcagggccacggctgccacagggcagctggtgggcagtgcaagcttcccgggctccccgggcagccggcgcatgatcgactaccgccactttgtgccccagatgccctttgtgccagctgtggccaagagcatcccgaggaagaggatttccctgaagaggcccaagaagtgctttcggaacctattccacattcggagaaacaagactgaggacttggcctcgctggcggccgaggggaaaagcctgccctccccaggggacccgtcagaccctggggggcggcgaagcaaagccttcctccccccgggtgaggggccggggctggacggcctgtgccaggacctgttggacagcgagctcctggccgatgcatcctttggtctctgcagggccctgtgtgaggacgtggcctcactccagagcttcgactcgctcacgggttgtggggaggtgttcgcagatgagagctcggtgccatctctggagctgaacgagggcccggagagcccaacccaggctgctcagggcctggagagcaaggttcccaggggccctctccagggcagtgtggagcagctggcctcgcccgcccagaatgaagcctctgacttcaccaggttctgggacagtgtgaatcgctcagtgcgtcagcagcagcgtgccctcctaggcccgtggctttcaggcccccaggggacagacagggaccaatcccggctggacacagctgggctcgctgagctgcccctctgcccctgcagggaccctcgcagcggctccaaagccagctccatcgacacaggcacccccaagagcgagcagcccgaatccgtgtccacaagtgacgagggctactatgattccttctcgccaggacttgaggaggacaagaaggaagctgagagcccaggcactcctgccgccaccttcccacgggacagctacagtggggacgccctctacgagctcttccacgaccccagcgagggtcctcttggccccagcccagatgatgacctgtgcgtgtctgagagtctgtcagggccggccctggggacgccactgtccatatgcagcttccgagtgggggccgaggagaacttggccccagcaccaggccctgacctgctcagccagggcttcctacagagctcctggaagggcaaggagtgcctgctgaagctgtgtgacactgagctcgccatcaccatgggcatcgtcagctggctgcgccgaggccccacgccccgtgccccacccacccctgggcagcctgcagctccacctggttcccagggagcccctagggcacccacagagaagctggggggcagggagggcctggcctcagatgcagggggggcgacagtttgctcagcacccagcaggcaggagctgtgggcacacccgggcaccacaggcctgctcgccggagagagcaaggccctcggaggggccacacaagggactggcacactgtccagggatgcctctcgagaggaagagacacgaggtcactctgaaggcttgttctcctctatggagtctgcagccacttcgacaacagatacttccggtaaaaataaggccccagttccttctacctggccctgctcccagaaggagcctgggccaccaggggtcctggggtgtttccgaggcccctggaggccaggtcacggaggtgacactctggatgcagagcccatgctggcaggctgtgtggcccgtgtggcagccctgaagatcagctcaaacgaacagcccccggccgcatggcctccaaggcaagacatgggcagtgggctctttgggcagcgctgggccaggggccctgacatgctggagcagaaacagtccagcagctcccccagcatgaccaccatccatggcctaccctactcagccagcacacaggaccagaggtgtcgagatcgtgtccaggacctgagctggctcagggtggagcccaccgggctaggtgtccaggcctgggcctctgtggaggaccagcccttgcagctcagcacagaggctgtggagcaggtggcacacggcagccagctggactctgagccccgctcagcccctgctgcccggtggagttcccagggccaccatccagaaagcctgggcctcactttgaacagccagcaggaagggggggtctctgcaagtgccccagaatgccgctgcagcctcctggcccgtgagggcctcctctgtggccagccagaagtgggggcctctgggccagccatggctgagccccatctgtaggacaggctcacatgcaccaggaactgcatgtgtcttcatgaccactttcaggagagcctaggactcaaatctctatcttttgtccctgatgtggggactgtgttgggggtggggggtggcaggactcaggcatgcagagggtagcatgttcatgtggaggcatccttgcctgaacccaccagctcaggcagcccaccgccaaagacagcgcgaagctgcaaccacctagctgctcctcatgcaggggctggagagaggggctagggcttgaaactgagggggagaaagagctgcacattgtaaatgggaagcagagagccaatgagtctgcctgggatgtgtgtgaatcccaaaagacgcaatcccaaatgccatagtcccaagtgttgagaatccaaaatattaaaattactatactctaaaatccgaaaatcacaatcccaaaagatctaaatcctggaaatataattctgggaaaatttttttttaattttttaaaagatacttacattttaaaaggatttatttgagaaacataaaaacacaacagaacacatcagccacttcacacaataaaataggcaataatacatatttttggaagcataaacaggtatacagacagttacaccggtgtgagttattagcagacaaactatattcatgaagaaataggtcaaaatgggaaatgtatacatgcatgtcactatgcttggtaattgtgtgcacctcgctttatacttgcagtcatatcatgaccaacaacctaagtcttttgacgaagtcaatctatgatgcgtcaccaccacacacacagttgcccaaagagcggagatggcaagaactttcatctctcacaattgcagatgtacaaaaattacatctcttcatttattgaggaagttttgacgtttttatacacacgcacaatgcttacacacacagtcaacctgggatgccggcagggtggctcaggacgaaagcctcaggacccaggagggccatgggtgtaagttccagagtccaaaggccagcgagcctgaagctctgatgtcaaggcagtggaagaaaagcctgtcccagctctgagagagagaccagtttgccttctttatttgttctccctgggcctcagcagattgaatgctgcccaccaacattgagggtggatcttccacacctaggcccctcagattcacacactaatctctggaaacacctcacagacatgcccagaataatgatctcccaggtctctaggtatcccttaacccagtcgagttcacacccaaaatgaagtccacaggtccaccccttgtcaacttggcatccatccgcatccccttaaaccattttcagtctccaaataaagccccaagcaaggcagtagctccacctaacatgatgcaactatcccgggattgtgatttttaagactttagatgttagggatttgaaactttagagatttgcgtctttcagtatttcaatgttggggaccagtgtttgggattatgtcttttagaataatgatccaaacttgtgtgaggactgtgaggctcagggtgggagacgggtgggggagccgaccttaggagggcccactgaaccggcctcaatctggccccagtctggcctactcgctgccccaggacaggtggctacaacatgctgagggcctgaagggcgtcccctcaggaacattgtattactgttttgtgttgctataaaggataactgtgaccagatcatttataaagtaaagaagtttatttggcttgtaattctgcaggtgtagaggcatggcaccagcatctgctgctgctttttttttttttttttttttttttgagacagggtctcactttgttgcccaggtgggaatgggagtgcagtggcacagtcttggctcactgcagcctctacctcctgggctcaagcagtcctcccacctcagcctcccaagtagctgggactacaggcgtgcgccaccttgcctggctaatttttctatttttttgtagagacgggttttcgccatgttgcctcagctaaaatgtctcaaaatctcctcaactaaaatgtctcaaaatctcagcctcccacagtgctggatgacaggagtgagccagccagcatcatgcatccctgtgcgccctgccagggctggcgggaccctcccacccttgttgatgggcagtgctagattatttgtcacgaatcatcccctacaaacaatgatttccctccgcttgcactctctaactagagccatggatggccaaatgctttttgggaagaagccaatggattctcctcggctctgcctgcaagtaacaaaggcttttgactccactccctccacgctgtcagatcgccattccccttcaggaaaacttcgaatggggctgtggacctcactccccaaaatgtcacaacacatgtgcagcaccccgacattcagaaccatgaagggagaaggtggctggtgtctgtaggagggacaggtgtccgtcctgggccagtgtcaggccagcaggtgcagggacagatgggccatccacattctccaagattagcttctacctcaaccagcacacctcagcaagatgccaggattgggctccacaggcagccatgaaatgggtttctggaggaaagatcagcacaggaaaaggggtcagtcaggtcgcaggcaaagtgctagggaaatcccatctcatgcagagctcccaccaagaggagcgtgagttgtgctgtcctggctcgagaagaaggcagcacaggatctgtagctgagggtggccctcccaccaggggacgctggtcagtgcctctcctgactgcctgacgcttggtctccggtggccctctctcaccagggctccctgaggcctgctgcaagcaggacacaggctgcacatcacaggttccaaagtgtgcagcaaggcttctgaccaggcccgtccagatctggagcccctgtggagccacatctgagccctcctcccaagactcacacacaggaccacagcagcatcactgagccgagctgggggcaagtttcaccagattcgcttacctgatccttgcatcaacctcaatgcagttgtcagccccatttttcagacctggacacggaggcacagggtgctggtgtgacttgcccacagttattagtgtgtgaggtgatgggttttgtcccgtcccagctccaaaggccctgctcttcctcaagctccagaacctctcactgagctcctgcagtgaagtcccccctcagagccctcagcccttcctgctttcaggctccagatgtcagagcacccttgggtgccagccacaagtggccctccagcaggctgagcacccagggggaggctgccctgactcaaccccagcctggggctttgtgctgcacctgagggagtagccgctctgtaaatccttgttgaaagaatgaagtgtcaaaaggt

SEQ ID NO: 108054 - DNA, 599 bp, Homo sapiens
  Payload ID: 1231
  Gene Symbol: AMER3
  Gene Name: APC membrane recruitment protein 3
  ENST ID: ENST00000431758
  CDS Start-End: 175-599
cacagcaccagtagaccccacacagtgagtacctgtagggcaagtgcctctttcgttctcttaataatagagtcaggtcccttctccaagggaagaccctgccttgcagccccagcctggcctgccccttcttgcaggcccgctccgaaccctggcagctggggcactggcagcatggagctgaagagaggaaagaccttcatcaagtccagcctgcaggtttcccacgagaaacccccagacccagcagccgtggctgcagccagggaggggacaggcccctggtcagtccttccaggagggcaacagaggccccacagtgagaagggcccccaagccagccccagtgcccaagaatacgacagatgccccaacaaaggggcgcagctggaccccaaagggggacccgcagccctctgtggagccaccttcaaaccggtgcgaaagtgcaagactcacgacagcatgtctggggcaggcagggccacggctgccacagggcagctggtgggcagtgcaagcttcccgggctccccgggcagccggcgcatgatcgactaccgccactttgtgccccagatgccctttgtgccagctgt

SEQ ID NO: 108055 - DNA, 3205 bp, Homo sapiens
  Payload ID: 1232
  Gene Symbol: APLN
  Gene Name: apelin
  Uniprot ID: Q9ULZ1
  ENST ID: ENST00000429967
  CDS Start-End: 308-541
cggggtcacgggcagttgcagccgcggccgagcagccagccgctaagaaagagctcgccgctgccgctcccggagccgccgaggccagcttcgcggcgctgccccgcggcgggagaggaggctgcagaagagcggaggcggccagcgggagcggcggggctcagcgcgcacactcagcggccggggagcctcccgagctctgcgcccgcacgcgccagccgcggctcgcgcctttcttggcctccgggcgcccgacctctcctcccccgcgccggctcgccggggccgcggcggcccaaggagcagcatgaatctgcggctctgcgtgcaggcgctcctgctgctctggctctccttgaccgcggtgtgtggagggtccctgatgccgcttcccgatgggaatgggctggaagacggcaatgtccgccacctggtgcagcccagagggtcaaggaatgggccagggccctggcagggaggtcggaggaaattccgccgccagcggccccgcctctcccataagggacccatgcctttctgaagcaggactgaaggggcccccaagtgcccacccccggcggttatgtctcctccatagattggtctgcttctctggaggcctcacgtccattcagctctcacctcgcacctgctgtagccaccagtgggcccagctcttctcacctgcctgcttcccccagtggcgtgctcctggctgtagtttggatgattcccgttctctcacaagaatccgtccagtccatcttcctggcccctccctggactgactttggagacctagccccagaaagcctcccttcttctccaggtcccctccgccctagtccctgcctgtctcatctaacgccccaaaccttcatttgggccttccttcctcatgtctgccctgagcgcggggtggaagtgctcccttctgtgggctccagcagatcccttgttttcctgtcagttggacccctcacctggcctccagggaagaatgcagagaaaagcaaggagagactctagttaagaggtgctggctgcggggatccagacagggcacattgggggcatggaagtgccagggtggttttcaggagctctggtgaagtgggtggagcatcagcgtttgctcagttaagggagaggtagagaggggcccgtgaagtcctttgtcacttctcttgccttagtgtgcctcccaatactcccttcttcctgcccccacaccccatccccagctagcccaagctccaggtcaggaggggagggtgctgggcctgacatggctatataccctcccaggagtaaaagccaagcaagaggttgtttttgccaagaatcacagaatgttagagctgacaggacccttgaaggtcacttagccttcttaggcaaacgcctgcaaaacagaagcctggagaggggagtgacctgctcagagtcattgcagagccgggatggggaccaggtctcccatctcctactttatgacgccctcttccctcttgatgatgtcttttcaaagcaaatgaagtgccttttcccgaggctggggctgggggtggctgggaggggaagggaagggagaggcaagctggctgtgaactgtcctgttgtggggctggagctgctcccacctccctgacctacccctgctgcaccattcccccagctgggctggaaggttccataactggccagctgcccccataactggcagcattcccagacccagggtactctaataggggcggctcaggcactgagactaccgctcaaccccagggtggttttcaggagtccgaggtagccttcaatcactggactccatggccttcccttcgtgttgaccggaccttccttccagggcttttcctttgggggaggcggagaggggagaagaaggaagggaagggcagaaggaaggagggaagaaaagaaagcaaaggaacagaaggaaggaaagaaagatgggaggaagtgcagcaggaatagcaccctctccccgggaggccctagcttccgtgaggggccatcaccagccattccttggagggggctttctccccttttgcttgagcagggttcccaggagggagaaagagaagacaagagcctgatgcccaactttgtgtgtgtggggacgggggagtcagggccccccaagtcccacaatagccccaatgtttgcctatccacctcccccaagcccctttacctatgctgctgctaacgctgctgctgctgctgctgctgcttaaaggctcatgcttggagtggggactggtcggtgcccagaaagtctcttctgccactgacgcccccatcagggattgggccttctttcccccttcctttctgtgtctcctgcctcatcggcctgccatgacctgcagccaagcccagccccgtggggaaggggagaaagtgggggatggctaagaaagctgggagatagggaacagaagagggtagtgggtgggctaggggggctgccttatttaaagtggttgtttatgattcttatactaatttatacaaagatattaaggccctgttcattaagaaattgttcccttcccctgtgttcaatgtttgtaaagattgttctgtgtaaatatgtctttataataaacagttaaaagctgacagttcgcccttactcttggaggtcatgttcaggaggggcattcctttcccctgggggtcatgggtgtccccatgcccacatattgcacgtgcagggaggtaagtgcctgcatcccaaatcggttctaggtcaactggcctcaaactgatttgccatgagctcacaaaatgaatccctatgcttaatgaccaggtcacataaaatccagcccacttacaggttttctggcatctgtttgggtgtcctaatttttttggcagtgtcatttgaagaatttttttaaagcagtttatttaagaacatactgattaaatgcaggatcgctactaaaaattgttttgtatccttggtgggtgtcttctgctattttatctacttttgaacactttcaggactttttagccagtttgcctttcttgaaaaatgttatgttttcagcaataaatacatttgataatgactttgtttgtatcattttatgtttcacaaagtagagttgcttgatgaatgagatagcctgaaaaataaaatgcaaagagttcaatataa

SEQ ID NO: 108056 - DNA, 1726 bp, Homo sapiens
  Payload ID: 1233
  Gene Symbol: APLNR
  Gene Name: apelin receptor
  Uniprot ID: P35414
  ENST ID: ENST00000257254
  CDS Start-End: 232-1374
ggggtaaggcaagagagggtggaggaaattctgcaggagacaggcttcctccagggtctggagaacccagaggcagctcctcctgagtgctgggaaggactctgggcatcttcagcccttcttactctctgaggctcaagccagaaattcaggctgcttgcagagtgggtgacagagccacggagctggtgtccctgggaccctctgcccgtcttctctccactccccagcatggaggaaggtggtgattttgacaactactatggggcagacaaccagtctgagtgtgagtacacagactggaaatcctcgggggccctcatccctgccatctacatgttggtcttcctcctgggcaccacgggcaacggtctggtgctctggaccgtgtttcggagcagccgggagaagaggcgctcagctgatatcttcattgctagcctggcggtggctgacctgaccttcgtggtgacgctgcccctgtgggctacctacacgtaccgggactatgactggccctttgggaccttcttctgcaagctcagcagctacctcatcttcgtcaacatgtacgccagcgtcttctgcctcaccggcctcagcttcgaccgctacctggccatcgtgaggccagtggccaatgctcggctgaggctgcgggtcagcggggccgtggccacggcagttctttgggtgctggccgccctcctggccatgcctgtcatggtgttacgcaccaccggggacttggagaacaccactaaggtgcagtgctacatggactactccatggtggccactgtgagctcagagtgggcctgggaggtgggccttggggtctcgtccaccaccgtgggctttgtggtgcccttcaccatcatgctgacctgttacttcttcatcgcccaaaccatcgctggccacttccgcaaggaacgcatcgagggcctgcggaagcggcgccggctgctcagcatcatcgtggtgctggtggtgacctttgccctgtgctggatgccctaccacctggtgaagacgctgtacatgctgggcagcctgctgcactggccctgtgactttgacctcttcctcatgaacatcttcccctactgcacctgcatcagctacgtcaacagctgcctcaaccccttcctctatgcctttttcgacccccgcttccgccaggcctgcacctccatgctctgctgtggccagagcaggtgcgcaggcacctcccacagcagcagtggggagaagtcagccagctactcttcggggcacagccaggggcccggccccaacatgggcaagggtggagaacagatgcacgagaaatccatcccctacagccaggagacccttgtggttgactagggctgggagcagagagaagcctggcgccctcggccctccccggcctttgcccttgctttctgaaaatcagagtcacctcctctgcccagagctgtcctcaaagcatccagtgaacactggaagaggcttctagaagggaagaaattgtccctctgaggccgccgtgggtgacctgcagagacttcctgcctggaactcatctgtgaactgggacagaagcagaggaggctgcctgctgtgatacccccttacctcccccagtgccttcttcagaatatctgcactgtcttctgatcctgttagtcactgtggttcatcaaataaaactgtttgtgcaactgttgtgtccaaa

SEQ ID NO: 108057 - DNA, 3609 bp, Homo sapiens
  Payload ID: 1233
  Gene Symbol: APLNR
  Gene Name: apelin receptor
  Uniprot ID: P35414
  ENST ID: ENST00000606794
  CDS Start-End: 198-1340
aggagacaggcttcctccagggtctggagaacccagaggcagctcctcctgagtgctgggaaggactctgggcatcttcagcccttcttactctctgaggctcaagccagaaattcaggctgcttgcagagtgggtgacagagccacggagctggtgtccctgggaccctctgcccgtcttctctccactccccagcatggaggaaggtggtgattttgacaactactatggggcagacaaccagtctgagtgtgagtacacagactggaaatcctcgggggccctcatccctgccatctacatgttggtcttcctcctgggcaccacgggcaacggtctggtgctctggaccgtgtttcggagcagccgggagaagaggcgctcagctgatatcttcattgctagcctggcggtggctgacctgaccttcgtggtgacgctgcccctgtgggctacctacacgtaccgggactatgactggccctttgggaccttcttctgcaagctcagcagctacctcatcttcgtcaacatgtacgccagcgtcttctgcctcaccggcctcagcttcgaccgctacctggccatcgtgaggccagtggccaatgctcggctgaggctgcgggtcagcggggccgtggccacggcagttctttgggtgctggccgccctcctggccatgcctgtcatggtgttacgcaccaccggggacttggagaacaccactaaggtgcagtgctacatggactactccatggtggccactgtgagctcagagtgggcctgggaggtgggccttggggtctcgtccaccaccgtgggctttgtggtgcccttcaccatcatgctgacctgttacttcttcatcgcccaaaccatcgctggccacttccgcaaggaacgcatcgagggcctgcggaagcggcgccggctgctcagcatcatcgtggtgctggtggtgacctttgccctgtgctggatgccctaccacctggtgaagacgctgtacatgctgggcagcctgctgcactggccctgtgactttgacctcttcctcatgaacatcttcccctactgcacctgcatcagctacgtcaacagctgcctcaaccccttcctctatgcctttttcgacccccgcttccgccaggcctgcacctccatgctctgctgtggccagagcaggtgcgcaggcacctcccacagcagcagtggggagaagtcagccagctactcttcggggcacagccaggggcccggccccaacatgggcaagggtggagaacagatgcacgagaaatccatcccctacagccaggagacccttgtggttgactagggctgggagcagagagaagcctggcgccctcggccctccccggcctttgcccttgctttctgaaaatcaggtagtgtggctactccttgtcctatgcacatcctttaactgtcccctgattctgccccgccctgtcctcctctactgctttattctttctcagaggtttgtggtttaggggaaagagactgggctctacagacctgaccctgcacaagccatttaatctcactcagcctcagtttctccattggtatgaaatgggggaaagtcatattgatcctaaaatgttgaagcctgagtctggacgcagtaaaagcttgtttccctctgctgctttcttagatctgcaatcgtctttcctcccttctttccttgtagtttttcccccaccactctctgcagctgccgctccttatccctgccttctggcaccaatcccctcctacagctcgtccccctccctccatccatccttctcccctgtctactttcttgttctgaagggctactaagggttaaggatcccaaagcttgcagagactgaccctgtttaagctttctatcctgttttctgagtgtgaggcagggaatgggctggggccgggggtgggctgtgtgtcagcagataattagtgctccagcccttagatctgggagctccagagcttgccctaaaattggatcacttccctgtcattttgggcattggggctagtgtgattcctgcagttcccccatggcaccatgacactgactagatatgctttctccaaattgtccgcagaccctttcatccttcctctattttctatgagaattggaaggcagcagggctgatgaatggatgtactccttggtttcattatgtgagtggggagttgggaagggcaactagagagagaggatggaggggtgtctgcatttagtccagacactgcttggctcgctccccgagtcctcctgtttctgacttcctgcataactgtgagctgaagggtttcctcatctccccatcttaccccatcatactgatttctttcttgggcactggtgctacttggtgccaagaatcatgttgtttgggatggagatgcctgcctcttgtctgtgtgtgttgtacttatatgtctatatggatgagcctggcatgaacagcagtgtgcctgggtcatttggacaaacctcctcccaccccccaatccactgcaactctgctgttcacacattacccttggcagggggtggtggggggcagggacacactgaggcaatgaaaaatgtagaataaaaatgagtccaccccctactggatttgggggctccaacggctggtccgtgctttaggagcgaagttaatgtttgcaccaggcttcctgtagggagatccctccccaaagcagctggcgccaaggcttgggggcgtcctactgagctgggttcctgctccttcttgggctccatgaaggaagtaagaggctagttgagagcctcccttggcccctttccggtgcctccccgcctggcttcaaatttatgagcattgccctcatcgtcctttcttgttccagggtcagtggccctcttcctaaggaggcctcctgcttgccatgggccaaaaggcacggggtgggttttttctctccctaccctcaggattggacctcttggcttctgctggattggggatctgggaatagggactggagcaagtgtgcagatagcatgatgtctacactgccagagagaccgtgaggatgaaattaatagtggggcctttgtgagctagaggctgggagtgtctattccgggttttgttcttggaggactatgaaagtgaaggacaagacatgagcgatggagataagaaaagcccagcttgatgtgaatggacatcttgaccctccctggaatgacgccagctctgggggcagagggaggaggagaggggaaggggctcctcacagcctagtctccccatcttaagatagcatctttcacagagtcacctcctctgcccagagctgtcctcaaagcatccagtgaacactggaagaggcttctagaagggaagaaattgtccctctgaggccgccgtgggtgacctgcagagacttcctgcctggaactcatctgtgaactgggacagaagcagaggaggctgcctgctgtgatacccccttacctcccccagtgccttcttcagaatatctgcactgtcttctgatcctgttagtcactgtggttcatcaaataaaactgtttgtgc

SEQ ID NO: 108058 - DNA, 1789 bp, Homo sapiens
  Payload ID: 1233
  Gene Symbol: APLNR
  Gene Name: apelin receptor
  Uniprot ID: P35414
  ENST ID: ENST00000611099
  CDS Start-End: 311-1453
ggaggtgggaggagggagtgacgagtcaaggaggagacagggacgcaggagggtgcaaggaagtgtcttaactgagacgggggtaaggcaagagagggtggaggaaattctgcaggagacaggcttcctccagggtctggagaacccagaggcagctcctcctgagtgctgggaaggactctgggcatcttcagcccttcttactctctgaggctcaagccagaaattcaggctgcttgcagagtgggtgacagagccacggagctggtgtccctgggaccctctgcccgtcttctctccactccccagcatggaggaaggtggtgattttgacaactactatggggcagacaaccagtctgagtgtgagtacacagactggaaatcctcgggggccctcatccctgccatctacatgttggtcttcctcctgggcaccacgggcaacggtctggtgctctggaccgtgtttcggagcagccgggagaagaggcgctcagctgatatcttcattgctagcctggcggtggctgacctgaccttcgtggtgacgctgcccctgtgggctacctacacgtaccgggactatgactggccctttgggaccttcttctgcaagctcagcagctacctcatcttcgtcaacatgtacgccagcgtcttctgcctcaccggcctcagcttcgaccgctacctggccatcgtgaggccagtggccaatgctcggctgaggctgcgggtcagcggggccgtggccacggcagttctttgggtgctggccgccctcctggccatgcctgtcatggtgttacgcaccaccggggacttggagaacaccactaaggtgcagtgctacatggactactccatggtggccactgtgagctcagagtgggcctgggaggtgggccttggggtctcgtccaccaccgtgggctttgtggtgcccttcaccatcatgctgacctgttacttcttcatcgcccaaaccatcgctggccacttccgcaaggaacgcatcgagggcctgcggaagcggcgccggctgctcagcatcatcgtggtgctggtggtgacctttgccctgtgctggatgccctaccacctggtgaagacgctgtacatgctgggcagcctgctgcactggccctgtgactttgacctcttcctcatgaacatcttcccctactgcacctgcatcagctacgtcaacagctgcctcaaccccttcctctatgcctttttcgacccccgcttccgccaggcctgcacctccatgctctgctgtggccagagcaggtgcgcaggcacctcccacagcagcagtggggagaagtcagccagctactcttcggggcacagccaggggcccggccccaacatgggcaagggtggagaacagatgcacgagaaatccatcccctacagccaggagacccttgtggttgactagggctgggagcagagagaagcctggcgccctcggccctccccggcctttgcccttgctttctgaaaatcagagtcacctcctctgcccagagctgtcctcaaagcatccagtgaacactggaagaggcttctagaagggaagaaattgtccctctgaggccgccgtgggtgacctgcagagacttcctgcctggaactcatctgtgaactgggacagaagcagaggaggctgcctgctgtgatacccccttacctcccccagtgccttcttcagaatatctgcactgtcttctgatcctgttagtcactgtggttcatcaaataaaactgtttgtgc

SEQ ID NO: 108059 - DNA, 674 bp, Homo sapiens
  Payload ID: 1234
  Gene Symbol: APELA
  Gene Name: apelin receptor early endogenous ligand
  Uniprot ID: P0DMC3
  ENST ID: ENST00000510062
  CDS Start-End: 91-255
tgaagacagccacacagatattgcacagactatttacagatcgtttggtttacattgagagtcattgctctacttttgtgcggtaggaaaatgagatttcagcaattcctttttgcattttttatttttattatgagtcttctccttatcagcggacagagaccagttaatttgaccatgagaagaaaactgcgcaaacacaattgccttcagaggagatgtatgcctctccattcacgagtaccctttccctgagatgagatctggctctatcacccaggctaaagtgcagtggcatgatctaggctaactccctggctcaagcgatccttccacctcagcctcccaagtacctgggactacaggcactcacggccacacctgactaatttttgtatttttttgtagagatggagtatcgccatgttgcccagcttcctttgaggaatgaaaatcattgtttgctgtacatttgatcagaagaaaaaagaaaaactgaaattagtgaagtcagtgaagtcttcggtcccgtcctgaatcatttttaccctctgtttagggacaggtctagaacgagtgagcacaaaactgaagagtgtgccgaaaatctcagcaatcaagataacatttgaactccatttttgaaaaaaataaaaactaacacccacgaaaaa

SEQ ID NO: 108060 - DNA, 551 bp, Homo sapiens
  Payload ID: 1234
  Gene Symbol: APELA
  Gene Name: apelin receptor early endogenous ligand
  Uniprot ID: P0DMC3
  ENST ID: ENST00000515275
  CDS Start-End: 139-303
ttcctgcaaaacacagctggcagttctctgaggtttgtcactagaatgtgaagacagccacacagatattgcacagactatttacagatcgtttggtttacattgagagtcattgctctacttttgtgcggtaggaaaatgagatttcagcaattcctttttgcattttttatttttattatgagtcttctccttatcagcggacagagaccagttaatttgaccatgagaagaaaactgcgcaaacacaattgccttcagaggagatgtatgcctctccattcacgagtaccctttccctgaggtatttctgacagaaaatagattcgctacatttaggcagtgttccaaattagatataccaggaaatgtttcttcacagtttgtaatatgtgataatggcttatggcaatgtcaagacttaagagatgcataccaataaatgaaagagttaaatgaatgacatgacttttgagaattgctttaatagttaaggaagaaaattagacagatgaggacaatgtaggaaaatcttgataactgttgaatct

SEQ ID NO: 108061 - DNA, 2602 bp, Homo sapiens
  Payload ID: 1234
  Gene Symbol: APELA
  Gene Name: apelin receptor early endogenous ligand
  Uniprot ID: P0DMC3
  ENST ID: ENST00000507152
  CDS Start-End: 329-493
gcttttggagtacacttccactaaagttatagcatgcttgaatggtttatttcaccaatatttgcttatggaaataaaggggagtggccgaggagaaaggagaagaggagtggaggaggggtttgaggctgagggaggctctgaccacagcacagagcaccggcaactttgtctaatgtgatcattaaccttcctgcaaaacacagctggcagttctctgaggtttgtcactagaatgtgaagacagccacacagatattgcacagactatttacagatcgtttggtttacattgagagtcattgctctacttttgtgcggtaggaaaatgagatttcagcaattcctttttgcattttttatttttattatgagtcttctccttatcagcggacagagaccagttaatttgaccatgagaagaaaactgcgcaaacacaattgccttcagaggagatgtatgcctctccattcacgagtaccctttccctgagatctctctagctaactttactggatctatcagaagaagaagaggagtgaaggaaagacacccagccacacaaaagaacttcatgatgccaacagcgtgattgcttagaagttcctacacaaaaaaaggatcatttgaaagcacctggaatggtttattagcttcacaggattttattcttcttggcttctatttggagggaaaataacataaattcaaaaggattccaatctgaagcccaaatcgtttgcctacataacaaaaatatctcatcttttcctgcacattattattcttttatgggttaaaaagaaaaataccttttagtgttttagaactctctcatggtaaaaagtgcaagaatttaaaatgttgctttcatattcctataattctccaaaagtattaaattcgtatatgtttgagtgattttctaaaaactgctcaacctgaaatcaattgcattgaccatttggcttcgcacaatagggagaaaataattggttcattgattatatagagagaaagactaagaaaagctattaattgctaccaattttatgataagctttaaggtttatgaaagtatgtttttttatttaatgagtaatgtccatttgaagttgaaagaaaacatgaaatcctaattgtagttcattttatgttcaaatgaaaccattgtttttgtttttgttttgaaacagagtctcactctgttgcccaaggtggagagaagtggcacgcttttgtctcactgcaacctccacctcccgagttcaagtgattctcgtgcctcaacctcccaattataggctgggattacaggtgtgcaccactacacccagctaattcttgtattttttgtagagatgaggttttaccctgttgcccaggctggtcttgaactcaggctggaaccattcattttttaacctttctcatcatgtaattataggaacccaacgtttgatttcctttgaagttttgttatgtcctttattattttgtatggataatttctttaaaagtcttacttaaagttgacatctaaaatacagttatgccaatgaagtcccactcagggtgatatctgtatctaaaagatgagtgctcatcatcctattaggctttgtcttggtggtgttcatcctgagatgctgagacatggaaataaaaaatcagaaggaatttagggatatgattactcaaaaaagaaactatcctgtctaaatttgaattgtgttgataactaggtgttccccagatgctaagatgttcttaatttgtatttattgaaggattgttagcttagtgccacaaaatttttcttactttatgttaattccagataagaaatttacaagtttatatctttttttttcttttttttaagatgagatctggctctatcacccaggctaaagtgcagtggcatgatctaggctaactccctggctcaagcgatccttccacctcagcctcccaagtacctgggactacaggcactcacggccacacctgactaatttttgtatttttttgtagagatggagtatcgccatgttgcccaggttggtctcaaactcaggctggtgagctcaagtgatccgcctccttggcctcccaaaatactgggattacaggcatgtgccaccatgctgggccacaagttcatatctggagtagaagttttactttgtaaatattataaagtagaagaaaccataaaccattttgctaaaatgaaaggttggggttaatataaatgtaattttaaatagaaaatctgacaacactgtcgagtttgtcttcctgtcaaagcttattaaaagtgtctttgcggatgaatggtactttccacaagtgcatttgagtagaagcataacctattctcagttatatttatgtttaaaacatgtactggtttgtatattttgtactgaaaaagaaaacactttatagtcaagatacatctcattcaatacaagtctaaactctttcaaatacaaattcgcatattcacagaaaaagttacaaatcagttttactattgtaaagtaatgaaatggttatacatttcttaattgttcaataaaacactcaatgatt

SEQ ID NO: 108062 - DNA, 3245 bp, Homo sapiens
  Payload ID: 1235
  Gene Symbol: APEX2
  Gene Name: APEX nuclease (apurinic/apyrimidinic endonuclease) 2
  Uniprot ID: Q9UBZ4
  ENST ID: ENST00000374987
  CDS Start-End: 67-1623
ctgaacaggaagcagttcgctcgcgcctaggttggcgcgggctgggaggtgttccagccctttaagatgttgcgcgtggtgagctggaacatcaatgggattcggagacccctgcaaggggtggcaaatcaggaacccagcaactgtgccgccgtggccgtggggcgcattttggacgagctggatgcggatatcgtctgtctccaggaaaccaaagtgaccagggatgcactgacagagcccctggctatcgttgagggttataactcctatttcagcttcagccgcaaccgtagcggctattctggtgtagccaccttctgtaaggacaatgctaccccagtggctgctgaagaaggcctgagtggcctgtttgccacccagaatggggatgttggttgctatggaaacatggatgagtttacccaagaggaactccgggctctggatagtgagggcagggccctcctcacacagcataagatccgcacatgggaaggtaaggagaagaccttgaccctaatcaacgtgtactgcccccatgcggaccctgggaggcctgagcggctagtctttaagatgcgcttctatcgtttgctgcaaatccgagcagaagccctcctggcggcaggcagccatgtgatcattctgggtgacctgaatacagcccaccgccccattgaccactgggatgcagtcaacctggaatgctttgaagaggacccagggcgcaagtggatggacagcttgctcagtaacttggggtgccagtctgcctctcatgtagggcccttcatcgatagctaccgctgcttccaaccaaagcaggagggggccttcacctgctggtcagcagtcactggcgcccgccatctcaactatggctcccggcttgactatgtgctgggggacaggaccctggtcatagacacctttcaggcctctttcctgctgcctgaggtgatgggctctgaccactgccctgtgggtgcagtcttgagtgtgtcctctgtgcctgcaaaacagtgcccacctctgtgcacccgcttcctccctgagtttgcaggcacccagctcaagatccttcgcttcctagttcctctcgaacaaagtcctgtgttggagcagtcgacgctgcagcacaacaatcaaacccgggtacagacatgccaaaacaaagcccaagtgcgctcaaccaggcctcagcccagtcaggttggctctagcagaggccagaaaaacctgaagagctactttcagccctcccctagctgtccccaagcctctcctgacatagagctgcctagcctaccactgatgagcgccctcatgaccccgaagactccagaagagaaggcagtggccaaagtggtgaaggggcaggccaagacttcagaagccaaagatgagaaggagttacggacctcattctggaagtctgtgctggcggggcccttgcgcacacccctctgtgggggccacagggagccatgtgtgatgcgtactgtgaagaagccaggacccaacttgggccgccgcttctacatgtgtgccaggccccggggtcctcccactgacccctcctcccggtgcaacttcttcctctggagcaggcccagctgaaccaatggaggcctggggacatctggcatggtcacccctgcacatgatctgaggccagctccccttccctgagctgcctcctgcttctccctcaaagtctcctacccttctcttcctcttttaagccctctcttcctcgctttccttcctacctagctccttgttggtgagcttcttgtgccttaatcctgtgacccagccccttacaccactttccaccttcctgtccgaagtacacggacactagctgccccaggaagttgtgtgattttaaatcacttctgtctttgctggaaagtgtatttgtgcataaataaagtctgtgtatttgtttcagggttgcactttggacattgtggaggtactccataaagttgagtcagagaagctatctcaatacttggtttgccggctggctgtagcccaatgatgtaattcccagagaaaggggaggagggaggggggaggagggaatagtgaggcgtgagcagcagtgctcaccataaagggttctctgctcagttgtaggaatttcctgtacggctaaggtgaaatcagcaaggaaggtgggctgtgtagccttaaaccagagctttccagctagtgcgtcccacagctgccacagtgggttacagggttgaaagaaacggtcctcagccctcagagttgccaggcagggcctgggaccacacaagtttcagggacgattgcctccttagcaagtagtatcattagtacccctaagtgtgccatggaaatgtttcctgtatactgtgacctggaaagtgggagcattgctttgaacacagtgcttgctctagccaagcctcttctcacctttgaaaatgggactggtagaccaggcacagtggtgcacgcctgtaatcccagcactttgggaggctgagatgggtggatcacctgaggtcaggagttcgcaaccagcctaacatggtgagaccccgtctctactaaatacaaaaaaattaactgggcgtggtggcgcgtgcctgtaatccaagctacttaggaggctgagacaggagaatagcttgtacctgggaggcggaggttgcagtgggctgagatcatgcattgcactccagcctgggcaacaagagtgaaattcagtctccaaaaaaaaaaaaagaaaagaaaaagaatgggactggtaaatcctgttctgtgggatgccgtgggagggagagaggataatggattgaggaagacatccatatccccttatggaaaatacctctttggttttggggaaccactcctttctagggaatttggttagggctgactcatttcctggcttcaggggctaccctgggcccagatttccagggcccggattaccagtgaagcgtcaatccctggatttttattgaaaccattggagaagagccatctcaaataaatctgccaagtatcctagctctttgcaactcactgtgtagtttttgggcatttccttcctctttctcattctgtttccctgttggtaaaatggaatggtgaccaacaagtgacctatggttacctcatagatctgccacttgtctgagggagtcagaatgcacttgtctgttccctgtccaataaaaggcttcacatgc

SEQ ID NO: 108063 - DNA, 1484 bp, Homo sapiens
  Payload ID: 1236
  Gene Symbol: APEX1
  Gene Name: APEX nuclease (multifunctional DNA repair enzyme) 1
  Uniprot ID: P27695
  ENST ID: ENST00000216714
  CDS Start-End: 269-1225
ccgctacccacgtgggggctcagcgtgcacccttctttgtgctcgggttaggaggagctaggctgccatcgggccggtgcagatacggggttgctcttttgctcataagaggggcttcgctggcagtctgaacggcaagcttgagtcaggacccttaattaagatcctcaattggctggagggcagatctcgcgagtagggcaacgcggtaaaaatattgcttcggtgggtgacgcggtacagctgcccaagggcgttcgtaacgggaatgccgaagcgtgggaaaaagggagcggtggcggaagacggggatgagctcaggacagagccagaggccaagaagagtaagacggccgcaaagaaaaatgacaaagaggcagcaggagagggcccagccctgtatgaggaccccccagatcagaaaacctcacccagtggcaaacctgccacactcaagatctgctcttggaatgtggatgggcttcgagcctggattaagaagaaaggattagattgggtaaaggaagaagccccagatatactgtgccttcaagagaccaaatgttcagagaacaaactaccagctgaacttcaggagctgcctggactctctcatcaatactggtcagctccttcggacaaggaagggtacagtggcgtgggcctgctttcccgccagtgcccactcaaagtttcttacggcataggcgatgaggagcatgatcaggaaggccgggtgattgtggctgaatttgactcgtttgtgctggtaacagcatatgtacctaatgcaggccgaggtctggtacgactggagtaccggcagcgctgggatgaagcctttcgcaagttcctgaagggcctggcttcccgaaagccccttgtgctgtgtggagacctcaatgtggcacatgaagaaattgaccttcgcaaccccaaggggaacaaaaagaatgctggcttcacgccacaagagcgccaaggcttcggggaattactgcaggctgtgccactggctgacagctttaggcacctctaccccaacacaccctatgcctacaccttttggacttatatgatgaatgctcgatccaagaatgttggttggcgccttgattactttttgttgtcccactctctgttacctgcattgtgtgacagcaagatccgttccaaggccctcggcagtgatcactgtcctatcaccctatacctagcactgtgacaccacccctaaatcactttgagcctgggaaataagccccctcaactaccattccttctttaaacactcttcagagaaatctgcattctatttctcatgtataaaactaggaatcctccaaccaggctcctgtgatagagttcttttaagcccaagattttttatttgagggttttttgttttttaaaaaaaaattgaacaaagactactaatgactttgtttgaattatccacatgaaaataaagagccatagtttca

SEQ ID NO: 108064 - DNA, 1387 bp, Homo sapiens
  Payload ID: 1236
  Gene Symbol: APEX1
  Gene Name: APEX nuclease (multifunctional DNA repair enzyme) 1
  Uniprot ID: P27695
  ENST ID: ENST00000398030
  CDS Start-End: 172-1128
cttctttgtgctcgggttaggaggagctaggctgccatcgggccggtgcagatacggggttgctcttttgctcataagaggggcttcgctggcagtctgaacggcaacgcggtaaaaatattgcttcggtgggtgacgcggtacagctgcccaagggcgttcgtaacgggaatgccgaagcgtgggaaaaagggagcggtggcggaagacggggatgagctcaggacagagccagaggccaagaagagtaagacggccgcaaagaaaaatgacaaagaggcagcaggagagggcccagccctgtatgaggaccccccagatcagaaaacctcacccagtggcaaacctgccacactcaagatctgctcttggaatgtggatgggcttcgagcctggattaagaagaaaggattagattgggtaaaggaagaagccccagatatactgtgccttcaagagaccaaatgttcagagaacaaactaccagctgaacttcaggagctgcctggactctctcatcaatactggtcagctccttcggacaaggaagggtacagtggcgtgggcctgctttcccgccagtgcccactcaaagtttcttacggcataggcgatgaggagcatgatcaggaaggccgggtgattgtggctgaatttgactcgtttgtgctggtaacagcatatgtacctaatgcaggccgaggtctggtacgactggagtaccggcagcgctgggatgaagcctttcgcaagttcctgaagggcctggcttcccgaaagccccttgtgctgtgtggagacctcaatgtggcacatgaagaaattgaccttcgcaaccccaaggggaacaaaaagaatgctggcttcacgccacaagagcgccaaggcttcggggaattactgcaggctgtgccactggctgacagctttaggcacctctaccccaacacaccctatgcctacaccttttggacttatatgatgaatgctcgatccaagaatgttggttggcgccttgattactttttgttgtcccactctctgttacctgcattgtgtgacagcaagatccgttccaaggccctcggcagtgatcactgtcctatcaccctatacctagcactgtgacaccacccctaaatcactttgagcctgggaaataagccccctcaactaccattccttctttaaacactcttcagagaaatctgcattctatttctcatgtataaaactaggaatcctccaaccaggctcctgtgatagagttcttttaagcccaagattttttatttgagggttttttgttttttaaaaaaaaattgaacaaagactactaatgactttgtttgaattatccacatgaaaataaagagccatagtttca

SEQ ID NO: 108065 - DNA, 451 bp, Homo sapiens
  Payload ID: 1236
  Gene Symbol: APEX1
  Gene Name: APEX nuclease (multifunctional DNA repair enzyme) 1
  ENST ID: ENST00000438886
  CDS Start-End: 1-451
agaaaacctcacccagtggcaaacctgccacactcaagatctgctcttggaatgtggatgggcttcgagcctggattaagaagaaaggattagattgggtaaaggaagaagccccagatatactgtgccttcaagagaccaaatgttcagagaacaaactaccagctgaacttcaggagctgcctggactctctcatcaatactggtcagctccttcggacaaggaagggtacagtggcgtgggcctgctttcccgccagtgcccactcaaagtttcttacggcatagcatatgtacctaatgcaggccgaggtctggtacgactggagtaccggcagcgctgggatgaagcctttcgcaagttcctgaagggcctggcttcccgaaagccccttgtgctgtgtggagacctcaatgtggcacatgaagaaattgaccttcgcaaccccaa

SEQ ID NO: 108066 - DNA, 568 bp, Homo sapiens
  Payload ID: 1236
  Gene Symbol: APEX1
  Gene Name: APEX nuclease (multifunctional DNA repair enzyme) 1
  ENST ID: ENST00000554325
  CDS Start-End: 237-386
ttctttgtgctcgggttaggaggagctaggctgccatcgggccggtgcagatacggggttgctcttttgctcataagaggggcttcgctggcagtctgaacggcaagcttgagtcaggacccttaattaagatcctcaattggctggagggcagatctcgcgagtagggcaacgcggtaaaaatattgcttcggtgggtgacgcggtacagctgcccaagggcgttcgtaacgggaatgccgaagcgtgggaaaaagggagcggtggcggaagacggggatgagctcaggacaggtaagggaatgaaatcagcccttcttcctagaagctgcggcgggggtgtttgtcattcccttgatgtacgagccagaggccaagaagagtaagacggccgcaaagaaaaatgacaaagaggcagcaggagagggcccagccctgtatgaggaccccccagatcagaaaacctcacccagtggcaaacctgccacactcaagatctgctcttggaatgtggatgggcttcgagcctggattaagaagaaaggattagattgggtaaaggaagaag

SEQ ID NO: 108067 - DNA, 640 bp, Homo sapiens
  Payload ID: 1236
  Gene Symbol: APEX1
  Gene Name: APEX nuclease (multifunctional DNA repair enzyme) 1
  ENST ID: ENST00000557592
  CDS Start-End: 124-640
ggagctaggctgccatcgggccggtgcagatacggggttgctcttttgctcataagaggggcttcgctggcagtctgaacggcaagcttgaaagctgcggcgggggtgtttgtcattcccttgatgtacgagccagaggccaagaagagtaagacggccgcaaagaaaaatgacaaagaggcagcaggagagggcccagccctgtatgaggaccccccagatcagaaaacctcacccagtggcaaacctgccacactcaagatctgctcttggaatgtggatgggcttcgagcctggattaagaagaaaggattagattgggtaaaggaagaagccccagatatactgtgccttcaagagaccaaatgttcagagaacaaactaccagctgaacttcaggagctgcctggactctctcatcaatactggtcagctccttcggacaaggaagggtacagtggcgtgggcctgctttcccgccagtgcccactcaaagtttcttacggcataggcgatgaggagcatgatcaggaaggccgggtgattgtggctgaatttgactcgtttgtgctggtaacagcatatgtacctaatgcaggccgaggtctggtacgactggagtaccggcagcgctgggatg

SEQ ID NO: 108068 - DNA, 773 bp, Homo sapiens
  Payload ID: 1236
  Gene Symbol: APEX1
  Gene Name: APEX nuclease (multifunctional DNA repair enzyme) 1
  ENST ID: ENST00000556054
  CDS Start-End: 251-773
aggagctaggctgccatcgggccggtgcagatacggggttgctcttttgctcataagaggggcttcgctggcagtctgaacggcaagcttgagtcaggacccttaattaagatcctcaattggctggagggcagatctcgcgagtagggtacaaggcactatgaaatgatctagtttcgtgggcaacgcggtaaaaatattgcttcggtgggtgacgcggtacagctgcccaagggcgttcgtaacgggaatgccgaagcgtgggaaaaagggagcggtggcggaagacggggatgagctcaggacagagccagaggccaagaagagtaagacggccgcaaagaaaaatgacaaagaggcagcaggagagggcccagccctgtatgaggaccccccagatcagaaaacctcacccagtggcaaacctgccacactcaagatctgctcttggaatgtggatgggcttcgagcctggattaagaagaaaggattagattgggtaaaggaagaagccccagatatactgtgccttcaagagaccaaatgttcagagaacaaactaccagctgaacttcaggagctgcctggactctctcatcaatactggtcagctccttcggacaaggaagggtacagtggcgtgggcctgctttcccgccagtgcccactcaaagtttcttacggcataggcgatgaggagcatgatcaggaaggccgggtgattgtggctgaatttgactcgtttgtgctggtaacagcatatgtacctaatg

SEQ ID NO: 108069 - DNA, 899 bp, Homo sapiens
  Payload ID: 1236
  Gene Symbol: APEX1
  Gene Name: APEX nuclease (multifunctional DNA repair enzyme) 1
  ENST ID: ENST00000553681
  CDS Start-End: 109-899
cccacgtgggggctcagcgtgcacccttctttgtgctcgggcaacgcggtaaaaatattgcttcggtgggtgacgcggtacagctgcccaagggcgttcgtaacgggaatgccgaagcgtgggaaaaagggagcggtggcggaagacggggatgagctcaggacagagccagaggccaagaagagtaagacggccgcaaagaaaaatgacaaagaggcagcaggagagggcccagccctgtatgaggaccccccagatcagaaaacctcacccagtggcaaacctgccacactcaagatctgctcttggaatgtggatgggcttcgagcctggattaagaagaaaggattagattgggtaaaggaagaagccccagatatactgtgccttcaagagaccaaatgttcagagaacaaactaccagctgaacttcaggagctgcctggactctctcatcaatactggtcagctccttcggacaaggaagggtacagtggcgtgggcctgctttcccgccagtgcccactcaaagtttcttacggcataggcgatgaggagcatgatcaggaaggccgggtgattgtggctgaatttgactcgtttgtgctggtaacagcatatgtacctaatgcaggccgaggtctggtacgactggagtaccggcagcgctgggatgaagcctttcgcaagttcctgaagggcctggcttcccgaaagccccttgtgctgtgtggagacctcaatgtggcacatgaagaaattgaccttcgcaaccccaaggggaacaaaaagaatgctggcttcacgccacaagagcgccaaggcttcggggaattactgcaggctgtgccactggctgacagctttaggcacctctaccccaacacaccctatgccta

SEQ ID NO: 108070 - DNA, 304 bp, Homo sapiens
  Payload ID: 1236
  Gene Symbol: APEX1
  Gene Name: APEX nuclease (multifunctional DNA repair enzyme) 1
  ENST ID: ENST00000553368
  CDS Start-End: 180-304
ggaggagctaggctgccatcgggccggtgcagatacggggttgctcttttgctcataagaggggcttcgctggcagtctgaacggcaagcttgagtcaggacccttaattaagatcctcaattggctggagggcagatctcgcgagtaggctgcggcgggggtgtttgtcattcccttgatgtacgagccagaggccaagaagagtaagacggccgcaaagaaaaatgacaaagaggcagcaggagagggcccagccctgtatgaggaccccccagatcagaaaacctcacccagtggcaaacc

SEQ ID NO: 108071 - DNA, 1437 bp, Homo sapiens
  Payload ID: 1236
  Gene Symbol: APEX1
  Gene Name: APEX nuclease (multifunctional DNA repair enzyme) 1
  Uniprot ID: P27695
  ENST ID: ENST00000555414
  CDS Start-End: 217-1173
aggtccgctacccacgtgggggctcagcgtgcacccttctttgtgctcgggttaggaggagctaggctgccatcgggccggtgcagatacggggttgctcttttgctcataagaggggcttcgctggcagtctgaacggcaagcttgagcaacgcggtaaaaatattgcttcggtgggtgacgcggtacagctgcccaagggcgttcgtaacgggaatgccgaagcgtgggaaaaagggagcggtggcggaagacggggatgagctcaggacagagccagaggccaagaagagtaagacggccgcaaagaaaaatgacaaagaggcagcaggagagggcccagccctgtatgaggaccccccagatcagaaaacctcacccagtggcaaacctgccacactcaagatctgctcttggaatgtggatgggcttcgagcctggattaagaagaaaggattagattgggtaaaggaagaagccccagatatactgtgccttcaagagaccaaatgttcagagaacaaactaccagctgaacttcaggagctgcctggactctctcatcaatactggtcagctccttcggacaaggaagggtacagtggcgtgggcctgctttcccgccagtgcccactcaaagtttcttacggcataggcgatgaggagcatgatcaggaaggccgggtgattgtggctgaatttgactcgtttgtgctggtaacagcatatgtacctaatgcaggccgaggtctggtacgactggagtaccggcagcgctgggatgaagcctttcgcaagttcctgaagggcctggcttcccgaaagccccttgtgctgtgtggagacctcaatgtggcacatgaagaaattgaccttcgcaaccccaaggggaacaaaaagaatgctggcttcacgccacaagagcgccaaggcttcggggaattactgcaggctgtgccactggctgacagctttaggcacctctaccccaacacaccctatgcctacaccttttggacttatatgatgaatgctcgatccaagaatgttggttggcgccttgattactttttgttgtcccactctctgttacctgcattgtgtgacagcaagatccgttccaaggccctcggcagtgatcactgtcctatcaccctatacctagcactgtgacaccacccctaaatcactttgagcctgggaaataagccccctcaactaccattccttctttaaacactcttcagagaaatctgcattctatttctcatgtataaaactaggaatcctccaaccaggctcctgtgatagagttcttttaagcccaagattttttatttgagggttttttgttttttaaaaaaaaattgaacaaagactactaatgactttgtttgaattatccacatgaaaataaagagccatagtttcagcctt

SEQ ID NO: 108072 - DNA, 671 bp, Homo sapiens
  Payload ID: 1236
  Gene Symbol: APEX1
  Gene Name: APEX nuclease (multifunctional DNA repair enzyme) 1
  ENST ID: ENST00000557344
  CDS Start-End: 233-671
cttctttgtgctcgggttaggaggagctaggctgccatcgggccggtgcagatacggggttgctcttttgctcataagaggggcttcgctggcagtctgaacggcaagcttgagtcaggacccttaattaagatcctcaattggctggagggcagatctcgcgagcaacgcggtaaaaatattgcttcggtgggtgacgcggtacagctgcccaagggcgttcgtaacgggaatgccgaagcgtgggaaaaagggagcggtggcggaagacggggatgagctcaggacagagccagaggccaagaagagtaagacggccgcaaagaaaaatgacaaagaggcagcaggagagggcccagccctgtatgaggaccccccagatcagaaaacctcacccagtggcaaacctgccacactcaagatctgctcttggaatgtggatgggcttcgagcctggattaagaagaaaggattagattgggtaaaggaagaagccccagatatactgtgccttcaagagaccaaatgttcagagaacaaactaccagctgaacttcaggagctgcctggactctctcatcaatactggtcagctccttcggacaaggaagggtacagtggcgtgggcctgctttcccgccagtgcccactcaaagtttcttacggcatag

SEQ ID NO: 108073 - DNA, 888 bp, Homo sapiens
  Payload ID: 1236
  Gene Symbol: APEX1
  Gene Name: APEX nuclease (multifunctional DNA repair enzyme) 1
  ENST ID: ENST00000557054
  CDS Start-End: 217-261
aggagctaggctgccatcgggccggtgcagatacggggttgctcttttgctcataagaggggcttcgctggcagtctgaacggcaagcttgagtcaggacccttaattaagatcctcaattggctggagggcagatctcgcgagtagggcaacgcggtaaaaatattgcttcggtgggtgacgcggtacagctgcccaagggcgttcgtaacgggaatgccgaagcgtgggaaaaagggagcgcctttcgcaagttcctgaagggcctggcttcccgaaagccccttgtgctgtgtggagacctcaatgtggcacatgaagaaattgaccttcgcaaccccaaggggaacaaaaagaatgctggcttcacgccacaagagcgccaaggcttcggggaattactgcaggctgtgccactggctgacagctttaggcacctctaccccaacacaccctatgcctacaccttttggacttatatgatgaatgctcgatccaagaatgttggttggcgccttgattactttttgttgtcccactctctgttacctgcattgtgtgacagcaagatccgttccaaggccctcggcagtgatcactgtcctatcaccctatacctagcactgtgacaccacccctaaatcactttgagcctgggaaataagccccctcaactaccattccttctttaaacactcttcagagaaatctgcattctatttctcatgtataaaactaggaatcctccaaccaggctcctgtgatagagttcttttaagcccaagattttttatttgagggttttttgttttttaaaaaaaaattgaacaaagactactaatgactttgtttgaattatccacatgaaaataaagagccatagtttca

SEQ ID NO: 108074 - DNA, 566 bp, Homo sapiens
  Payload ID: 1236
  Gene Symbol: APEX1
  Gene Name: APEX nuclease (multifunctional DNA repair enzyme) 1
  ENST ID: ENST00000557181
  CDS Start-End: 244-566
ttctttgtgctcgggttaggaggagctaggctgccatcgggccggtgcagatacggggttgctcttttgctcataagaggggcttcgctggcagtctgaacggcaagcttgagtcaggacccttaattaagatcctcaattggctggagggcagatctcgcgagtagggtacaaggcaacgcggtaaaaatattgcttcggtgggtgacgcggtacagctgcccaagggcgttcgtaacgggaatgccgaagcgtgggaaaaagggagcggtggcggaagacggggatgagctcaggacagagccagaggccaagaagagtaagacggccgcaaagaaaaatgacaaagaggcagcaggagagggcccagccctgtatgaggaccccccagatcagaaaacctcacccagtggcaaacctgccacactcaagatctgctcttggaatgtggatgggcttcgagcctggattaagaagaaaggattagattgggtaaaggaagaagccccagatatactgtgccttcaagagaccaaatgttcagagaacaaactaccagctgaact

SEQ ID NO: 108075 - DNA, 740 bp, Homo sapiens
  Payload ID: 1236
  Gene Symbol: APEX1
  Gene Name: APEX nuclease (multifunctional DNA repair enzyme) 1
  ENST ID: ENST00000557150
  CDS Start-End: 254-740
gggccggtgcagatacggggttgctcttttgctcataagaggggcttcgctggcagtctgaacggcaacgcggtaaaaatattgcttcggtgggtgacgcggtacagctgcccaagggcgttcgtaacgggaatgccgaagcgtgggaaaaagggagcggtggcggaagacggggatgagctcaggacaggtaagggaatgaaatcagcccttcttcctagaagctgcggcgggggtgtttgtcattcccttgatgtacgagccagaggccaagaagagtaagacggccgcaaagaaaaatgacaaagaggcagcaggagagggcccagccctgtatgaggaccccccagatcagaaaacctcacccagtggcaaacctgccacactcaagatctgctcttggaatgtggatgggcttcgagcctggattaagaagaaaggattagattgggtaaaggaagaagccccagatatactgtgccttcaagagaccaaatgttcagagaacaaactaccagctgaacttcaggagctgcctggactctctcatcaatactggtcagctccttcggacaaggaagggtacagtggcgtgggcctgctttcccgccagtgcccactcaaagtttcttacggcataggcgatgaggagcatgatcaggaaggccgggtgattgtggctgaatttgactcgtttgtgctggtaacagcatatgtacctaatgcaggccgaggtctgg

SEQ ID NO: 108076 - DNA, 952 bp, Homo sapiens
  Payload ID: 1236
  Gene Symbol: APEX1
  Gene Name: APEX nuclease (multifunctional DNA repair enzyme) 1
  ENST ID: ENST00000555839
  CDS Start-End: 225-952
gggttaggaggagctaggctgccatcgggccggtgcagatacggggttgctcttttgctcataagaggggcttcgctggcagtctgaacggcaagcttgagtcaggacccttaattaagatcctcaattggctggagggcagatctcgcgagtagggcaacgcggtaaaaatattgcttcggtgggtgacgcggtacagctgcccaagggcgttcgtaacgggaatgccgaagcgtgggaaaaagggagcggtggcggaagacggggatgagctcaggacagagccagaggccaagaagagtaagacggccgcaaagaaaaatgacaaagaggcagcaggagagggcccagccctgtatgaggaccccccagatcagaaaacctcacccagtggcaaacctgccacactcaagatctgctcttggaatgtggatgggcttcgagcctggattaagaagaaaggattagattgggtaaaggaagaagccccagatatactgtgccttcaagagaccaaatgttcagagaacaaactaccagctgaacttcaggagctgcctggactctctcatcaatactggtcagctccttcggacaaggaagggtacagtggcgtgggcctgctttcccgccagtgcccactcaaagtttcttacggcataggccgaggtctggtacgactggagtaccggcagcgctgggatgaagcctttcgcaagttcctgaagggcctggcttcccgaaagccccttgtgctgtgtggagacctcaatgtggcacatgaagaaattgaccttcgcaaccccaaggggaacaaaaagaatgctggcttcacgccacaagagcgccaaggcttcggggaattactgcaggctgtgccactggctgacagctttaggcacctctaccccaacacaccctatgcctacaccttttggacttatatgatgaa

SEQ ID NO: 108077 - DNA, 663 bp, Homo sapiens
  Payload ID: 1237
  Gene Symbol: APH1A
  Gene Name: APH1A gamma secretase subunit
  ENST ID: ENST00000236017
  CDS Start-End: 214-663
ttgtcccctcttcggcttccgtagaggaagtggcgcggaccttcatttggggtttcggttcccccccttccccttccccggggtctgggggtgacattgcaccgcgcccctcgtggggtcgcgttgccaccccacgcggactccccagctggcgcgcccctcccatttgcctgtcctggtcaggcccccaccccccttcccacctgaccagccatgggggctgcggtgtttttcggctgcactttcgtcgcgttcggcccggccttcgcgcttttcttgatcactgtggctggggacccgcttcgcgttatcatcctggtcgcagggaaggcagatgaggggttagcatcgctgagtgaggacggaagatcacccatctccatccgccagatggcctatgtttctggtctctccttcggtatcatcagtggtgtcttctctgttatcaatattttggctgatgcacttgggccaggtgtggttgggatccatggagactcaccctattacttcctgacttcagcctttctgacagcagccattatcctgctccataccttttggggagttgtgttctttgatgcctgtgagaggagacggtactgggctttgggcctggtggttgggagtcacctactgacatcgggactgacattcctgaac

SEQ ID NO: 108078 - DNA, 2353 bp, Homo sapiens
  Payload ID: 1237
  Gene Symbol: APH1A
  Gene Name: APH1A gamma secretase subunit
  Uniprot ID: Q96BI3
  ENST ID: ENST00000360244
  CDS Start-End: 494-1237
agcccttcaagaagaggtatgattgctaccacttttccccacaaagtgacgaaaggaaacagcgacggaagcgcaaccgaaccctggaattggtgtctcgactggtccattcccggcccacccccattaaccggctcgagccactcccaggacgaagtcaaggcctcggaaggcgactacaactcccagcaggtcgagcagctccgcccgcgctgattctccattggccttccgggggtggggattagatgggaggtggccgtggggctgcggccgggatttgtcccctcttcggcttccgtagaggaagtggcgcggaccttcatttggggtttcggttcccccccttccccttccccggggtctgggggtgacattgcaccgcgcccctcgtggggtcgcgttgccaccccacgcggactccccagctggcgcgcccctcccatttgcctgtcctggtcaggcccccaccccccttcccacctgaccagccatgggggctgcggtgtttttcggctgcactttcgtcgcgttcggcccggccttcgcgcttttcttgatcactgtggctggggacccgcttcgcgttatcatcctggtcgcaggggcatttttctggctggtctccctgctcctggcctctgtggtctggttcatcttggtccatgtgaccgaccggtcagatgcccggctccagtacggcctcctgatttttggtgctgctgtctctgtccttctacaggaggtgttccgctttgcctactacaagctgcttaagaaggcagatgaggggttagcatcgctgagtgaggacggaagatcacccatctccatccgccagatggcctatgtttctggtctctccttcggtatcatcagtggtgtcttctctgttatcaatattttggctgatgcacttgggccaggtgtggttgggatccatggagactcaccctattacttcctgacttcagcctttctgacagcagccattatcctgctccataccttttggggagttgtgttctttgatgcctgtgagaggagacggtactgggctttgggcctggtggttgggagtcacctactgacatcgggactgacattcctgaacccctggtatgaggccagcctgctgcccatctatgcagtcactgtttccatggggctctgggccttcatcacagctggagggtccctccgaagtattcagcgcagcctcttgtgtaaggactgactacctggactgatcgcctgacagatcccacctgcctgtccactgcccatgactgagcccagccccagcccgggtccattgcccacattctctgtctccttctcgtcggtctaccccactacctccagggttttgctttgtccttttgtgaccgttagtctctaagctttaccaggagcagcctgggttcagccagtcagtgactggtgggtttgaatctgcacttatccccaccacctggggacccccttgttgtgtccaggactccccctgtgtcagtgctctgctctcaccctgcccaagactcacctcccttcccctctgcaggccgacggcaggaggacagtcgggtgatggtgtattctgccctgcgcatcccacccgaggactgagggaacctaggggggacccctgggcctggggtgccctcctgatgtcctcgccctgtatttctccatctccagttctggacagtgcaggttgccaagaaaagggacctagtttagccattgccctggagatgaaattaatggaggctcaaggatagatgagctctgagtttctcagtactccctcaagactggacatcttggtctttttctcaggcctgagggggaaccatttttggtgtgataaataccctaaactgcctttttttcttttttgaggtggggggagggaggaggtatattggaactcttctaacctccttgggctatattttctctcctcgagttgctcctcatggctgggctcatttcggtccctttctccttggtcccagaccttgggggaaaggaaggaagtgcatgtttgggaactggcattactggaactaatggttttaacctccttaaccaccagcatccctcctctccccaaggtgaagtggagggtgctgtggtgagctggccactccagagctgcagtgccactggaggagtcagactaccatgacatcgtagggaaggaggggagatttttttgtagtttttaattggggtgtgggaggggcggggaggttttctataaactgtatcattttctgctgagggtggagtgtcccatccttttaatcaaggtgattgtgattttgactaataaaaaagaatttgt

SEQ ID NO: 108079 - DNA, 1713 bp, Homo sapiens
  Payload ID: 1237
  Gene Symbol: APH1A
  Gene Name: APH1A gamma secretase subunit
  Uniprot ID: Q96BI3
  ENST ID: ENST00000369109
  CDS Start-End: 190-987
aggaagtggcgcggaccttcatttggggtttcggttcccccccttccccttccccggggtctgggggtgacattgcaccgcgcccctcgtggggtcgcgttgccaccccacgcggactccccagctggcgcgcccctcccatttgcctgtcctggtcaggcccccaccccccttcccacctgaccagccatgggggctgcggtgtttttcggctgcactttcgtcgcgttcggcccggccttcgcgcttttcttgatcactgtggctggggacccgcttcgcgttatcatcctggtcgcaggggcatttttctggctggtctccctgctcctggcctctgtggtctggttcatcttggtccatgtgaccgaccggtcagatgcccggctccagtacggcctcctgatttttggtgctgctgtctctgtccttctacaggaggtgttccgctttgcctactacaagctgcttaagaaggcagatgaggggttagcatcgctgagtgaggacggaagatcacccatctccatccgccagatggcctatgtttctggtctctccttcggtatcatcagtggtgtcttctctgttatcaatattttggctgatgcacttgggccaggtgtggttgggatccatggagactcaccctattacttcctgacttcagcctttctgacagcagccattatcctgctccataccttttggggagttgtgttctttgatgcctgtgagaggagacggtactgggctttgggcctggtggttgggagtcacctactgacatcgggactgacattcctgaacccctggtatgaggccagcctgctgcccatctatgcagtcactgtttccatggggctctgggccttcatcacagctggagggtccctccgaagtattcagcgcagcctcttgtgccgacggcaggaggacagtcgggtgatggtgtattctgccctgcgcatcccacccgaggactgagggaacctaggggggacccctgggcctggggtgccctcctgatgtcctcgccctgtatttctccatctccagttctggacagtgcaggttgccaagaaaagggacctagtttagccattgccctggagatgaaattaatggaggctcaaggatagatgagctctgagtttctcagtactccctcaagactggacatcttggtctttttctcaggcctgagggggaaccatttttggtgtgataaataccctaaactgcctttttttcttttttgaggtggggggagggaggaggtatattggaactcttctaacctccttgggctatattttctctcctcgagttgctcctcatggctgggctcatttcggtccctttctccttggtcccagaccttgggggaaaggaaggaagtgcatgtttgggaactggcattactggaactaatggttttaacctccttaaccaccagcatccctcctctccccaaggtgaagtggagggtgctgtggtgagctggccactccagagctgcagtgccactggaggagtcagactaccatgacatcgtagggaaggaggggagatttttttgtagtttttaattggggtgtgggaggggcggggaggttttctataaactgtatcattttctgctgagggtggagtgtcccatccttttaatcaaggtgattgtgattttgactaataaaaaagaatttgtaa

SEQ ID NO: 108080 - DNA, 1718 bp, Homo sapiens
  Payload ID: 1237
  Gene Symbol: APH1A
  Gene Name: APH1A gamma secretase subunit
  Uniprot ID: Q96BI3
  ENST ID: ENST00000414276
  CDS Start-End: 400-987
gtctcgactggtccattcccggcccacccccattaaccggctcgagccactcccaggacgaagtcaaggcctcggaaggcgactacaactcccagcaggtcgagcagctccgcccgcgctgattctccattggccttccgggggtggggattagatgggaggtggccgtggggctgcggccgggatttgtcccctcttcggcttccgtagaggaagtggcgcggaccttcatttggggtttcggttcccccccttccccttccccggggtctgggggtgacattgcaccgcgcccctcgtggggtcgcgttgccaccccacgcggactccccagctggcgcgcccctcccatttgcctgtcctggtcaggcccccaccccccttcccacctgaccagccatgggggctgcggtgtttttcggctgcactttcgtcgcgttcggcccggccttcgcgcttttcttgatcactgtggctggggacccgcttcgcgttatcatcctggtcgcagggaggtgttccgctttgcctactacaagctgcttaatttctggtctctccttcggtatcatcagtggtgtcttctctgttatcaatattttggctgatgcacttgggccaggtgtggttgggatccatggagactcaccctattacttcctgacttcagcctttctgacagcagccattatcctgctccataccttttggggagttgtgttctttgatgcctgtgagaggagacggtactgggctttgggcctggtggttgggagtcacctactgacatcgggactgacattcctgaacccctggtatgaggccagcctgctgcccatctatgcagtcactgtttccatggggctctgggccttcatcacagctggagggtccctccgaagtattcagcgcagcctcttgtgccgacggcaggaggacagtcgggtgatggtgtattctgccctgcgcatcccacccgaggactgagggaacctaggggggacccctgggcctggggtgccctcctgatgtcctcgccctgtatttctccatctccagttctggacagtgcaggttgccaagaaaagggacctagtttagccattgccctggagatgaaattaatggaggctcaaggatagatgagctctgagtttctcagtactccctcaagactggacatcttggtctttttctcaggcctgagggggaaccatttttggtgtgataaataccctaaactgcctttttttcttttttgaggtggggggagggaggaggtatattggaactcttctaacctccttgggctatattttctctcctcgagttgctcctcatggctgggctcatttcggtccctttctccttggtcccagaccttgggggaaaggaaggaagtgcatgtttgggaactggcattactggaactaatggttttaacctccttaaccaccagcatccctcctctccccaaggtgaagtggagggtgctgtggtgagctggccactccagagctgcagtgccactggaggagtcagactaccatgacatcgtagggaaggaggggagatttttttgtagtttttaattggggtgtgggaggggcggggaggttttctataaactgtatcattttctgctgagggtggagtgtcccatccttttaatcaaggtgattgtgattttgactaataaaaaagaatttgtaattgtg

SEQ ID NO: 108081 - DNA, 4189 bp, Homo sapiens
  Payload ID: 1238
  Gene Symbol: APH1B
  Gene Name: APH1B gamma secretase subunit
  Uniprot ID: Q8WW43
  ENST ID: ENST00000261879
  CDS Start-End: 71-844
accgaaccccgcccgcgccgggagcatctcgcgtccccaacgggcccccgggtcggtttccgcggtggccatgactgcggccgtgttcttcggctgcgccttcattgccttcgggcctgcgctcgccctttatgtcttcaccatcgccaccgagccgttgcgtatcatcttcctcatcgccggagctttcttctggttggtgtctctactgatttcgtcccttgtttggttcatggcaagagtcattattgacaacaaagatggaccaacacagaaatatctgctgatctttggagcgtttgtctctgtctatatccaagaaatgttccgatttgcatattataaactcttaaaaaaagccagtgaaggtttgaagagtataaacccaggtgagacagcaccctctatgcgactgctggcctatgtttctggcttgggctttggaatcatgagtggagtattttcctttgtgaataccctatctgactccttggggccaggcacagtgggcattcatggagattctcctcaattcttcctttattcagctttcatgacgctggtcattatcttgctgcatgtattctggggcattgtattttttgatggctgtgagaagaaaaagtggggcatcctccttatcgttctcctgacccacctgctggtgtcagcccagaccttcataagttcttattatggaataaacctggcgtcagcatttataatcctggtgctcatgggcacctgggcattcttagctgcgggaggcagctgccgaagcctgaaactctgcctgctctgccaagacaagaactttcttctttacaaccagcgctccagataacctcagggaaccagcacttcccaaaccgcagactacatctttagaggaagcacaactgtgcctttttctgaaaatccctttttctggtggaattgagaaagaaataaaactatgcagatatgcgttccattcacttggctttcacacaactgctctccgaaaggggtgctcagtggtgtgcgtcctggctgcacgagaatcacctgggacagtgtaaagccgactgattctgggctccaccttccagagctaattggcctgggcacgtggtgagttttaaaagcttcccaggtgattctgatgtgcagccatgttgagacccactggtttggtatccaaataggagcttcctgagaacaccttaagtggatgagaatctggtctttagctgtctcctaactcaactcgtgctgagcaagtaagtatctgaatgtcaaatcctggttatcttttatcttcctaagttctgaagtcacaaaaggctaaagggctatcacccctgctcactgtttgcgtgtacttcaccatcttaggagaacacggtaggttgggcttctaaatgcaataataaattacgctgactgtggtaacttagccaaagtaagatactgattaagccgtatttttctgaagtgcttccattccaggttttgctttctgaggcattacattgtttttgagtatagattacattttattaactaaaaatgattgttttgtgacttccttgggaaggtattttaaaatcaggaatttttatgcaatgtctataagcctgtttaaagctttccatgggctctgccccaaggccgttggctgcagcgttcaccatctgagtgccagttgctggactagttgaggtgaagtgcattgttttctctctgagcagctgtgcggggagctgagtgatgtgccctgggacaggcttcactggagctggtggaagtataaccagaagcacaaggaaatgagccaaaagggtgtcattgacacttttcatttgctcctgtgatactaacaacactttcacccaaatggcttaatgtaatattggaaatagatcttaaactgccaaatctcacactattgcataatccatatgctctttagatctagtcagtgtctctgggttttggtagcagatacagcgttccctttacaggaatacccaaggtgttctttcagcttccagacaggtcctttgatttcctttataaagggaaaattctggcaaatcgtgcctttactattagaaattgttcccagttgatgtcttttggggagctggtggcatgaaatgcaaatgacctatacattaaagtgatgtctcagtgaataccatacatgcagtagaacattcagaagagaggagcagcaatcctgaggggctgggggagtgacagtggcaggacggatgggcgggtttgacagattgtggtgggaagaagaatgatcatgtttaaagctaacatagccagtgttttgggctagccacacatcattccagagaccaaaaccttactcatgaactagacctttatcgatatcagtgaacccccatgtttaaaatattagaatgtttagagataaaatagagataatagagataaaagaagaggagggcttctatcaatgctgtaaacagtctgataagcgactgtggttattcccctaaagtttacttcagcactaacactagtgcttccgctggagtttgcagttttccagctttatacaggattttcctttgactggaagagtcaaggatatagagactcaacagtgacatttattgtacaacatcaaggggaataggatactcatcaaactgggattattcttatcaaaacatggtcttctttgaataagaaaaatacatagttggttattatggacttaaaactgtgttaaatggatattctgataaaatatttgctgctctgtagagtgtggaaagtctgagaatattagctttactcatcttgagctttgaggatgttctctgtacgccgatggtttcatattaactaaaaaagctgggtattgtaaaatctcatttataaaaactcagatgagaagaaaattttctttgatggtgagactgttgtcttagttcaggaaattatttaataatcctttgttacctgtgaatgaaggaactttgtaattctgatttatcgtaaaacatgagcctttccagagtcagcttagacactgttgtcgcaaatagccatgctttgccttatgccaaggaggcccagagggagggcctagtcttcctctgttgctgtacatatattgaaatgcttttttttttttattttgcatttgttatctataatgagctttctgagccctgatattatgtgagacaaacaggagttattgatgttatacactcccttccattcaggattttctgcttggagggaaatatgttgaccttagagaattgtgaatattgttgcaattcttgaatatattaccatgtgaataatagagactgtgttgctctctagtataagctatatttatttttgattcatttgaattactagttataactggagaaattttgttacctctatcctggcttgcctgactggctgtataatagcagcagcctcttttagagcatcttaatgaaaacatggatgaaaggaattaatgatgatatctgcagactgcgtagaaaatggcttttgttcccagcgttaacattttcttctcaatcacatttcaatgtttgtggagagtggcagattcacaccagaaacactaggtgttcatatccatagcatggatgcagaataagcagttgggagagaagcttcttcctacctggtactcctcccattcacctcagcccagccccagacaggcgttagcattcagtgtgggccctcaggcagccctgaagcctggctgggtcatcagatgggggcagcctgtgacgggcaccagcggcctgattccagggaagagttcctggagggtgttggctgtttttgttagctcagtttttttctgggctccaccattcctaactccaggtagacaagatagatgtcacacacaacaattttaaagtattttgcttagtgcattttgtttatgattgcagtgtttgtttcttatttaataggctttttacttcattctattaaattttagtgtttagaagaggcgggtactgtcactgtgtaaaatatgtaatattttatatgttataccatgtcatatatacttgcaatatcagaccttgcattcaatatacaatgcaattgactctttgcagacctgcatttttcagtgaacaataaaaagattgtctggcactcctca

SEQ ID NO: 108082 - DNA, 872 bp, Homo sapiens
  Payload ID: 1238
  Gene Symbol: APH1B
  Gene Name: APH1B gamma secretase subunit
  ENST ID: ENST00000380340
  CDS Start-End: 15-260
tttccgcggtggccatgactgcggccgtgttcttcggctgcgccttcattgccttcgggcctgcgctcgccctttatgtcttcaccatcgccaccgagccgttgcgtatcatcttcctcatcgccggccgaagggtggaaacctgtaaaaacaccgaagcacctgactgtgcgtctccttctgggagcttgagctttcttctggttggtgtctctactgatttcgtcccttgtttggttcatggcaagagtcattattgacaacaaagatggaccaacacagaaatatctgctgatctttggagcgtttgtctctgtctatatccaagaaatgttccgatttgcatattataaactcttaaaaaaagccagtgaaggtttgaagagtataaacccaggtgagacagcaccctctatgcgactgctggcctatgtttctggcttgggctttggaatcatgagtggagtattttcctttgtgaataccctatctgactccttggggccaggcacagtgggcattcatggagattctcctcaattcttcctttattcagctttcatgacgctggtcattatcttgctgcatgtattctggggcattgtattttttgatggctgtgagaagaaaaagtggggcatcctccttatcgttctcctgacccacctgctggtgtcagcccagaccttcataagttcttattatggaataaacctggcgtcagcatttataatcctggtgctcatgggcacctgggcattcttagctgcgggaggcagctgccgaagcctgaaactctgcctgctctgccaagacaagaactttcttctttacaaccagcgctccagataacctcagggaaccagcacttc

SEQ ID NO: 108083 - DNA, 685 bp, Homo sapiens
  Payload ID: 1238
  Gene Symbol: APH1B
  Gene Name: APH1B gamma secretase subunit
  Uniprot ID: Q8WW43
  ENST ID: ENST00000380343
  CDS Start-End: 15-665
tttccgcggtggccatgactgcggccgtgttcttcggctgcgccttcattgccttcgggcctgcgctcgccctttatgtcttcaccatcgccaccgagccgttgcgtatcatcttcctcatcgccggagctttcttctggttggtgtctctactgatttcgtcccttgtttggttcatggcaagagtcattattgacaacaaagatggaccaacacagaaatatctgctgatctttggagcgtttgtctctgtctatatccaagaaatgttccgatttgcatattataaactcttaaaaaaagccagtgaaggtttgaagagtataaacccaggtgagacagcaccctctatgcgactgctggcctatgctttcatgacgctggtcattatcttgctgcatgtattctggggcattgtattttttgatggctgtgagaagaaaaagtggggcatcctccttatcgttctcctgacccacctgctggtgtcagcccagaccttcataagttcttattatggaataaacctggcgtcagcatttataatcctggtgctcatgggcacctgggcattcttagctgcgggaggcagctgccgaagcctgaaactctgcctgctctgccaagacaagaactttcttctttacaaccagcgctccagataacctcagggaaccagcacttc

SEQ ID NO: 108084 - DNA, 758 bp, Homo sapiens
  Payload ID: 1238
  Gene Symbol: APH1B
  Gene Name: APH1B gamma secretase subunit
  ENST ID: ENST00000560890
  CDS Start-End: 193-758
agtcctgctaattccctgaatcaggccactgccatctcatgcctgcgttgcactgaggacctccagtctggaagctcattttccatatctttacaaagcagatctatcactctgaactgttgtctcgacccgagttttgatagagctttcttctggttggtgtctctactgatttcgtcccttgtttggttcatggcaagagtcattattgacaacaaagatggaccaacacagaaatatctgctgatctttggagcgtttgtctctgtctatatccaagaaatgttccgatttgcatattataaactcttaaaaaaagccagtgaaggtttgaagagtataaacccaggtgagacagcaccctctatgcgactgctggcctatgtttctggcttgggctttggaatcatgagtggagtattttcctttgtgaataccctatctgactccttggggccaggcacagtgggcattcatggagattctcctcaattcttcctttattcagctttcatgacgctggtcattatcttgctgcatgtattctggggcattgtattttttgatggctgtgagaagaaaaagtggggcatcctccttatcgttctcctgacccacctgctggtgtcagcccagaccttcataagttcttattatggaataaacctggcgtcagcatttataatcctggtgctcatgggcacctgggcattcttagctgcgggaggcagctgccgaagcctgaaactctgcctgct

SEQ ID NO: 108085 - DNA, 672 bp, Homo sapiens
  Payload ID: 1238
  Gene Symbol: APH1B
  Gene Name: APH1B gamma secretase subunit
  ENST ID: ENST00000560353
  CDS Start-End: 7-672
gtggccatgactgcggccgtgttcttcggctgcgccttcattgccttcgggcctgcgctcgccctttatgtcttcaccatcgccaccgagccgttgcgtatcatcttcctcatcgccggagctttcttctggttggtgtctctactgatttcgtcccttgtttggttcatggcaagagtcattattgacaacaaagatggaccaacacagaaatatctgctgatctttggagcgtttgtctctgtctatatccaagaaatgttccgatttgcatattataaactcttaaaaaaagccagtgaaggtttgaagagtataaacccaggtgagacagcaccctctatgcgactgctggcctatgtttctggcttgggctttggaatcatgagtggagtattttcctttgtgaataccctatctgactccttggggccaggcacagtgggcattcatggagattctcctcaattcttcctttattcagaccttcataagttcttattatggaataaacctggcgtcagcatttataatcctggtgctcatgggcacctgggcattcttagctgcgggaggcagctgccgaagcctgaaactctgcctgctctgccaagacaagaactttcttctttacaaccagcgctccagataacctcagggaaccagcacttc

SEQ ID NO: 108086 - DNA, 1455 bp, Homo sapiens
  Payload ID: 1238
  Gene Symbol: APH1B
  Gene Name: APH1B gamma secretase subunit
  ENST ID: ENST00000559971
  CDS Start-End: 1-60
ctttatgtcttcaccatcgccaccgagccgttgcgtatcatcttcctcatcgccgggtgaggcggtcgcgtcgggaaacccggacgccggggctcccctcccccgctggggttacccgcgaccctcggcgcccccaccgcgcggctcgaccttgttgcgtttcagacgggaggagggttgagagggggagagcggagatccggctccccaaaggcgcctcgccctcttaggaagaagcgcacactggggagctttcttctggttggtgtctctactgatttcgtcccttgtttggttcatggcaagagtcattattgacaacaaagatggaccaacacagaaatatctgctgatctttggagcgtttgtctctgtctatatccaagaaatgttccgatttgcatattataaactcttaaaaaaagccagtgaaggtttgaagagtataaacccaggtgagacagcaccctctatgcgactgctggcctatgtttctggcttgggctttggaatcatgagtggagtattttcctttgtgaataccctatctgactccttggggccaggcacagtgggcattcatggagattctcctcaattcttcctttattcagctttcatgacgctggtcattatcttgctgcatgtattctggggcattgtattttttgatggctgtgagaagaaaaagtggggcatcctccttatcgttctcctgacccacctgctggtgtcagcccagaccttcataagttcttattatggaataaacctggcgtcagcatttataatcctggtgctcatgggcacctgggcattcttagctgcgggaggcagctgccgaagcctgaaactctgcctgctctgccaagacaagaactttcttctttacaaccagcgctccagataacctcagggaaccagcacttcccaaaccgcagactacatctttagaggaagcacaactgtgcctttttctgaaaatccctttttctggtggaattgagaaagaaataaaactatgcagatatgcgttccattcacttggctttcacacaactgctctccgaaaggggtgctcagtggtgtgcgtcctggctgcacgagaatcacctgggacagtgtaaagccgactgattctgggctccaccttccagagctaattggcctgggcacgtggtgagttttaaaagcttcccaggtgattctgatgtgcagccatgttgagacccactggtttggtatccaaataggagcttcctgagaacaccttaagtggatgagaatctggtctttagctgtctcctaactcaactcgtgctgagcaagtaagtatctgaatgtcaaatcctggttatcttttatcttcctaagttctgaagtcacaaaaggctaaagggctatcacccctgctcactgtttgcgtgtacttcaccatcttaggagaacacggta

SEQ ID NO: 108087 - DNA, 1469 bp, Homo sapiens
  Payload ID: 1239
  Gene Symbol: APITD1-CORT
  Gene Name: APITD1-CORT readthrough
  ENST ID: ENST00000400900
  CDS Start-End: 417-911
ggagctcctgataatgtgtactgcgttacatgatctgtaaatcgtgggctacgcatcctctacacccgactggaacacgctttgcacctatgcgcacacgtgtttcgcggagagtggtgctcagcgttgtgccaggcgctgaatcaggctctggggtgcagcagtgacctcggtggtcatgtccccgcgtcgcccggccacctccgcagagcaagctgagcagggggctggctggaggccgacggcggaatcccctcaacggagcgccgccagggggcgcgcgaggcagggcggagctgcgtactttgtccgcccgcgcggcccgtcgctcgcgccgcggcgggaaaatccgacctggccgcgcaccaccgccccttctcggccctcctgcgtttgcccagggtcggcccgcagtgatggaggaggaggcggagaccgaggagcagcagcgattctcttaccaacagaggctaaaggcagcagttcactatactgtgggttgtctttgcgaggaagttgcattggacaaagagatgcagttcagcaaacagaccattgcggccatttcggagctgactttccgacagtgtgaaaattttgccaaagaccttgaaatgtttgcaagacatgcgaaaagaaccacaattaacactgaagatgtgaagctcttagccaggaggagtaattcactgcatatgcaggaagcggcaggaataaggaaaagcagcctcctgactttcctcgcttggtggtttgagtggacctcccaggccagtgccgggcccctcataggagaggaagcccgggaggtggccaggcggcaggaaggcgcacccccccagcaatctgcgcgccgggacagaatgccctgcaggaacttcttctggaagaccttctcctcctgcaaataaaacctcacccatgaatgctcacgcaagtgtaatgacagacctgaataaaatgtattaagcagcagtgatctttcctctcctccttcccaagtcatttgaaaagtgtttgttatttaaattccaataatgcccaatactgacgtgtcttgagtaatttggaacccaaagtgaagatctttgataaagatttttttgtggttcgactggactgtgctgagtgcgggcactgggcttttcttctgatgttcattatggtgctgggaagctctgtctttgatttaaaataaaatagctaaaggctacacaattaagagttcagaataacatcttatttcagtttatgaattgatatgaattgtctaatttaaaaaatatttccctcacattaaaagcaaatttttaatatcaggctcgaagagcaaaatgattattcctcatgttttagctgaaattaattttaaaacatattaaacagaaaacctgctgacatgcctgtgaaactgatactcgaacttgctgttatgtaccagttttaattagtagcttaatgggttgcaa

SEQ ID NO: 108088 - DNA, 626 bp, Homo sapiens
  Payload ID: 1239
  Gene Symbol: APITD1-CORT
  Gene Name: APITD1-CORT readthrough
  ENST ID: ENST00000470413
  CDS Start-End: 135-368
gaggcagggcggagctgcgtactttgtccgcccgcgcggcccgtcgctcgcgccgcggcgggaaaatccgacctggccgcgcaccaccgccccttctcggccctcctgcgtttgcccagggtcggcccgcagtgatggaggaggaggcggagaccgaggagcagcagcgattctcttaccaacagaggctaaaggcagcagttcactatactgtgggttgtctttgcgaggaagttgcattggacaaagagatgcagttcagcaaacagaccattgcggccatttcggagctgactttccgacagtgtgaaaattttgccaaagaccttgaaatgtttgcaagcatatgcaggaagcggcaggaataaggaaaagcagcctcctgactttcctcgcttggtggtttgagtggacctcccaggccagtgccgggcccctcataggagaggaagcccgggaggtggccaggcggcaggaaggcgcacccccccagcaatctgcgcgccgggacagaatgccctgcaggaacttcttctggaagaccttctcctcctgcaaataaaacctcacccatgaatgctcacgcaagtgtaatgacagacctgaataaaatgtattaagcagca

SEQ ID NO: 108089 - DNA, 1326 bp, Homo sapiens
  Payload ID: 1239
  Gene Symbol: APITD1-CORT
  Gene Name: APITD1-CORT readthrough
  ENST ID: ENST00000602296
  CDS Start-End: 487-918
gcgggcgccggggtccggcggcgagaggccaccttctggccttgcgatgaatcctcggtttccccttctcagatggggttttcgtgagggtacaacgtcggcattagacattccaggtgacgcccgtacgcggtgggcggttcgggccggagctctggaacgctggccctggaggcgtcgacccctcgttactgatgcagggacgcggtgcggaccagtcaggcccagagctcgtccttagatgtgggttcgaatctctgccccgccaacttgtgatcgtatcgactcggcccagacgcaattttcttctctgcaaaatcgtcataagaataatcacttgtcagggtagctgcgggcatcccattcgttcctttcatcagcgccgggcatatggggcgtcagaggctgagaacgttgccgtgaagaggcttaaaagcaagacccggagtggcgaccttaaagaggacggactgaagaaacgcgggaatgagctccagacgcgggagtttcctctctacaaagttacactgcagcagctgtctaccctgccccttgtcttttgagaagttcaaaccttcagaaaagttgcaagaacacgaaaattttgccaaagaccttgaaatgtttgcaagacatgcgaaaagaaccacaattaacactgaagatgtgaagctcttagccaggaggagtaattcactgcatatgcaggaagcggcaggaataaggaaaagcagcctcctgactttcctcgcttggtggtttgagtggacctcccaggccagtgccgggcccctcataggagaggaagcccgggaggtggccaggcggcaggaaggcgcacccccccagcaatctgcgcgccgggacagaatgccctgcaggaacttcttctggaagaccttctcctcctgcaaataaaacctcacccatgaatgctcacgcaagtgtaatgacagacctgaataaaatgtattaagcagcagtgatctttcctctcctccttcccaagtcatttgaaaagtgtttgttatttaaattccaataatgcccaatactgacgtgtcttgagtaatttggaacccaaagtgaagatctttgataaagatttttttgtggttcgactggactgtgctgagtgcgggcactgggcttttcttctgatgttcattatggtgctgggaagctctgtctttgatttaaaataaaatagctaaaggctacacaattaagagttcagaataacatcttatttcagtttatgaattgatatgaattgtctaatttaaaaaatatttccctcacattaaaagcaaatttttaatatca

SEQ ID NO: 108090 - DNA, 571 bp, Homo sapiens
  Payload ID: 1239
  Gene Symbol: APITD1-CORT
  Gene Name: APITD1-CORT readthrough
  ENST ID: ENST00000602787
  CDS Start-End: 84-500
gccgcggcgggaaaatccgacctggccgcgcaccaccgccccttctcggccctcctgcgtttgcccagggtcggcccgcagtgatggaggaggaggcggagaccgaggagcagcagcgattctcttaccaacagaggctaaaggcagcagttcactatactgtgggttgtctttgcgaggaagttgcattggacaaagagatgcagttcagcaaacagaccattgcggccatttcggagctgactttccgacagtgtgaaaattttgccaaagaccttgaaatgtttgcaagacatgcgaaaagaaccacaattaacactgaagatgtgaagctcttagccaggaggagtaattcactgctaaaatacatcacagacaaaagtgaagagattgctcagattaacctagaacgaaaagcacagaagaaaaagaagtcagaggatggaagcaaaaattcaaggcagccagcagaggctggagtggtggaaagtgagaattaaagtccctcgccgcttggaaagtgcagccttctacagcatatgcaggaagcggcaggaataaggaaaagcag

SEQ ID NO: 108091 - DNA, 494 bp, Homo sapiens
  Payload ID: 1239
  Gene Symbol: APITD1-CORT
  Gene Name: APITD1-CORT readthrough
  ENST ID: ENST00000465026
  CDS Start-End: 33-182
ccttaaagaggacggactgaagaaacgcgggaatgagctccagacgcgggagtttcctctctacaaagttacactgcagcagctgtctaccctgccccttgtcttttgagaagttcaaaccttcagaaaagttgcaagaacacgacatgcgaaaagaaccacaattaacactgaagatgtgaagctcttagccaggaggagtaattcactgcatatgcaggaagcggcaggaataaggaaaagcagcctcctgactttcctcgcttggtggtttgagtggacctcccaggccagtgccgggcccctcataggagaggaagcccgggaggtggccaggcggcaggaaggcgcacccccccagcaatctgcgcgccgggacagaatgccctgcaggaacttcttctggaagaccttctcctcctgcaaataaaacctcacccatgaatgctcacgcaagtgtaatgacagacctgaataaaatgtattaagcagca

SEQ ID NO: 108092 - DNA, 9350 bp, Homo sapiens
  Payload ID: 1240
  Gene Symbol: A1CF
  Gene Name: APOBEC1 complementation factor
  Uniprot ID: Q9NQ94
  ENST ID: ENST00000282641
  CDS Start-End: 282-2042
tttgatatgacgattagagcataacccgagtgacacgttgaattcgccataatcaaggaaaccttttccgggtggggatctctgaaattactcagataacagtgctgtgccaaaaacctgtggattttctctacaaaaattatcatgactgttatctttttgatggaaaagatgaagttcagcgaagaacaaatctacaacttggccagaagactgtagactttgccttcaaagagtgagcaaccctaattaacctgattttttgctgataatcactctcaatggaatcaaatcacaaatccggggatggattgagcggcactcagaaggaagcagccctccgcgcactggtccagcgcacaggatatagcttggtccaggaaaatggacaaagaaaatatggtggccctccacctggttgggatgctgcaccccctgaaaggggctgtgaaatttttattggaaaacttccccgagacctttttgaggatgagcttataccattatgtgaaaaaatcggtaaaatttatgaaatgagaatgatgatggattttaatggcaacaatagaggatatgcatttgtaacattttcaaataaagtggaagccaagaatgcaatcaagcaacttaataattatgaaattagaaatgggcgcctcttaggggtttgtgccagtgtggacaactgccgattatttgttgggggcatcccaaaaaccaaaaagagagaagaaatcttatcggagatgaaaaaggttactgaaggtgttgtcgatgtcatcgtctacccaagcgctgcagataaaaccaaaaaccgaggctttgccttcgtggagtatgagagtcatcgagcagctgccatggcgaggaggaaactgctaccaggaagaattcagttatggggacatggtattgcagtagactgggcagagccagaagtagaagttgatgaagatacaatgtcttcagtgaaaatcctatatgtaagaaatcttatgctgtctacctctgaagagatgattgaaaaggaattcaacaatatcaaaccaggtgctgtggagagggtgaagaaaattcgagactatgcttttgtgcacttcagtaaccgagaagatgcagttgaggctatgaaagctttaaatggcaaggtgctggatggttcccccattgaagtcaccctagcaaaaccagtggacaaggacagttatgttaggtatacccgaggcacaggtggaaggggcaccatgctgcaaggagagtatacctactctttgggccaagtttatgatcccaccacaacctaccttggagctcctgtcttctatgccccccagacctatgcagcaattcccagtcttcatttcccagccaccaaaggacatctcagcaacagagccattatccgagccccttctgttagaggggctgcgggagtgagaggactgggcggccgtggctatttggcatacacaggcctgggtcgaggataccaggtcaaaggagacaaaagagaagacaaactctatgacattttacctgggatggagctcaccccaatgaatcctgtcacattaaaaccccaaggaattaaactcgctccccagatattagaagagatttgtcagaaaaataactggggacagccagtgtaccagctgcactctgctattggacaagaccaaagacagctattcttgtacaaaataactattcctgctctagccagccagaatcctgcaatccaccctttcacacctccaaagctgagtgcctttgtggatgaagcaaagacgtatgcagccgaatacaccctgcagaccctgggcatccccactgatggaggcgatggcaccatggctactgctgctgctgctgctactgctttcccaggatatgctgtccctaatgcaactgcacccgtgtctgcagcccagctcaagcaagcggtaacccttggacaagacttagcagcatatacaacctatgaggtctacccaacttttgcagtgactgcccgaggggatggatatggcaccttctgaagatgcttttttaaatttaagaataagacacacaaaactctattaaaaaaaaaaaagaaataaacctctaactcggtccccaatgatcataaataatatgtttcctaaagaaatgcctttccagagactgtatagcttataccaattatagaatcatgaagtaagaacgttattctgaaatgaaatcaaatgttaaagagccttttgtttaacagaaagctggagagccactgccccaaaagttgttcttccagtcttcctgagtgtttggggagtatgtttacaaatcctgccagggtgaagagagatcttgtagctggcaagatttgggagggatggagcagacctgggcagtcagtaataatcaagggaagccaagtaaactccagagtcttacctctggctcacagctgcttttgtgatacacaaagtcacaaagaggaaaagggaagggaggaggttgcttttcaaaatgcattcaccatggctcactgtgtggggcatgattgcaggcctgagctcatgaaagactgtccaagattttgtggtttcaacctctcttcagcctgaaaattccatccagtcgatttgtcacagatcaggatcttcctgtcccctgcagcccatggggacttcctagaaatagatatgatatgttgtagatgtggttaaaacaaatccaggccccattgtttattcagctcattagtccacacctatttttccctagaactcctaccttttccaataatcatgccagcatgaaatgaccttttctactttaaaattttttgacttgttcatattgcttgattttcatcatctcagactcatttttctcctacctaatatcataaaaaagtaaatcagatatacagaatatcatttatgatacttcttcctttcagcaaattgactgaaaagtcattttaaagagagaagtgcagatttgctctcatttctttgatattgttgcagtatccaccccaccatctagcaatcagagatgcttatattaacttgggattagctttgcattatctaacccatttattttaaatctgccaggaaatcctctaactttccttcctttttgtttcagtaagtatcaggcagcttcaccatacctgagtccttttgtcttgaagctgccacagaaaaatcttacagcaatcattgctgattagaaactgtttcagacaatcagcatgggtgttatttaccaaattccccccagagtcctaggcctcttctccagaaatatctgatgatgaagtgaggggagggcaacggtgctacaaaacacggaacagaggtaaagagaaggcactactttcttgccatacttgtaaatgattgctttgttcaaacataaataatcttaagtccaacaccaaatacctgttactcctacatcaatctcattagtggtttaagacacagtactagaattttcattttttaaaatcccttggcccttaaaaaaatttacagaacacaaaggaaaacataaacacaaagacatggaaaattttgtcaactccttaatggaattctgtgatcaaaaagcaggccagattctaatcaaaatcaggtaaattttaatcacaatcagaagtacttgtaacatttcagttgtcctaactccaatgagataacaaagcctccaaggctacagctgaaactctgaaaggccctgtgctttctactttacatttagcgtctaatatttcctaggacagtagttcccaaagtaggctgtacattagaatctcctggagagctttttaaatgctaatgccaataacatatctcataaaatttacactagaatttccttggatgggtgcctggcatcagtattttttaatgatccctaggtgatttcaatgtgcacctaggtttgggaattgctatattcttgtatttatactctatctctttatttcttttcctttttatttcacttttagtaaatagaaaaatgcaattaaaaaatcatctaagttaagacaaatagccaaatcatatttatcccataaatagtatgaatttaaatgtaacttacgtaggcttcaaactaactctaaaaatgagaaagtaaaacaatcttgtcctaaaacaattcttagatccaaatttacactcccctacagatctgcttttattctcaaagacagtgattacattgacataacaaatgtccattggggcaggcaaatttctactgagtctaaaaagcattccaaattctaggagcaaaagttctgattttccttaaaatctttgcaaataaacagcaaagggtattctggatgtcttgtcaatgcaaattaggtttgatttagagaagttttaaatttaatcgcaatgaaaagattagttaatacatgaatctttttatgagaaaaaatcattattctggataaagtcataattgtttgtttacaatattaagagcagacacctaaacatacaataataccaaagtattgagaaaattaccactggaacaccatctcaagttatcacaccatttacctctttagagccagttttgtataagtaggtagaagtggttttggtttttttgctaaaattttactttgttttagtaatatctagggaatactttgaattccattaaaataccttcatagaaagtgttaatgtgtctaccatgccatatgtttatttttactttccccaagttaggtagatagagcaagtcctgctaccataagtttaaaattattaagacaacgggcttttttaaattgctggtagaaccaaaggctaattttgcataggtttatatttttagacttaagaaattagcacctatataataccttcataccttctgcatcactatcaatttttctgtaatttcttatttgaatgcttcctaattctttacagaaaaaattaaaatttgtcacccaaccaggtgataataacaaaacaataatttaggaacatccagtaaatttgaattagttctctaaattttggtaattaatagcttattgataattaaaatcagcctaatgttgcttaagtaggaggaaattgatcagcaatgggattgggtatctattttctttcctataaaagtgctgcctcttctcaaattgctttatttctctcccactgcattagtatatctagaacagcaccttcaactgcaacaaaatataattctcctagatgactaggatatcctccaatctggtatcatgccaaacaacactatgtttggggaacagcacccgaaatgctgctaaaaagctacctcatgtcaagaaaatatggatttcaaaaaatatctggcacagtggcccatgcctataaccccagtactttgggaggccaaggcaggaggattgctggaggccaggagttcaagaccagcctgggcaacatggagagactccgcctctacaaaaaaaaaaaaaacaaatttaatttaattggccagttgtggtggcgtgggcctgtggtcccagctacttgggaagctaaggcaggaggattgctggaggcctggagggcaaggctgcagtgagccatgttcacatcgctgcactccagcctgggtgacagagcaagaccctgtctccaaaaaagcaaaaataaatatctaacaaaaaggaacctgtttccaaaccacagtttcttaactttttcatgatggaatagaaattaaactataagtatatactgataatagctgtgcaggaaattggtttttattttacttaaaagtattttttagaaaaaatgttattctgattgcatagattagcaaaatattgcatcaatataatgttccatttttattaatttttgttatattctaaatgaccgttttataattctgtcttggacaactgggccacagttagaatccacatagacagggaggttcttaggtgtgccatttgtagaataaagggcaatcaagttaatattcggggtaaattttcattgcattctaacctatgaagtttgataaagtatattattattgaacaactctaacactaagatttcctaaaagtaacttacaacaaaaaatgaactatgtgctcaatattcacataaagtcatgattattctcttcttgcattcatataaaagttcccagggggaagaaaatatatctaaaaattagactagaaacttggcactttttatgtattgtagatacactttcatatattgtaaatacatctgttaaagataaaactaagtttctaacatagcactacaaggaaactttggataaatatttttaaaaagaaaatgttaataggataacttaagattttgtatatacttattggaagacaggaagaaactaggcagtaaatattcctacctgacgtgcaaccattgtcaatcaggttttgttaaactgtcaaatttgattttgaaattttagtttgcccaaataatatcttgaaaatgctctgaattttactagaacatattcatagaaagtgtaatgtatctaccaggctctatgtttgtgtttgccaacattagaaaaacaaagtaagttgcgctataatgagtgaaactaaggaaaatgagatttttctgactcccattccctctcttaaaaagtaaaatatttaagctttttttattaaaggaaaaatgggtacagaatactctattgccctccaaatgtccaacatttttaaagccatgttgtccaacaatgtttatacagaaaatagaatgcataggtttaatatagatagcaatgtatatgtaggctcatttgtgggagattgcaaactttatgtgcccccagttctccttggttttgtaggaaagctaaaagaaaaccttgtactctcactaataatgaaattcatagccaatttagaaagggaaaataacctgaaaaccaaaatacctcattcatctgaagatgcctggaataaaatatggaattcttctgtacctacctcccccttacagacttttctcctattttgagagagaaattcaagaagaagaatacagcttgttctctttccacaaatgatactttgtctaagggaataggagataccaagaaacagtatctttaaaaaagtaagctgcccacaggccttcttggagaatgaagaatatcagccccattcagggtttaccaatgtctctctgaggtgacaatacattctggttttccaggacagtcctggcttaggtctgctgtccttctataaatattaacaatgatccctcttatttccaaacgtgtcccagtttagacaacaaattatacagtgtctgcccccaacacacacacacacaccccaccatctttatgggttgttgttgttttcttgttgtttttaattttgtagaattggctttgtcttctccaaagcagataacagcttaaactaaagagcctagctacttctttctgactgagcagggtcatagtaaacagagaagaatggatcacttcctcctctgaaatctccatcaatccactttctgtccaactatctctctacccagcctatttttggtcctagttttcctctcataacccctgggctgtgagtcctgagttctgccttcatatggcagagcaagctagtcattattatgccaggttaggtggtggggcaagacaaaagatagctcttggggacacttgcttggtctgtagagatccacagggcactagtagggtattagagcatttattggtttctttcttccttgagttgagttacttctatcccaaaacagacaggtcttacgttaaccttcaccttaaaaaggatattgccttttttccttctgcttcacaaatttgctccaacactaattcccttgcatttgatttcatcattatgattgttcatcaaccattcttcacgaaaaatcctcacatcacgtcatataaaggttttattatttttaatggaaaataacattgagagattattttcctttttcataaaatttccctttttccctccctctattctcttcactaacattggaaattaaacaagttttacaggctctattgttattaaccctcaaatctattcttcagagaatatatgatcagcctgtgtttactatgcacctactcttataccagaaactgtgaatacaaatacatatatttcctacttctctctttaattggggcacacagtcccatggtccattctgcatttttcaaaattgaatataattgcaacacctgataggttttgccacttagaattctgaaaataaatcaactctgttctaaaccttaagtttccactattattgccaaactctggactgatacaataagccttttaaaaggtgaatttaacacttcacctattatggttatttaagtaaaatgagttttcaaatatttcccccaggagaaatataaaggactatgcaaaaatagaaggagaaaaaggttagttagaggtccagaaggagaattaaaacatggaattgataaattcacctactgatttatgatgttaatgagcaggtacctatacattttatttacttgaaaacattttggccattaactatttctgttttctaaatacatttgtgtttataaaattttaaaatctatatcacaagacttagacatgcctttctttgcaataaagtatatatacctttttacaaatgtaaattttattttgaaacttggcattttctttataattcctaagatatctttgggcacacagactacagataaatctatttaaatcaattcatcattatcactggtttaaatatttaatgtaaccattggaatttttattcttattccttcagagaattctccttttcttctatgtttctgactgcaatacagcccgatattgttattccctatatcttaatgaaaagcaagctgtcagcaaaatgcatttatagtttccagatgtttaacaatctctttcttcttttcttttttgttattatttttatttatgtgaagttagttagctgaggtaccaaaaaagagacaaagacagtattaaaaagtgtgcataaagcacttatttttgtactttagtacaatgttttatagaactttgtgatctatctaaatatattaagtaaaattacaccattcacttgttgggaaaataatctttggtttggaagatattaacataatgggcatcttagaatcataaatcacatgaaatgagagacaatgcaatattgtataattcctggatgatgcaattgttttaattgaattttcaagtgccattataaagtttt

SEQ ID NO: 108093 - DNA, 1997 bp, Homo sapiens
  Payload ID: 1240
  Gene Symbol: A1CF
  Gene Name: APOBEC1 complementation factor
  Uniprot ID: Q9NQ94
  ENST ID: ENST00000373993
  CDS Start-End: 46-1830
tgagcaaccctaattaacctgattttttgctgataatcactctcaatggaatcaaatcacaaatccggggatggattgagcggcactcagaaggaagcagccctccgcgcactggtccagcgcacaggatatagcttggtccaggaaaatggacaaagaaaatatggtggccctccacctggttgggatgctgcaccccctgaaaggggctgtgaaatttttattggaaaacttccccgagacctttttgaggatgagcttataccattatgtgaaaaaatcggtaaaatttatgaaatgagaatgatgatggattttaatggcaacaatagaggatatgcatttgtaacattttcaaataaagtggaagccaagaatgcaatcaagcaacttaataattatgaaattagaaatgggcgcctcttaggggtttgtgccagtgtggacaactgccgattatttgttgggggcatcccaaaaaccaaaaagagagaagaaatcttatcggagatgaaaaaggttactgaaggtgttgtcgatgtcatcgtctacccaagcgctgcagataaaaccaaaaaccgaggctttgccttcgtggagtatgagagtcatcgagcagctgccatggcgaggaggaaactgctaccaggaagaattcagttatggggacatggtattgcagtagactgggcagagccagaagtagaagttgatgaagatacaatgtcttcagtgaaaatcctatatgtaagaaatcttatgctgtctacctctgaagagatgattgaaaaggaattcaacaatatcaaaccaggtgctgtggagagggtgaagaaaattcgagactatgcttttgtgcacttcagtaaccgagaagatgcagttgaggctatgaaagctttaaatggcaaggtgctggatggttcccccattgaagtcaccctagcaaaaccagtggacaaggacagttatgttaggtatacccgaggcacaggtggaaggggcaccatgctgcaaggagagtatacctactctttgggccaagtttatgatcccaccacaacctaccttggagctcctgtcttctatgccccccagacctatgcagcaattcccagtcttcatttcccagccaccaaaggacatctcagcaacagagccattatccgagccccttctgttagagaaatttacatgaatgtacctgtaggggctgcgggagtgagaggactgggcggccgtggctatttggcatacacaggcctgggtcgaggataccaggtcaaaggagacaaaagagaagacaaactctatgacattttacctgggatggagctcaccccaatgaatcctgtcacattaaaaccccaaggaattaaactcgctccccagatattagaagagatttgtcagaaaaataactggggacagccagtgtaccagctgcactctgctattggacaagaccaaagacagctattcttgtacaaaataactattcctgctctagccagccagaatcctgcaatccaccctttcacacctccaaagctgagtgcctttgtggatgaagcaaagacgtatgcagccgaatacaccctgcagaccctgggcatccccactgatggaggcgatggcaccatggctactgctgctgctgctgctactgctttcccaggatatgctgtccctaatgcaactgcacccgtgtctgcagcccagctcaagcaagcggtaacccttggacaagacttagcagcatatacaacctatgaggtctacccaacttttgcagtgactgcccgaggggatggatatggcaccttctgaagatgcttttttaaatttaagaataagacacacaaaactctattaaaaaaaaaaaagaaataaacctctaactcggtccccaatgatcataaataatatgtttcctaaagaaatgcctttccagagactgtatagcttataccaattatagaatcatgaagtaagaa

SEQ ID NO: 108094 - DNA, 2211 bp, Homo sapiens
  Payload ID: 1240
  Gene Symbol: A1CF
  Gene Name: APOBEC1 complementation factor
  Uniprot ID: Q9NQ94
  ENST ID: ENST00000373995
  CDS Start-End: 260-2044
tttgatatgacgattagagcataacccgagtgacacgttgaattcgccataatcaaggaaaccttttccgggtggggatctctgaaattactcagtgagcaaccctaattaacctgattttttgctgataatcactctcaatggaatcaaatcacaaatccggggatggattgagcggcactcagaaggaagcagccctccgcgcactggtccagcgcacaggatatagcttggtccaggaatttagaggttcctatagatggaagcagtgtgtctgggcacatgcccagagccagaagcgagcatgagcacagcaattcctggcctcaaaaaaggaaataatgctttgcagtccatcattttgcaaactttgctggaaaaggaaaatggacaaagaaaatatggtggccctccacctggttgggatgctgcaccccctgaaaggggctgtgaaatttttattggaaaacttccccgagacctttttgaggatgagcttataccattatgtgaaaaaatcggtaaaatttatgaaatgagaatgatgatggattttaatggcaacaatagaggatatgcatttgtaacattttcaaataaagtggaagccaagaatgcaatcaagcaacttaataattatgaaattagaaatgggcgcctcttaggggtttgtgccagtgtggacaactgccgattatttgttgggggcatcccaaaaaccaaaaagagagaagaaatcttatcggagatgaaaaaggttactgaaggtgttgtcgatgtcatcgtctacccaagcgctgcagataaaaccaaaaaccgaggctttgccttcgtggagtatgagagtcatcgagcagctgccatggcgaggaggaaactgctaccaggaagaattcagttatggggacatggtattgcagtagactgggcagagccagaagtagaagttgatgaagatacaatgtcttcagtgaaaatcctatatgtaagaaatcttatgctgtctacctctgaagagatgattgaaaaggaattcaacaatatcaaaccaggtgctgtggagagggtgaagaaaattcgagactatgcttttgtgcacttcagtaaccgagaagatgcagttgaggctatgaaagctttaaatggcaaggtgctggatggttcccccattgaagtcaccctagcaaaaccagtggacaaggacagttatgttaggtatacccgaggcacaggtggaaggggcaccatgctgcaaggagagtatacctactctttgggccaagtttatgatcccaccacaacctaccttggagctcctgtcttctatgccccccagacctatgcagcaattcccagtcttcatttcccagccaccaaaggacatctcagcaacagagccattatccgagccccttctgttagaggggctgcgggagtgagaggactgggcggccgtggctatttggcatacacaggcctgggtcgaggataccaggtcaaaggagacaaaagagaagacaaactctatgacattttacctgggatggagctcaccccaatgaatcctgtcacattaaaaccccaaggaattaaactcgctccccagatattagaagagatttgtcagaaaaataactggggacagccagtgtaccagctgcactctgctattggacaagaccaaagacagctattcttgtacaaaataactattcctgctctagccagccagaatcctgcaatccaccctttcacacctccaaagctgagtgcctttgtggatgaagcaaagacgtatgcagccgaatacaccctgcagaccctgggcatccccactgatggaggcgatggcaccatggctactgctgctgctgctgctactgctttcccaggatatgctgtccctaatgcaactgcacccgtgtctgcagcccagctcaagcaagcggtaacccttggacaagacttagcagcatatacaacctatgaggtctacccaacttttgcagtgactgcccgaggggatggatatggcaccttctgaagatgcttttttaaatttaagaataagacacacaaaactctattaaaaaaaaaaaagaaataaacctctaactcggtccccaatgatcataaataatatgtttcctaaagaaatgcctttccagagactgtatagcttataccaattatagaatcatgaagtaagaa

SEQ ID NO: 108095 - DNA, 2116 bp, Homo sapiens
  Payload ID: 1240
  Gene Symbol: A1CF
  Gene Name: APOBEC1 complementation factor
  Uniprot ID: Q9NQ94
  ENST ID: ENST00000373997
  CDS Start-End: 189-1949
tttgatatgacgattagagcataacccgagtgacacgttgaattcgccataatcaaggaaaccttttccgggtggggatctctgaaattactcagataacagtgctgtgccaaaaacctgtggattttctctacaaaaattattgagcaaccctaattaacctgattttttgctgataatcactctcaatggaatcaaatcacaaatccggggatggattgagcggcactcagaaggaagcagccctccgcgcactggtccagcgcacaggatatagcttggtccaggaaaatggacaaagaaaatatggtggccctccacctggttgggatgctgcaccccctgaaaggggctgtgaaatttttattggaaaacttccccgagacctttttgaggatgagcttataccattatgtgaaaaaatcggtaaaatttatgaaatgagaatgatgatggattttaatggcaacaatagaggatatgcatttgtaacattttcaaataaagtggaagccaagaatgcaatcaagcaacttaataattatgaaattagaaatgggcgcctcttaggggtttgtgccagtgtggacaactgccgattatttgttgggggcatcccaaaaaccaaaaagagagaagaaatcttatcggagatgaaaaaggttactgaaggtgttgtcgatgtcatcgtctacccaagcgctgcagataaaaccaaaaaccgaggctttgccttcgtggagtatgagagtcatcgagcagctgccatggcgaggaggaaactgctaccaggaagaattcagttatggggacatggtattgcagtagactgggcagagccagaagtagaagttgatgaagatacaatgtcttcagtgaaaatcctatatgtaagaaatcttatgctgtctacctctgaagagatgattgaaaaggaattcaacaatatcaaaccaggtgctgtggagagggtgaagaaaattcgagactatgcttttgtgcacttcagtaaccgagaagatgcagttgaggctatgaaagctttaaatggcaaggtgctggatggttcccccattgaagtcaccctagcaaaaccagtggacaaggacagttatgttaggtatacccgaggcacaggtggaaggggcaccatgctgcaaggagagtatacctactctttgggccaagtttatgatcccaccacaacctaccttggagctcctgtcttctatgccccccagacctatgcagcaattcccagtcttcatttcccagccaccaaaggacatctcagcaacagagccattatccgagccccttctgttagaggggctgcgggagtgagaggactgggcggccgtggctatttggcatacacaggcctgggtcgaggataccaggtcaaaggagacaaaagagaagacaaactctatgacattttacctgggatggagctcaccccaatgaatcctgtcacattaaaaccccaaggaattaaactcgctccccagatattagaagagatttgtcagaaaaataactggggacagccagtgtaccagctgcactctgctattggacaagaccaaagacagctattcttgtacaaaataactattcctgctctagccagccagaatcctgcaatccaccctttcacacctccaaagctgagtgcctttgtggatgaagcaaagacgtatgcagccgaatacaccctgcagaccctgggcatccccactgatggaggcgatggcaccatggctactgctgctgctgctgctactgctttcccaggatatgctgtccctaatgcaactgcacccgtgtctgcagcccagctcaagcaagcggtaacccttggacaagacttagcagcatatacaacctatgaggtctacccaacttttgcagtgactgcccgaggggatggatatggcaccttctgaagatgcttttttaaatttaagaataagacacacaaaactctattaaaaaaaaaaaagaaataaacctctaactcggtccccaatgatcataaataatatgtttcctaaagaaatgcctttccagagactgtatagcttataccaattatagaatcatgaagtaagaa

SEQ ID NO: 108096 - DNA, 9221 bp, Homo sapiens
  Payload ID: 1240
  Gene Symbol: A1CF
  Gene Name: APOBEC1 complementation factor
  Uniprot ID: Q9NQ94
  ENST ID: ENST00000374001
  CDS Start-End: 141-1901
tttgatatgacgattagagcataacccgagtgacacgttgaattcgccataatcaaggaaaccttttccgggtggggatctctgaaattactcagtgagcaaccctaattaacctgattttttgctgataatcactctcaatggaatcaaatcacaaatccggggatggattgagcggcactcagaaggaagcagccctccgcgcactggtccagcgcacaggatatagcttggtccaggaaaatggacaaagaaaatatggtggccctccacctggttgggatgctgcaccccctgaaaggggctgtgaaatttttattggaaaacttccccgagacctttttgaggatgagcttataccattatgtgaaaaaatcggtaaaatttatgaaatgagaatgatgatggattttaatggcaacaatagaggatatgcatttgtaacattttcaaataaagtggaagccaagaatgcaatcaagcaacttaataattatgaaattagaaatgggcgcctcttaggggtttgtgccagtgtggacaactgccgattatttgttgggggcatcccaaaaaccaaaaagagagaagaaatcttatcggagatgaaaaaggttactgaaggtgttgtcgatgtcatcgtctacccaagcgctgcagataaaaccaaaaaccgaggctttgccttcgtggagtatgagagtcatcgagcagctgccatggcgaggaggaaactgctaccaggaagaattcagttatggggacatggtattgcagtagactgggcagagccagaagtagaagttgatgaagatacaatgtcttcagtgaaaatcctatatgtaagaaatcttatgctgtctacctctgaagagatgattgaaaaggaattcaacaatatcaaaccaggtgctgtggagagggtgaagaaaattcgagactatgcttttgtgcacttcagtaaccgagaagatgcagttgaggctatgaaagctttaaatggcaaggtgctggatggttcccccattgaagtcaccctagcaaaaccagtggacaaggacagttatgttaggtatacccgaggcacaggtggaaggggcaccatgctgcaaggagagtatacctactctttgggccaagtttatgatcccaccacaacctaccttggagctcctgtcttctatgccccccagacctatgcagcaattcccagtcttcatttcccagccaccaaaggacatctcagcaacagagccattatccgagccccttctgttagaggggctgcgggagtgagaggactgggcggccgtggctatttggcatacacaggcctgggtcgaggataccaggtcaaaggagacaaaagagaagacaaactctatgacattttacctgggatggagctcaccccaatgaatcctgtcacattaaaaccccaaggaattaaactcgctccccagatattagaagagatttgtcagaaaaataactggggacagccagtgtaccagctgcactctgctattggacaagaccaaagacagctattcttgtacaaaataactattcctgctctagccagccagaatcctgcaatccaccctttcacacctccaaagctgagtgcctttgtggatgaagcaaagacgtatgcagccgaatacaccctgcagaccctgggcatccccactgatggaggcgatggcaccatggctactgctgctgctgctgctactgctttcccaggatatgctgtccctaatgcaactgcacccgtgtctgcagcccagctcaagcaagcggtaacccttggacaagacttagcagcatatacaacctatgaggtctacccaacttttgcagtgactgcccgaggggatggatatggcaccttctgaagatgcttttttaaatttaagaataagacacacaaaactctattaaaaaaaaaaaagaaataaacctctaactcggtccccaatgatcataaataatatgtttcctaaagaaatgcctttccagagactgtatagcttataccaattatagaatcatgaagtaagaacgttattctgaaatgaaatcaaatgttaaagagccttttgtttaacagaaagctggagagccactgccccaaaagttgttcttccagtcttcctgagtgtttggggagtatgtttacaaatcctgccagggtgaagagagatcttgtagctggcaagatttgggagggatggagcagacctgggcagtcagtaataatcaagggaagccaagtaaactccagagtcttacctctggctcacagctgcttttgtgatacacaaagtcacaaagaggaaaagggaagggaggaggttgcttttcaaaatgcattcaccatggctcactgtgtggggcatgattgcaggcctgagctcatgaaagactgtccaagattttgtggtttcaacctctcttcagcctgaaaattccatccagtcgatttgtcacagatcaggatcttcctgtcccctgcagcccatggggacttcctagaaatagatatgatatgttgtagatgtggttaaaacaaatccaggccccattgtttattcagctcattagtccacacctatttttccctagaactcctaccttttccaataatcatgccagcatgaaatgaccttttctactttaaaattttttgacttgttcatattgcttgattttcatcatctcagactcatttttctcctacctaatatcataaaaaagtaaatcagatatacagaatatcatttatgatacttcttcctttcagcaaattgactgaaaagtcattttaaagagagaagtgcagatttgctctcatttctttgatattgttgcagtatccaccccaccatctagcaatcagagatgcttatattaacttgggattagctttgcattatctaacccatttattttaaatctgccaggaaatcctctaactttccttcctttttgtttcagtaagtatcaggcagcttcaccatacctgagtccttttgtcttgaagctgccacagaaaaatcttacagcaatcattgctgattagaaactgtttcagacaatcagcatgggtgttatttaccaaattccccccagagtcctaggcctcttctccagaaatatctgatgatgaagtgaggggagggcaacggtgctacaaaacacggaacagaggtaaagagaaggcactactttcttgccatacttgtaaatgattgctttgttcaaacataaataatcttaagtccaacaccaaatacctgttactcctacatcaatctcattagtggtttaagacacagtactagaattttcattttttaaaatcccttggcccttaaaaaaatttacagaacacaaaggaaaacataaacacaaagacatggaaaattttgtcaactccttaatggaattctgtgatcaaaaagcaggccagattctaatcaaaatcaggtaaattttaatcacaatcagaagtacttgtaacatttcagttgtcctaactccaatgagataacaaagcctccaaggctacagctgaaactctgaaaggccctgtgctttctactttacatttagcgtctaatatttcctaggacagtagttcccaaagtaggctgtacattagaatctcctggagagctttttaaatgctaatgccaataacatatctcataaaatttacactagaatttccttggatgggtgcctggcatcagtattttttaatgatccctaggtgatttcaatgtgcacctaggtttgggaattgctatattcttgtatttatactctatctctttatttcttttcctttttatttcacttttagtaaatagaaaaatgcaattaaaaaatcatctaagttaagacaaatagccaaatcatatttatcccataaatagtatgaatttaaatgtaacttacgtaggcttcaaactaactctaaaaatgagaaagtaaaacaatcttgtcctaaaacaattcttagatccaaatttacactcccctacagatctgcttttattctcaaagacagtgattacattgacataacaaatgtccattggggcaggcaaatttctactgagtctaaaaagcattccaaattctaggagcaaaagttctgattttccttaaaatctttgcaaataaacagcaaagggtattctggatgtcttgtcaatgcaaattaggtttgatttagagaagttttaaatttaatcgcaatgaaaagattagttaatacatgaatctttttatgagaaaaaatcattattctggataaagtcataattgtttgtttacaatattaagagcagacacctaaacatacaataataccaaagtattgagaaaattaccactggaacaccatctcaagttatcacaccatttacctctttagagccagttttgtataagtaggtagaagtggttttggtttttttgctaaaattttactttgttttagtaatatctagggaatactttgaattccattaaaataccttcatagaaagtgttaatgtgtctaccatgccatatgtttatttttactttccccaagttaggtagatagagcaagtcctgctaccataagtttaaaattattaagacaacgggcttttttaaattgctggtagaaccaaaggctaattttgcataggtttatatttttagacttaagaaattagcacctatataataccttcataccttctgcatcactatcaatttttctgtaatttcttatttgaatgcttcctaattctttacagaaaaaattaaaatttgtcacccaaccaggtgataataacaaaacaataatttaggaacatccagtaaatttgaattagttctctaaattttggtaattaatagcttattgataattaaaatcagcctaatgttgcttaagtaggaggaaattgatcagcaatgggattgggtatctattttctttcctataaaagtgctgcctcttctcaaattgctttatttctctcccactgcattagtatatctagaacagcaccttcaactgcaacaaaatataattctcctagatgactaggatatcctccaatctggtatcatgccaaacaacactatgtttggggaacagcacccgaaatgctgctaaaaagctacctcatgtcaagaaaatatggatttcaaaaaatatctggcacagtggcccatgcctataaccccagtactttgggaggccaaggcaggaggattgctggaggccaggagttcaagaccagcctgggcaacatggagagactccgcctctacaaaaaaaaaaaaaacaaatttaatttaattggccagttgtggtggcgtgggcctgtggtcccagctacttgggaagctaaggcaggaggattgctggaggcctggagggcaaggctgcagtgagccatgttcacatcgctgcactccagcctgggtgacagagcaagaccctgtctccaaaaaagcaaaaataaatatctaacaaaaaggaacctgtttccaaaccacagtttcttaactttttcatgatggaatagaaattaaactataagtatatactgataatagctgtgcaggaaattggtttttattttacttaaaagtattttttagaaaaaatgttattctgattgcatagattagcaaaatattgcatcaatataatgttccatttttattaatttttgttatattctaaatgaccgttttataattctgtcttggacaactgggccacagttagaatccacatagacagggaggttcttaggtgtgccatttgtagaataaagggcaatcaagttaatattcggggtaaattttcattgcattctaacctatgaagtttgataaagtatattattattgaacaactctaacactaagatttcctaaaagtaacttacaacaaaaaatgaactatgtgctcaatattcacataaagtcatgattattctcttcttgcattcatataaaagttcccagggggaagaaaatatatctaaaaattagactagaaacttggcactttttatgtattgtagatacactttcatatattgtaaatacatctgttaaagataaaactaagtttctaacatagcactacaaggaaactttggataaatatttttaaaaagaaaatgttaataggataacttaagattttgtatatacttattggaagacaggaagaaactaggcagtaaatattcctacctgacgtgcaaccattgtcaatcaggttttgttaaactgtcaaatttgattttgaaattttagtttgcccaaataatatcttgaaaatgctctgaattttactagaacatattcatagaaagtgtaatgtatctaccaggctctatgtttgtgtttgccaacattagaaaaacaaagtaagttgcgctataatgagtgaaactaaggaaaatgagatttttctgactcccattccctctcttaaaaagtaaaatatttaagctttttttattaaaggaaaaatgggtacagaatactctattgccctccaaatgtccaacatttttaaagccatgttgtccaacaatgtttatacagaaaatagaatgcataggtttaatatagatagcaatgtatatgtaggctcatttgtgggagattgcaaactttatgtgcccccagttctccttggttttgtaggaaagctaaaagaaaaccttgtactctcactaataatgaaattcatagccaatttagaaagggaaaataacctgaaaaccaaaatacctcattcatctgaagatgcctggaataaaatatggaattcttctgtacctacctcccccttacagacttttctcctattttgagagagaaattcaagaagaagaatacagcttgttctctttccacaaatgatactttgtctaagggaataggagataccaagaaacagtatctttaaaaaagtaagctgcccacaggccttcttggagaatgaagaatatcagccccattcagggtttaccaatgtctctctgaggtgacaatacattctggttttccaggacagtcctggcttaggtctgctgtccttctataaatattaacaatgatccctcttatttccaaacgtgtcccagtttagacaacaaattatacagtgtctgcccccaacacacacacacacaccccaccatctttatgggttgttgttgttttcttgttgtttttaattttgtagaattggctttgtcttctccaaagcagataacagcttaaactaaagagcctagctacttctttctgactgagcagggtcatagtaaacagagaagaatggatcacttcctcctctgaaatctccatcaatccactttctgtccaactatctctctacccagcctatttttggtcctagttttcctctcataacccctgggctgtgagtcctgagttctgccttcatatggcagagcaagctagtcattattatgccaggttaggtggtggggcaagacaaaagatagctcttggggacacttgcttggtctgtagagatccacagggcactagtagggtattagagcatttattggtttctttcttccttgagttgagttacttctatcccaaaacagacaggtcttacgttaaccttcaccttaaaaaggatattgccttttttccttctgcttcacaaatttgctccaacactaattcccttgcatttgatttcatcattatgattgttcatcaaccattcttcacgaaaaatcctcacatcacgtcatataaaggttttattatttttaatggaaaataacattgagagattattttcctttttcataaaatttccctttttccctccctctattctcttcactaacattggaaattaaacaagttttacaggctctattgttattaaccctcaaatctattcttcagagaatatatgatcagcctgtgtttactatgcacctactcttataccagaaactgtgaatacaaatacatatatttcctacttctctctttaattggggcacacagtcccatggtccattctgcatttttcaaaattgaatataattgcaacacctgataggttttgccacttagaattctgaaaataaatcaactctgttctaaaccttaagtttccactattattgccaaactctggactgatacaataagccttttaaaaggtgaatttaacacttcacctattatggttatttaagtaaaatgagttttcaaatatttcccccaggagaaatataaaggactatgcaaaaatagaaggagaaaaaggttagttagaggtccagaaggagaattaaaacatggaattgataaattcacctactgatttatgatgttaatgagcaggtacctatacattttatttacttgaaaacattttggccattaactatttctgttttctaaatacatttgtgtttataaaattttaaaatctatatcacaagacttagacatgcctttctttgcaataaagtatatatacctttttacaaatgtaaattttattttgaaacttggcattttctttataattcctaagatatctttgggcacacagactacagataaatctatttaaatcaattcatcattatcactggtttaaatatttaatgtaaccattggaatttttattcttattccttcagagaattctccttttcttctatgtttctgactgcaatacagcccgatattgttattccctatatcttaatgaaaagcaagctgtcagcaaaatgcatttatagtttccagatgtttaacaatctctttcttcttttcttttttgttattatttttatttatgtgaagttagttagctgaggtaccaaaaaagagacaaagacagtattaaaaagtgtgcataaagcacttatttttgtactttagtacaatgttttatagaactttgtgatctatctaaatatattaagtaaaattacaccattcacttgttgggaaaataatctttggtttggaagatattaacataatgggcatcttagaatcataaatcacatgaaatgagagacaatgcaatattgtataattcctggatgatgcaattgttttaattgaattttcaagtgccattataaagttttaaaaattatcaa

SEQ ID NO: 108097 - DNA, 9517 bp, Homo sapiens
  Payload ID: 1240
  Gene Symbol: A1CF
  Gene Name: APOBEC1 complementation factor
  ENST ID: ENST00000395489
  CDS Start-End: 401-2209
tttgatatgacgattagagcataacccgagtgacacgttgaattcgccataatcaaggaaaccttttccgggtggggatctctgaaattactcagataacagtgctgtgccaaaaacctgtggattttctctacaaaaattatcatgactgttatctttttgatggaaaagatgaagttcagcgaagaacaaatctacaacttggccagaagactgtagactttgccttcaaagagtgagcaaccctaattaacctgattttttgctgataatcactctcaatggaatcaaatcacaaatccggggatggattgagcggcactcagaaggaagcagccctccgcgcactggtccagcgcacaggatatagcttggtccaggaatttagaggttcctatagatggaagcagtgtgtctgggcacatgcccagagccagaagcgagcatgagcacagcaattcctggcctcaaaaaaggaaataatgctttgcagtccatcattttgcaaactttgctggaaaaggaaaatggacaaagaaaatatggtggccctccacctggttgggatgctgcaccccctgaaaggggctgtgaaatttttattggaaaacttccccgagacctttttgaggatgagcttataccattatgtgaaaaaatcggtaaaatttatgaaatgagaatgatgatggattttaatggcaacaatagaggatatgcatttgtaacattttcaaataaagtggaagccaagaatgcaatcaagcaacttaataattatgaaattagaaatgggcgcctcttaggggtttgtgccagtgtggacaactgccgattatttgttgggggcatcccaaaaaccaaaaagagagaagaaatcttatcggagatgaaaaaggttactgaaggtgttgtcgatgtcatcgtctacccaagcgctgcagataaaaccaaaaaccgaggctttgccttcgtggagtatgagagtcatcgagcagctgccatggcgaggaggaaactgctaccaggaagaattcagttatggggacatggtattgcagtagactgggcagagccagaagtagaagttgatgaagatacaatgtcttcagtgaaaatcctatatgtaagaaatcttatgctgtctacctctgaagagatgattgaaaaggaattcaacaatatcaaaccaggtgctgtggagagggtgaagaaaattcgagactatgcttttgtgcacttcagtaaccgagaagatgcagttgaggctatgaaagctttaaatggcaaggtgctggatggttcccccattgaagtcaccctagcaaaaccagtggacaaggacagttatgttaggtatacccgaggcacaggtggaaggggcaccatgctgcaaggagagtatacctactctttgggccaagtttatgatcccaccacaacctaccttggagctcctgtcttctatgccccccagacctatgcagcaattcccagtcttcatttcccagccaccaaaggacatctcagcaacagagccattatccgagccccttctgttagagaaatttacatgaatgtacctgtaggggctgcgggagtgagaggactgggcggccgtggctatttggcatacacaggcctgggtcgaggataccaggtcaaaggagacaaaagagaagacaaactctatgacattttacctgggatggagctcaccccaatgaatcctgtcacattaaaaccccaaggaattaaactcgctccccagatattagaagagatttgtcagaaaaataactggggacagccagtgtaccagctgcactctgctattggacaagaccaaagacagctattcttgtacaaaataactattcctgctctagccagccagaatcctgcaatccaccctttcacacctccaaagctgagtgcctttgtggatgaagcaaagacgtatgcagccgaatacaccctgcagaccctgggcatccccactgatggaggcgatggcaccatggctactgctgctgctgctgctactgctttcccaggatatgctgtccctaatgcaactgcacccgtgtctgcagcccagctcaagcaagcggtaacccttggacaagacttagcagcatatacaacctatgaggtctacccaacttttgcagtgactgcccgaggggatggatatggcaccttctgaagatgcttttttaaatttaagaataagacacacaaaactctattaaaaaaaaaaaagaaataaacctctaactcggtccccaatgatcataaataatatgtttcctaaagaaatgcctttccagagactgtatagcttataccaattatagaatcatgaagtaagaacgttattctgaaatgaaatcaaatgttaaagagccttttgtttaacagaaagctggagagccactgccccaaaagttgttcttccagtcttcctgagtgtttggggagtatgtttacaaatcctgccagggtgaagagagatcttgtagctggcaagatttgggagggatggagcagacctgggcagtcagtaataatcaagggaagccaagtaaactccagagtcttacctctggctcacagctgcttttgtgatacacaaagtcacaaagaggaaaagggaagggaggaggttgcttttcaaaatgcattcaccatggctcactgtgtggggcatgattgcaggcctgagctcatgaaagactgtccaagattttgtggtttcaacctctcttcagcctgaaaattccatccagtcgatttgtcacagatcaggatcttcctgtcccctgcagcccatggggacttcctagaaatagatatgatatgttgtagatgtggttaaaacaaatccaggccccattgtttattcagctcattagtccacacctatttttccctagaactcctaccttttccaataatcatgccagcatgaaatgaccttttctactttaaaattttttgacttgttcatattgcttgattttcatcatctcagactcatttttctcctacctaatatcataaaaaagtaaatcagatatacagaatatcatttatgatacttcttcctttcagcaaattgactgaaaagtcattttaaagagagaagtgcagatttgctctcatttctttgatattgttgcagtatccaccccaccatctagcaatcagagatgcttatattaacttgggattagctttgcattatctaacccatttattttaaatctgccaggaaatcctctaactttccttcctttttgtttcagtaagtatcaggcagcttcaccatacctgagtccttttgtcttgaagctgccacagaaaaatcttacagcaatcattgctgattagaaactgtttcagacaatcagcatgggtgttatttaccaaattccccccagagtcctaggcctcttctccagaaatatctgatgatgaagtgaggggagggcaacggtgctacaaaacacggaacagaggtaaagagaaggcactactttcttgccatacttgtaaatgattgctttgttcaaacataaataatcttaagtccaacaccaaatacctgttactcctacatcaatctcattagtggtttaagacacagtactagaattttcattttttaaaatcccttggcccttaaaaaaatttacagaacacaaaggaaaacataaacacaaagacatggaaaattttgtcaactccttaatggaattctgtgatcaaaaagcaggccagattctaatcaaaatcaggtaaattttaatcacaatcagaagtacttgtaacatttcagttgtcctaactccaatgagataacaaagcctccaaggctacagctgaaactctgaaaggccctgtgctttctactttacatttagcgtctaatatttcctaggacagtagttcccaaagtaggctgtacattagaatctcctggagagctttttaaatgctaatgccaataacatatctcataaaatttacactagaatttccttggatgggtgcctggcatcagtattttttaatgatccctaggtgatttcaatgtgcacctaggtttgggaattgctatattcttgtatttatactctatctctttatttcttttcctttttatttcacttttagtaaatagaaaaatgcaattaaaaaatcatctaagttaagacaaatagccaaatcatatttatcccataaatagtatgaatttaaatgtaacttacgtaggcttcaaactaactctaaaaatgagaaagtaaaacaatcttgtcctaaaacaattcttagatccaaatttacactcccctacagatctgcttttattctcaaagacagtgattacattgacataacaaatgtccattggggcaggcaaatttctactgagtctaaaaagcattccaaattctaggagcaaaagttctgattttccttaaaatctttgcaaataaacagcaaagggtattctggatgtcttgtcaatgcaaattaggtttgatttagagaagttttaaatttaatcgcaatgaaaagattagttaatacatgaatctttttatgagaaaaaatcattattctggataaagtcataattgtttgtttacaatattaagagcagacacctaaacatacaataataccaaagtattgagaaaattaccactggaacaccatctcaagttatcacaccatttacctctttagagccagttttgtataagtaggtagaagtggttttggtttttttgctaaaattttactttgttttagtaatatctagggaatactttgaattccattaaaataccttcatagaaagtgttaatgtgtctaccatgccatatgtttatttttactttccccaagttaggtagatagagcaagtcctgctaccataagtttaaaattattaagacaacgggcttttttaaattgctggtagaaccaaaggctaattttgcataggtttatatttttagacttaagaaattagcacctatataataccttcataccttctgcatcactatcaatttttctgtaatttcttatttgaatgcttcctaattctttacagaaaaaattaaaatttgtcacccaaccaggtgataataacaaaacaataatttaggaacatccagtaaatttgaattagttctctaaattttggtaattaatagcttattgataattaaaatcagcctaatgttgcttaagtaggaggaaattgatcagcaatgggattgggtatctattttctttcctataaaagtgctgcctcttctcaaattgctttatttctctcccactgcattagtatatctagaacagcaccttcaactgcaacaaaatataattctcctagatgactaggatatcctccaatctggtatcatgccaaacaacactatgtttggggaacagcacccgaaatgctgctaaaaagctacctcatgtcaagaaaatatggatttcaaaaaatatctggcacagtggcccatgcctataaccccagtactttgggaggccaaggcaggaggattgctggaggccaggagttcaagaccagcctgggcaacatggagagactccgcctctacaaaaaaaaaaaaaacaaatttaatttaattggccagttgtggtggcgtgggcctgtggtcccagctacttgggaagctaaggcaggaggattgctggaggcctggagggcaaggctgcagtgagccatgttcacatcgctgcactccagcctgggtgacagagcaagaccctgtctccaaaaaagcaaaaataaatatctaacaaaaaggaacctgtttccaaaccacagtttcttaactttttcatgatggaatagaaattaaactataagtatatactgataatagctgtgcaggaaattggtttttattttacttaaaagtattttttagaaaaaatgttattctgattgcatagattagcaaaatattgcatcaatataatgttccatttttattaatttttgttatattctaaatgaccgttttataattctgtcttggacaactgggccacagttagaatccacatagacagggaggttcttaggtgtgccatttgtagaataaagggcaatcaagttaatattcggggtaaattttcattgcattctaacctatgaagtttgataaagtatattattattgaacaactctaacactaagatttcctaaaagtaacttacaacaaaaaatgaactatgtgctcaatattcacataaagtcatgattattctcttcttgcattcatataaaagttcccagggggaagaaaatatatctaaaaattagactagaaacttggcactttttatgtattgtagatacactttcatatattgtaaatacatctgttaaagataaaactaagtttctaacatagcactacaaggaaactttggataaatatttttaaaaagaaaatgttaataggataacttaagattttgtatatacttattggaagacaggaagaaactaggcagtaaatattcctacctgacgtgcaaccattgtcaatcaggttttgttaaactgtcaaatttgattttgaaattttagtttgcccaaataatatcttgaaaatgctctgaattttactagaacatattcatagaaagtgtaatgtatctaccaggctctatgtttgtgtttgccaacattagaaaaacaaagtaagttgcgctataatgagtgaaactaaggaaaatgagatttttctgactcccattccctctcttaaaaagtaaaatatttaagctttttttattaaaggaaaaatgggtacagaatactctattgccctccaaatgtccaacatttttaaagccatgttgtccaacaatgtttatacagaaaatagaatgcataggtttaatatagatagcaatgtatatgtaggctcatttgtgggagattgcaaactttatgtgcccccagttctccttggttttgtaggaaagctaaaagaaaaccttgtactctcactaataatgaaattcatagccaatttagaaagggaaaataacctgaaaaccaaaatacctcattcatctgaagatgcctggaataaaatatggaattcttctgtacctacctcccccttacagacttttctcctattttgagagagaaattcaagaagaagaatacagcttgttctctttccacaaatgatactttgtctaagggaataggagataccaagaaacagtatctttaaaaaagtaagctgcccacaggccttcttggagaatgaagaatatcagccccattcagggtttaccaatgtctctctgaggtgacaatacattctggttttccaggacagtcctggcttaggtctgctgtccttctataaatattaacaatgatccctcttatttccaaacgtgtcccagtttagacaacaaattatacagtgtctgcccccaacacacacacacacaccccaccatctttatgggttgttgttgttttcttgttgtttttaattttgtagaattggctttgtcttctccaaagcagataacagcttaaactaaagagcctagctacttctttctgactgagcagggtcatagtaaacagagaagaatggatcacttcctcctctgaaatctccatcaatccactttctgtccaactatctctctacccagcctatttttggtcctagttttcctctcataacccctgggctgtgagtcctgagttctgccttcatatggcagagcaagctagtcattattatgccaggttaggtggtggggcaagacaaaagatagctcttggggacacttgcttggtctgtagagatccacagggcactagtagggtattagagcatttattggtttctttcttccttgagttgagttacttctatcccaaaacagacaggtcttacgttaaccttcaccttaaaaaggatattgccttttttccttctgcttcacaaatttgctccaacactaattcccttgcatttgatttcatcattatgattgttcatcaaccattcttcacgaaaaatcctcacatcacgtcatataaaggttttattatttttaatggaaaataacattgagagattattttcctttttcataaaatttccctttttccctccctctattctcttcactaacattggaaattaaacaagttttacaggctctattgttattaaccctcaaatctattcttcagagaatatatgatcagcctgtgtttactatgcacctactcttataccagaaactgtgaatacaaatacatatatttcctacttctctctttaattggggcacacagtcccatggtccattctgcatttttcaaaattgaatataattgcaacacctgataggttttgccacttagaattctgaaaataaatcaactctgttctaaaccttaagtttccactattattgccaaactctggactgatacaataagccttttaaaaggtgaatttaacacttcacctattatggttatttaagtaaaatgagttttcaaatatttcccccaggagaaatataaaggactatgcaaaaatagaaggagaaaaaggttagttagaggtccagaaggagaattaaaacatggaattgataaattcacctactgatttatgatgttaatgagcaggtacctatacattttatttacttgaaaacattttggccattaactatttctgttttctaaatacatttgtgtttataaaattttaaaatctatatcacaagacttagacatgcctttctttgcaataaagtatatatacctttttacaaatgtaaattttattttgaaacttggcattttctttataattcctaagatatctttgggcacacagactacagataaatctatttaaatcaattcatcattatcactggtttaaatatttaatgtaaccattggaatttttattcttattccttcagagaattctccttttcttctatgtttctgactgcaatacagcccgatattgttattccctatatcttaatgaaaagcaagctgtcagcaaaatgcatttatagtttccagatgtttaacaatctctttcttcttttcttttttgttattatttttatttatgtgaagttagttagctgaggtaccaaaaaagagacaaagacagtattaaaaagtgtgcataaagcacttatttttgtactttagtacaatgttttatagaactttgtgatctatctaaatatattaagtaaaattacaccattcacttgttgggaaaataatctttggtttggaagatattaacataatgggcatcttagaatcataaatcacatgaaatgagagacaatgcaatattgtataattcctggatgatgcaattgttttaattgaattttcaagtgccattataaagtttt

SEQ ID NO: 108098 - DNA, 9400 bp, Homo sapiens
  Payload ID: 1240
  Gene Symbol: A1CF
  Gene Name: APOBEC1 complementation factor
  Uniprot ID: Q9NQ94
  ENST ID: ENST00000395495
  CDS Start-End: 308-2092
tttgatatgacgattagagcataacccgagtgacacgttgaattcgccataatcaaggaaaccttttccgggtggggatctctgaaattactcagataacagtgctgtgccaaaaacctgtggattttctctacaaaaattattgagcaaccctaattaacctgattttttgctgataatcactctcaatggaatcaaatcacaaatccggggatggattgagcggcactcagaaggaagcagccctccgcgcactggtccagcgcacaggatatagcttggtccaggaatttagaggttcctatagatggaagcagtgtgtctgggcacatgcccagagccagaagcgagcatgagcacagcaattcctggcctcaaaaaaggaaataatgctttgcagtccatcattttgcaaactttgctggaaaaggaaaatggacaaagaaaatatggtggccctccacctggttgggatgctgcaccccctgaaaggggctgtgaaatttttattggaaaacttccccgagacctttttgaggatgagcttataccattatgtgaaaaaatcggtaaaatttatgaaatgagaatgatgatggattttaatggcaacaatagaggatatgcatttgtaacattttcaaataaagtggaagccaagaatgcaatcaagcaacttaataattatgaaattagaaatgggcgcctcttaggggtttgtgccagtgtggacaactgccgattatttgttgggggcatcccaaaaaccaaaaagagagaagaaatcttatcggagatgaaaaaggttactgaaggtgttgtcgatgtcatcgtctacccaagcgctgcagataaaaccaaaaaccgaggctttgccttcgtggagtatgagagtcatcgagcagctgccatggcgaggaggaaactgctaccaggaagaattcagttatggggacatggtattgcagtagactgggcagagccagaagtagaagttgatgaagatacaatgtcttcagtgaaaatcctatatgtaagaaatcttatgctgtctacctctgaagagatgattgaaaaggaattcaacaatatcaaaccaggtgctgtggagagggtgaagaaaattcgagactatgcttttgtgcacttcagtaaccgagaagatgcagttgaggctatgaaagctttaaatggcaaggtgctggatggttcccccattgaagtcaccctagcaaaaccagtggacaaggacagttatgttaggtatacccgaggcacaggtggaaggggcaccatgctgcaaggagagtatacctactctttgggccaagtttatgatcccaccacaacctaccttggagctcctgtcttctatgccccccagacctatgcagcaattcccagtcttcatttcccagccaccaaaggacatctcagcaacagagccattatccgagccccttctgttagaggggctgcgggagtgagaggactgggcggccgtggctatttggcatacacaggcctgggtcgaggataccaggtcaaaggagacaaaagagaagacaaactctatgacattttacctgggatggagctcaccccaatgaatcctgtcacattaaaaccccaaggaattaaactcgctccccagatattagaagagatttgtcagaaaaataactggggacagccagtgtaccagctgcactctgctattggacaagaccaaagacagctattcttgtacaaaataactattcctgctctagccagccagaatcctgcaatccaccctttcacacctccaaagctgagtgcctttgtggatgaagcaaagacgtatgcagccgaatacaccctgcagaccctgggcatccccactgatggaggcgatggcaccatggctactgctgctgctgctgctactgctttcccaggatatgctgtccctaatgcaactgcacccgtgtctgcagcccagctcaagcaagcggtaacccttggacaagacttagcagcatatacaacctatgaggtctacccaacttttgcagtgactgcccgaggggatggatatggcaccttctgaagatgcttttttaaatttaagaataagacacacaaaactctattaaaaaaaaaaaagaaataaacctctaactcggtccccaatgatcataaataatatgtttcctaaagaaatgcctttccagagactgtatagcttataccaattatagaatcatgaagtaagaacgttattctgaaatgaaatcaaatgttaaagagccttttgtttaacagaaagctggagagccactgccccaaaagttgttcttccagtcttcctgagtgtttggggagtatgtttacaaatcctgccagggtgaagagagatcttgtagctggcaagatttgggagggatggagcagacctgggcagtcagtaataatcaagggaagccaagtaaactccagagtcttacctctggctcacagctgcttttgtgatacacaaagtcacaaagaggaaaagggaagggaggaggttgcttttcaaaatgcattcaccatggctcactgtgtggggcatgattgcaggcctgagctcatgaaagactgtccaagattttgtggtttcaacctctcttcagcctgaaaattccatccagtcgatttgtcacagatcaggatcttcctgtcccctgcagcccatggggacttcctagaaatagatatgatatgttgtagatgtggttaaaacaaatccaggccccattgtttattcagctcattagtccacacctatttttccctagaactcctaccttttccaataatcatgccagcatgaaatgaccttttctactttaaaattttttgacttgttcatattgcttgattttcatcatctcagactcatttttctcctacctaatatcataaaaaagtaaatcagatatacagaatatcatttatgatacttcttcctttcagcaaattgactgaaaagtcattttaaagagagaagtgcagatttgctctcatttctttgatattgttgcagtatccaccccaccatctagcaatcagagatgcttatattaacttgggattagctttgcattatctaacccatttattttaaatctgccaggaaatcctctaactttccttcctttttgtttcagtaagtatcaggcagcttcaccatacctgagtccttttgtcttgaagctgccacagaaaaatcttacagcaatcattgctgattagaaactgtttcagacaatcagcatgggtgttatttaccaaattccccccagagtcctaggcctcttctccagaaatatctgatgatgaagtgaggggagggcaacggtgctacaaaacacggaacagaggtaaagagaaggcactactttcttgccatacttgtaaatgattgctttgttcaaacataaataatcttaagtccaacaccaaatacctgttactcctacatcaatctcattagtggtttaagacacagtactagaattttcattttttaaaatcccttggcccttaaaaaaatttacagaacacaaaggaaaacataaacacaaagacatggaaaattttgtcaactccttaatggaattctgtgatcaaaaagcaggccagattctaatcaaaatcaggtaaattttaatcacaatcagaagtacttgtaacatttcagttgtcctaactccaatgagataacaaagcctccaaggctacagctgaaactctgaaaggccctgtgctttctactttacatttagcgtctaatatttcctaggacagtagttcccaaagtaggctgtacattagaatctcctggagagctttttaaatgctaatgccaataacatatctcataaaatttacactagaatttccttggatgggtgcctggcatcagtattttttaatgatccctaggtgatttcaatgtgcacctaggtttgggaattgctatattcttgtatttatactctatctctttatttcttttcctttttatttcacttttagtaaatagaaaaatgcaattaaaaaatcatctaagttaagacaaatagccaaatcatatttatcccataaatagtatgaatttaaatgtaacttacgtaggcttcaaactaactctaaaaatgagaaagtaaaacaatcttgtcctaaaacaattcttagatccaaatttacactcccctacagatctgcttttattctcaaagacagtgattacattgacataacaaatgtccattggggcaggcaaatttctactgagtctaaaaagcattccaaattctaggagcaaaagttctgattttccttaaaatctttgcaaataaacagcaaagggtattctggatgtcttgtcaatgcaaattaggtttgatttagagaagttttaaatttaatcgcaatgaaaagattagttaatacatgaatctttttatgagaaaaaatcattattctggataaagtcataattgtttgtttacaatattaagagcagacacctaaacatacaataataccaaagtattgagaaaattaccactggaacaccatctcaagttatcacaccatttacctctttagagccagttttgtataagtaggtagaagtggttttggtttttttgctaaaattttactttgttttagtaatatctagggaatactttgaattccattaaaataccttcatagaaagtgttaatgtgtctaccatgccatatgtttatttttactttccccaagttaggtagatagagcaagtcctgctaccataagtttaaaattattaagacaacgggcttttttaaattgctggtagaaccaaaggctaattttgcataggtttatatttttagacttaagaaattagcacctatataataccttcataccttctgcatcactatcaatttttctgtaatttcttatttgaatgcttcctaattctttacagaaaaaattaaaatttgtcacccaaccaggtgataataacaaaacaataatttaggaacatccagtaaatttgaattagttctctaaattttggtaattaatagcttattgataattaaaatcagcctaatgttgcttaagtaggaggaaattgatcagcaatgggattgggtatctattttctttcctataaaagtgctgcctcttctcaaattgctttatttctctcccactgcattagtatatctagaacagcaccttcaactgcaacaaaatataattctcctagatgactaggatatcctccaatctggtatcatgccaaacaacactatgtttggggaacagcacccgaaatgctgctaaaaagctacctcatgtcaagaaaatatggatttcaaaaaatatctggcacagtggcccatgcctataaccccagtactttgggaggccaaggcaggaggattgctggaggccaggagttcaagaccagcctgggcaacatggagagactccgcctctacaaaaaaaaaaaaaacaaatttaatttaattggccagttgtggtggcgtgggcctgtggtcccagctacttgggaagctaaggcaggaggattgctggaggcctggagggcaaggctgcagtgagccatgttcacatcgctgcactccagcctgggtgacagagcaagaccctgtctccaaaaaagcaaaaataaatatctaacaaaaaggaacctgtttccaaaccacagtttcttaactttttcatgatggaatagaaattaaactataagtatatactgataatagctgtgcaggaaattggtttttattttacttaaaagtattttttagaaaaaatgttattctgattgcatagattagcaaaatattgcatcaatataatgttccatttttattaatttttgttatattctaaatgaccgttttataattctgtcttggacaactgggccacagttagaatccacatagacagggaggttcttaggtgtgccatttgtagaataaagggcaatcaagttaatattcggggtaaattttcattgcattctaacctatgaagtttgataaagtatattattattgaacaactctaacactaagatttcctaaaagtaacttacaacaaaaaatgaactatgtgctcaatattcacataaagtcatgattattctcttcttgcattcatataaaagttcccagggggaagaaaatatatctaaaaattagactagaaacttggcactttttatgtattgtagatacactttcatatattgtaaatacatctgttaaagataaaactaagtttctaacatagcactacaaggaaactttggataaatatttttaaaaagaaaatgttaataggataacttaagattttgtatatacttattggaagacaggaagaaactaggcagtaaatattcctacctgacgtgcaaccattgtcaatcaggttttgttaaactgtcaaatttgattttgaaattttagtttgcccaaataatatcttgaaaatgctctgaattttactagaacatattcatagaaagtgtaatgtatctaccaggctctatgtttgtgtttgccaacattagaaaaacaaagtaagttgcgctataatgagtgaaactaaggaaaatgagatttttctgactcccattccctctcttaaaaagtaaaatatttaagctttttttattaaaggaaaaatgggtacagaatactctattgccctccaaatgtccaacatttttaaagccatgttgtccaacaatgtttatacagaaaatagaatgcataggtttaatatagatagcaatgtatatgtaggctcatttgtgggagattgcaaactttatgtgcccccagttctccttggttttgtaggaaagctaaaagaaaaccttgtactctcactaataatgaaattcatagccaatttagaaagggaaaataacctgaaaaccaaaatacctcattcatctgaagatgcctggaataaaatatggaattcttctgtacctacctcccccttacagacttttctcctattttgagagagaaattcaagaagaagaatacagcttgttctctttccacaaatgatactttgtctaagggaataggagataccaagaaacagtatctttaaaaaagtaagctgcccacaggccttcttggagaatgaagaatatcagccccattcagggtttaccaatgtctctctgaggtgacaatacattctggttttccaggacagtcctggcttaggtctgctgtccttctataaatattaacaatgatccctcttatttccaaacgtgtcccagtttagacaacaaattatacagtgtctgcccccaacacacacacacacaccccaccatctttatgggttgttgttgttttcttgttgtttttaattttgtagaattggctttgtcttctccaaagcagataacagcttaaactaaagagcctagctacttctttctgactgagcagggtcatagtaaacagagaagaatggatcacttcctcctctgaaatctccatcaatccactttctgtccaactatctctctacccagcctatttttggtcctagttttcctctcataacccctgggctgtgagtcctgagttctgccttcatatggcagagcaagctagtcattattatgccaggttaggtggtggggcaagacaaaagatagctcttggggacacttgcttggtctgtagagatccacagggcactagtagggtattagagcatttattggtttctttcttccttgagttgagttacttctatcccaaaacagacaggtcttacgttaaccttcaccttaaaaaggatattgccttttttccttctgcttcacaaatttgctccaacactaattcccttgcatttgatttcatcattatgattgttcatcaaccattcttcacgaaaaatcctcacatcacgtcatataaaggttttattatttttaatggaaaataacattgagagattattttcctttttcataaaatttccctttttccctccctctattctcttcactaacattggaaattaaacaagttttacaggctctattgttattaaccctcaaatctattcttcagagaatatatgatcagcctgtgtttactatgcacctactcttataccagaaactgtgaatacaaatacatatatttcctacttctctctttaattggggcacacagtcccatggtccattctgcatttttcaaaattgaatataattgcaacacctgataggttttgccacttagaattctgaaaataaatcaactctgttctaaaccttaagtttccactattattgccaaactctggactgatacaataagccttttaaaaggtgaatttaacacttcacctattatggttatttaagtaaaatgagttttcaaatatttcccccaggagaaatataaaggactatgcaaaaatagaaggagaaaaaggttagttagaggtccagaaggagaattaaaacatggaattgataaattcacctactgatttatgatgttaatgagcaggtacctatacattttatttacttgaaaacattttggccattaactatttctgttttctaaatacatttgtgtttataaaattttaaaatctatatcacaagacttagacatgcctttctttgcaataaagtatatatacctttttacaaatgtaaattttattttgaaacttggcattttctttataattcctaagatatctttgggcacacagactacagataaatctatttaaatcaattcatcattatcactggtttaaatatttaatgtaaccattggaatttttattcttattccttcagagaattctccttttcttctatgtttctgactgcaatacagcccgatattgttattccctatatcttaatgaaaagcaagctgtcagcaaaatgcatttatagtttccagatgtttaacaatctctttcttcttttcttttttgttattatttttatttatgtgaagttagttagctgaggtaccaaaaaagagacaaagacagtattaaaaagtgtgcataaagcacttatttttgtactttagtacaatgttttatagaactttgtgatctatctaaatatattaagtaaaattacaccattcacttgttgggaaaataatctttggtttggaagatattaacataatgggcatcttagaatcataaatcacatgaaatgagagacaatgcaatattgtataattcctggatgatgcaattgttttaattgaattttcaagtgccattataaagtttt

SEQ ID NO: 108099 - DNA, 885 bp, Homo sapiens
  Payload ID: 1240
  Gene Symbol: A1CF
  Gene Name: APOBEC1 complementation factor
  ENST ID: ENST00000414883
  CDS Start-End: 282-885
tttgatatgacgattagagcataacccgagtgacacgttgaattcgccataatcaaggaaaccttttccgggtggggatctctgaaattactcagataacagtgctgtgccaaaaacctgtggattttctctacaaaaattatcatgactgttatctttttgatggaaaagatgaagttcagcgaagaacaaatctacaacttggccagaagactgtagactttgccttcaaagagtgagcaaccctaattaacctgattttttgctgataatcactctcaatggaatcaaatcacaaatccggggatggattgagcggcactcagaaggaagcagccctccgcgcactggtccagcgcacaggatatagcttggtccaggaaaatggacaaagaaaatatggtggccctccacctggttgggatgctgcaccccctgaaaggggctgtgaaatttttattggaaaacttccccgagacctttttgaggatgagcttataccattatgtgaaaaaatcggtaaaatttatgaaatgagaatgatgatggattttaatggcaacaatagaggatatgcatttgtaacattttcaaataaagtggaagccaagaatgcaatcaagcaacttaataattatgaaattagaaatgggcgcctcttaggggtttgtgccagtgtggacaactgccgattatttgttgggggcatcccaaaaaccaaaaagagagaagaaatcttatcggagatgaaaaaggttactgaaggtgttgtcgatgtcatcgtctacccaagcgctgcagataaaaccaaaaaccgaggctttgccttcgtggagtatgagagtcatcgagcagctgccatggcgaggaggaaactgctaccag

SEQ ID NO: 108100 - DNA, 727 bp, Homo sapiens
  Payload ID: 1241
  Gene Symbol: APOC4-APOC2
  Gene Name: APOC4-APOC2 readthrough (NMD candidate)
  ENST ID: ENST00000252490
  CDS Start-End: 108-413
gggggttgtggctgtggagcggaagtgggtctcaaccactataaatcctctctgtgcccgtccggagctggtgaggacagcctgccagagtctggtctctggacactatgggcacacgactcctcccagctctgtttcttgtcctcctggtattgggatttgaggtccaggggacccaacagccccagcaagatgagatgcctagcccgaccttcctcacccaggtgaaggaatctctctccagttactgggagtcagcaaagacagccgcccagaacctgtacgagaagacatacctgcccgctgtagatgagaaactcagggacttgtacagcaaaagcacagcagccatgagcacttacacaggcatttttactgaccaagttctttctgtgctgaagggagaggagtaacagccagaccccccatcagtggacaaggggagagtcccctactcccctgatcccccaggttcagactgagctcccccttcccagtagctcttgcatcctcctcccaactctagcctgaattcttttcaataaaaaatacaattcaagttgcttctcatggatggcactgcttttctgaggactcaagggccaagatggaggggctgactcagtccagccaacatttaatgagcacctactttatgtatggagctctaacccatgggtccatgggaataaagcagtgaatagtaacaataaataatcgtaacagc

SEQ ID NO: 108101 - DNA, 1829 bp, Homo sapiens
  Payload ID: 1241
  Gene Symbol: APOC4-APOC2
  Gene Name: APOC4-APOC2 readthrough (NMD candidate)
  ENST ID: ENST00000585685
  CDS Start-End: 41-424
gagttgagcacagagggacagaggcacggaacccccagaaatgtccctcctcagaaacaggctccaggccctgcctgccctgtgcctctgcgtgctggtcctggcctgcattggggcatgccagccagaggcccaggaaggaaccctgagccccccaccaaagctaaagatgagtcgctggagcctggtgaggggcaggatgaaggagctgctggagacagtggtgaacaggaccagagacgggtggcaatggttctggagcccgagcaccttccggggcttcatgcagacctactatgacgaccacctgagggacctgggtccgctcaccaaggcctggttcctcgaatccaaagacagcctcttgaagaagacccacagcctgtgccccaggcttgtctgtggggacaaggaccagggttaaaatgttcataaaagccaggtgtggttgtggcgggtgcctgtagtcccagctactcaggaggctgaggtaggatgatggcttgagcccaggagttcgagaccagcctgggcaacacagcgagatctcttgggggtaaaacaaaaagaaaaaaaaaagttcatacttctccaataaataaagtctcacctgtgtccctgtctggatccttccccagtgtggccagaaaaaaacccaccccactgcctcccaggaatcaatgagtagaagaggtgacacctgatggggaaggaagagtagggaggtcgggaagggtatcaaggaataacaccctattgtgggcttgcggagaatgggggacttcaaggcgtgtcagtttcaggagggtgagggcaggagcgtgggtggagtcagcaggtccccatgatggccctcactgagagcttcgcccttgtctcctacaagctctgactccattcccagtgggcacccagcacctccaacccctccacagcccccaacccagcctctgtcggaggcgaattctcagagtgagggttccctgtcacttgagagaaggttccctgtgacgtgaccttgggggacgtcattgccctttctgtccccacccaccccctccgcagttctgttggccaggactttggcctagacaaaggatgggggttgtggctgtggagcggaagtgggtctcaaccactataaatcctctctgtgcccgtccggagctggtgaggacagcctgccagagtctggtctctggacactatgggcacacgactcctcccagctctgtttcttgtcctcctggtattgggatttgaggtccaggggacccaacagccccagcaagatgagatgcctagcccgaccttcctcacccaggtgaaggaatctctctccagttactgggagtcagcaaagacagccgcccagaacctgtacgagaagacatacctgcccgctgtagatgagaaactcagggacttgtacagcaaaagcacagcagccatgagcacttacacaggcatttttactgaccaagttctttctgtgctgaagggagaggagtaacagccagaccccccatcagtggacaaggggagagtcccctactcccctgatcccccaggttcagactgagctcccccttcccagtagctcttgcatcctcctcccaactctagcctgaattcttttcaataaaaaatacaattcaagttgcttctcatggatggcactgcttttctgaggactcaagggccaagatggaggggctgactcagtccagccaacatttaatgagcacctactttatgtatggagctctaacccatgggtccatgggaataaagcagtgaatagtaacaataaataatcgtaacagcaa

SEQ ID NO: 108102 - DNA, 680 bp, Homo sapiens
  Payload ID: 1241
  Gene Symbol: APOC4-APOC2
  Gene Name: APOC4-APOC2 readthrough (NMD candidate)
  ENST ID: ENST00000589057
  CDS Start-End: 23-559
cagaggcacggaacccccagaaatgtccctcctcagaaacaggctccaggccctgcctgccctgtgcctctgcgtgctggtcctggcctgcattggggcatgccagccagaggcccaggaaggaaccctgagccccccaccaaagctaaagatgagtcgctggagcctggtgaggggcaggatgaaggagctgctggagacagtggtgaacaggaccagagacgggtggcaatggttctggtctctggacactatgggcacacgactcctcccagctctgtttcttgtcctcctggtattgggatttgaggtccaggggacccaacagccccagcaagatgagatgcctagcccgaccttcctcacccaggtgaaggaatctctctccagttactgggagtcagcaaagacagccgcccagaacctgtacgagaagacatacctgcccgctgtagatgagaaactcagggacttgtacagcaaaagcacagcagccatgagcacttacacaggcatttttactgaccaagttctttctgtgctgaagggagaggagtaacagccagaccccccatcagtggacaaggggagagtcccctactcccctgatcccccaggttcagactgagctcccccttcccagtagctcttgcatcctcctcccaactctagcctgaatt

SEQ ID NO: 108103 - DNA, 1227 bp, Homo sapiens
  Payload ID: 1242
  Gene Symbol: APOA1
  Gene Name: apolipoprotein A-I
  Uniprot ID: P02647
  ENST ID: ENST00000236850
  CDS Start-End: 367-1170
cacaatggacaatggcaactgcccacacactcccatggaggggaaggggatgagtgcagggaaccccgaccccacccgggagacctgcaagcctgcagacactcccctcccgcccccactgaacccttgacccctgccctgcagcccccgcagcttgctgtttgcccactctatttgcccagccccagggacagagctgatccttgaactcttaagttccacattgccaggaccagtgagcagcaacagggccggggctgggcttatcagcctcccagcccagaccctggctgcagacataaataggccctgcaagagctggctgcttagagactgcgagaaggaggtcccccacggcccttcaggatgaaagctgcggtgctgaccttggccgtgctcttcctgacggggagccaggctcggcatttctggcagcaagatgaacccccccagagcccctgggatcgagtgaaggacctggccactgtgtacgtggatgtgctcaaagacagcggcagagactatgtgtcccagtttgaaggctccgccttgggaaaacagctaaacctaaagctccttgacaactgggacagcgtgacctccaccttcagcaagctgcgcgaacagctcggccctgtgacccaggagttctgggataacctggaaaaggagacagagggcctgaggcaggagatgagcaaggatctggaggaggtgaaggccaaggtgcagccctacctggacgacttccagaagaagtggcaggaggagatggagctctaccgccagaaggtggagccgctgcgcgcagagctccaagagggcgcgcgccagaagctgcacgagctgcaagagaagctgagcccactgggcgaggagatgcgcgaccgcgcgcgcgcccatgtggacgcgctgcgcacgcatctggccccctacagcgacgagctgcgccagcgcttggccgcgcgccttgaggctctcaaggagaacggcggcgccagactggccgagtaccacgccaaggccaccgagcatctgagcacgctcagcgagaaggccaagcccgcgctcgaggacctccgccaaggcctgctgcccgtgctggagagcttcaaggtcagcttcctgagcgctctcgaggagtacactaagaagctcaacacccagtgaggcgcccgccgccgccccccttcccggtgctcagaataaacgtttccaaagtgggaa

SEQ ID NO: 108104 - DNA, 932 bp, Homo sapiens
  Payload ID: 1242
  Gene Symbol: APOA1
  Gene Name: apolipoprotein A-I
  Uniprot ID: P02647
  ENST ID: ENST00000359492
  CDS Start-End: 72-875
aggaggtgcgtcctgctgcctgccccggtcactctggctccccagctcaaggtcccccacggcccttcaggatgaaagctgcggtgctgaccttggccgtgctcttcctgacggggagccaggctcggcatttctggcagcaagatgaacccccccagagcccctgggatcgagtgaaggacctggccactgtgtacgtggatgtgctcaaagacagcggcagagactatgtgtcccagtttgaaggctccgccttgggaaaacagctaaacctaaagctccttgacaactgggacagcgtgacctccaccttcagcaagctgcgcgaacagctcggccctgtgacccaggagttctgggataacctggaaaaggagacagagggcctgaggcaggagatgagcaaggatctggaggaggtgaaggccaaggtgcagccctacctggacgacttccagaagaagtggcaggaggagatggagctctaccgccagaaggtggagccgctgcgcgcagagctccaagagggcgcgcgccagaagctgcacgagctgcaagagaagctgagcccactgggcgaggagatgcgcgaccgcgcgcgcgcccatgtggacgcgctgcgcacgcatctggccccctacagcgacgagctgcgccagcgcttggccgcgcgccttgaggctctcaaggagaacggcggcgccagactggccgagtaccacgccaaggccaccgagcatctgagcacgctcagcgagaaggccaagcccgcgctcgaggacctccgccaaggcctgctgcccgtgctggagagcttcaaggtcagcttcctgagcgctctcgaggagtacactaagaagctcaacacccagtgaggcgcccgccgccgccccccttcccggtgctcagaataaacgtttccaaagtgggaa

SEQ ID NO: 108105 - DNA, 940 bp, Homo sapiens
  Payload ID: 1242
  Gene Symbol: APOA1
  Gene Name: apolipoprotein A-I
  Uniprot ID: P02647
  ENST ID: ENST00000375320
  CDS Start-End: 80-883
cccggtcactctggctccccagctcaaggttcaggccttgccccaggccgggcctctgggtcccccacggcccttcaggatgaaagctgcggtgctgaccttggccgtgctcttcctgacggggagccaggctcggcatttctggcagcaagatgaacccccccagagcccctgggatcgagtgaaggacctggccactgtgtacgtggatgtgctcaaagacagcggcagagactatgtgtcccagtttgaaggctccgccttgggaaaacagctaaacctaaagctccttgacaactgggacagcgtgacctccaccttcagcaagctgcgcgaacagctcggccctgtgacccaggagttctgggataacctggaaaaggagacagagggcctgaggcaggagatgagcaaggatctggaggaggtgaaggccaaggtgcagccctacctggacgacttccagaagaagtggcaggaggagatggagctctaccgccagaaggtggagccgctgcgcgcagagctccaagagggcgcgcgccagaagctgcacgagctgcaagagaagctgagcccactgggcgaggagatgcgcgaccgcgcgcgcgcccatgtggacgcgctgcgcacgcatctggccccctacagcgacgagctgcgccagcgcttggccgcgcgccttgaggctctcaaggagaacggcggcgccagactggccgagtaccacgccaaggccaccgagcatctgagcacgctcagcgagaaggccaagcccgcgctcgaggacctccgccaaggcctgctgcccgtgctggagagcttcaaggtcagcttcctgagcgctctcgaggagtacactaagaagctcaacacccagtgaggcgcccgccgccgccccccttcccggtgctcagaataaacgtttccaaagtgggaa

SEQ ID NO: 108106 - DNA, 1088 bp, Homo sapiens
  Payload ID: 1242
  Gene Symbol: APOA1
  Gene Name: apolipoprotein A-I
  Uniprot ID: P02647
  ENST ID: ENST00000375323
  CDS Start-End: 228-1031
cgagaaggaggtgcgtcctgctgcctgccccggtcactctggctccccagctcaaggttcaggccttgccccaggccgggcctctgggtacctgaggtcttctcccgctctgtgcccttctcctcacctggctgcaatgagtgggggagcacggggcttctgcatgctgaaggcaccccactcagccaggcccttcttctcctccaggtcccccacggcccttcaggatgaaagctgcggtgctgaccttggccgtgctcttcctgacggggagccaggctcggcatttctggcagcaagatgaacccccccagagcccctgggatcgagtgaaggacctggccactgtgtacgtggatgtgctcaaagacagcggcagagactatgtgtcccagtttgaaggctccgccttgggaaaacagctaaacctaaagctccttgacaactgggacagcgtgacctccaccttcagcaagctgcgcgaacagctcggccctgtgacccaggagttctgggataacctggaaaaggagacagagggcctgaggcaggagatgagcaaggatctggaggaggtgaaggccaaggtgcagccctacctggacgacttccagaagaagtggcaggaggagatggagctctaccgccagaaggtggagccgctgcgcgcagagctccaagagggcgcgcgccagaagctgcacgagctgcaagagaagctgagcccactgggcgaggagatgcgcgaccgcgcgcgcgcccatgtggacgcgctgcgcacgcatctggccccctacagcgacgagctgcgccagcgcttggccgcgcgccttgaggctctcaaggagaacggcggcgccagactggccgagtaccacgccaaggccaccgagcatctgagcacgctcagcgagaaggccaagcccgcgctcgaggacctccgccaaggcctgctgcccgtgctggagagcttcaaggtcagcttcctgagcgctctcgaggagtacactaagaagctcaacacccagtgaggcgcccgccgccgccccccttcccggtgctcagaataaacgtttccaaagtgggaa

SEQ ID NO: 108107 - DNA, 927 bp, Homo sapiens
  Payload ID: 1242
  Gene Symbol: APOA1
  Gene Name: apolipoprotein A-I
  ENST ID: ENST00000375329
  CDS Start-End: 133-870
aaggaggtgcgtcctgctgcctgccccggtcactctggctccccagctcaaggttcaggccttgccccaggccgggcctctgggtacctgaggtcttctcccgctctgtgcccttctcctcacctggctgcaatgagtgggggagcacggggcttctgcatgctgaaggcaccccactcagccaggcccttcttctcctccaggtcccccacggcccttcaggatgaaagctgcggtgctgaccttggccgtgctcttcctgacggcctaaagctccttgacaactgggacagcgtgacctccaccttcagcaagctgcgcgaacagctcggccctgtgacccaggagttctgggataacctggaaaaggagacagagggcctgaggcaggagatgagcaaggatctggaggaggtgaaggccaaggtgcagccctacctggacgacttccagaagaagtggcaggaggagatggagctctaccgccagaaggtggagccgctgcgcgcagagctccaagagggcgcgcgccagaagctgcacgagctgcaagagaagctgagcccactgggcgaggagatgcgcgaccgcgcgcgcgcccatgtggacgcgctgcgcacgcatctggccccctacagcgacgagctgcgccagcgcttggccgcgcgccttgaggctctcaaggagaacggcggcgccagactggccgagtaccacgccaaggccaccgagcatctgagcacgctcagcgagaaggccaagcccgcgctcgaggacctccgccaaggcctgctgcccgtgctggagagcttcaaggtcagcttcctgagcgctctcgaggagtacactaagaagctcaacacccagtgaggcgcccgccgccgccccccttcccggtgctcagaataaacgtttccaaagtgggaa

SEQ ID NO: 108108 - DNA, 1012 bp, Homo sapiens
  Payload ID: 1243
  Gene Symbol: APOA1BP
  Gene Name: apolipoprotein A-I binding protein
  ENST ID: ENST00000368233
  CDS Start-End: 28-765
gccgggggcgcgcgctctgcgagctggatgtccaggctgcgggcgctgctgggcctcgggctgctggttgcgggctcgcgcgtgccgcggatcaaaagccagaccatcgcctgtcgctcgggacccacctggtggggaccgcagcggctgaactcgggtggccgctgggactcagaggtcatggcgagcacggtggtgaagtacctgagccaggaggaggcccaggccgtggaccaggagctatttaacgaataccagttcagcgtggaccaacttatggaactggccgggctgagctgtgctacagccatcgccaaggcatatccccccacgtccatgtccaggagcccccctactgtcctggtcatctgtggcccggggaataatggaggagatggtctggtctgtgctcgacacctcaaactctttggctacgagccaaccatctattaccccaaaaggcctaacaagcccctcttcactgcattggtgacccagtgtcagaaaatggacatccctttccttggggaaatgcccgcagagcccatgacgattgatgaactgtatgagctggtggtggatgccatctttggcttcagcttcaagggcgatgttcgggaaccgttccacagcatcctgagtgtcctgaagggactcactgtgcccattgccagcatcgacattccctcaggtgctgggatccagaaggtggggtgggggagattggggccctaccctcctgactcttgcccacaccaggtctaaaataattttagtctagaggggcagaacacagctttctggacccccatcagggctggggaacagtgttcagaagtcccctttacatgttggccccatgaagagaccacggcccaagggtacgtggagctcgttggacgagagttcctcaggtgggaactgaggggacttcccactcctctgggactagggtaaactaaggtgtagaaggggacgagacatctggcctcttcctgaacaccaccctctt

SEQ ID NO: 108109 - DNA, 901 bp, Homo sapiens
  Payload ID: 1243
  Gene Symbol: APOA1BP
  Gene Name: apolipoprotein A-I binding protein
  ENST ID: ENST00000368234
  CDS Start-End: 44-826
gccggggccgggccgggccgggggcgcgcgctctgcgagctggatgtccaggctgcgggcgctgctgggcctcgggctgctggttgcgggctcgcgcgtgccgcggatcaaaagccagaccatcgcctgtcgctcgggacccacctggtggggaccgcagcggctgaactcgggtggccgctgggactcagaggtcatggcgagcacggtggtgaagtacctgagccaggaggaggcccaggccgtggaccaggagctatttaacgaataccagttcagcgtggaccaacttatggaactggccgggctgagctgtgctacagccatcgccaaggcatatccccccacgtccatgtccaggagcccccctactgtcctggtcatctgtggcccggggaataatggaggagatggtctggtctgtgctcgacacctcaaactctttggctacgagccaaccatctattaccccaaaaggcctaacaagcccctcttcactgcattggtgacccagtgtcagaaaatggacatccctttccttggggaaatgcccgcagagcttcaagggcgatgttcgggaaccgttccacagcatcctgagtgtcctgaagggactcactgtgcccattgccagcatcgacattccctcaggatgggacgtggagaagggaaatgctggagggatccagccagacttgctcatatccctcacagcccccaaaaaatctgcaacccagtttaccggtcgctaccattacctggggggtcgttttgtgccacctgctctggagaagaagtaccagctgaacctgccaccctaccctgacaccgagtgtgtctatcgtctgcagtgagggaaggtgggtgggtattcttcccaataaagacttagagcccctct

SEQ ID NO: 108110 - DNA, 1125 bp, Homo sapiens
  Payload ID: 1243
  Gene Symbol: APOA1BP
  Gene Name: apolipoprotein A-I binding protein
  Uniprot ID: Q8NCW5
  ENST ID: ENST00000368235
  CDS Start-End: 44-910
gccggggccgggccgggccgggggcgcgcgctctgcgagctggatgtccaggctgcgggcgctgctgggcctcgggctgctggttgcgggctcgcgcgtgccgcggatcaaaagccagaccatcgcctgtcgctcgggacccacctggtggggaccgcagcggctgaactcgggtggccgctgggactcagaggtcatggcgagcacggtggtgaagtacctgagccaggaggaggcccaggccgtggaccaggagctatttaacgaataccagttcagcgtggaccaacttatggaactggccgggctgagctgtgctacagccatcgccaaggcatatccccccacgtccatgtccaggagcccccctactgtcctggtcatctgtggcccggggaataatggaggagatggtctggtctgtgctcgacacctcaaactctttggctacgagccaaccatctattaccccaaaaggcctaacaagcccctcttcactgcattggtgacccagtgtcagaaaatggacatccctttccttggggaaatgcccgcagagcccatgacgattgatgaactgtatgagctggtggtggatgccatctttggcttcagcttcaagggcgatgttcgggaaccgttccacagcatcctgagtgtcctgaagggactcactgtgcccattgccagcatcgacattccctcaggatgggacgtggagaagggaaatgctggagggatccagccagacttgctcatatccctcacagcccccaaaaaatctgcaacccagtttaccggtcgctaccattacctggggggtcgttttgtgccacctgctctggagaagaagtaccagctgaacctgccaccctaccctgacaccgagtgtgtctatcgtctgcagtgagggaaggtgggtgggtattcttcccaataaagacttagagcccctctcttccagaactgtggattcctgggagctcctctggcaataaaagtcagtgaatggtggaagtcagagaccaaccctggggattgggtgccatctctctaggggtaacacaaagggcaagaggttgctatggtatttggaaacaatgaaaatggactgttagatgccaa

SEQ ID NO: 108111 - DNA, 474 bp, Homo sapiens
  Payload ID: 1244
  Gene Symbol: APOA2
  Gene Name: apolipoprotein A-II
  Uniprot ID: P02652
  ENST ID: ENST00000367990
  CDS Start-End: 59-361
aggcacagacaccaaggacagagacgctggctaggccgccctccccactgttaccaacatgaagctgctcgcagcaactgtgctactcctcaccatctgcagccttgaaggagctttggttcggagacaggcaaaggagccatgtgtggagagcctggtttctcagtacttccagaccgtgactgactatggcaaggacctgatggagaaggtcaagagcccagagcttcaggccgaggccaagtcttactttgaaaagtcaaaggagcagctgacacccctgatcaagaaggctggaacggaactggttaacttcttgagctatttcgtggaacttggaacacagcctgccacccagtgaagtgtccagaccattgtcttccaaccccagctggcctctagaacacccactggccagtcctagagctcctgtccctacccactctttgctacaataaatgctgaatgaatcca

SEQ ID NO: 108112 - DNA, 265 bp, Homo sapiens
  Payload ID: 1244
  Gene Symbol: APOA2
  Gene Name: apolipoprotein A-II
  ENST ID: ENST00000469730
  CDS Start-End: 66-265
aaagaggcctgggcttcagttgtggagagggagagagccaggccgccctccccactgttaccaacatgaagctgctcgcagcaactgtgctactcctcaccatctgcagccttgaaggagctttggttcggagacaggcaaaggagccatgtgtggagagcctggtttctcagtacttccagaccgtgactgactatggcaaggacctgatggagaaggtcaagagcccagagcttcaggccgaggccaagtcttactttgaaaa

SEQ ID NO: 108113 - DNA, 421 bp, Homo sapiens
  Payload ID: 1244
  Gene Symbol: APOA2
  Gene Name: apolipoprotein A-II
  ENST ID: ENST00000468465
  CDS Start-End: 150-308
ggcaggcacagacaccaaggacagagacgctggctaggccgccctccccactgttaccaacatgaagctgctcgcagcaactgtgctactcctcaccatctgcagccttgaagtacttccagaccgtgactgactatggcaaggacctgatggagaaggtcaagagcccagagcttcaggccgaggccaagtcttactttgaaaagtcaaaggagcagctgacacccctgatcaagaaggctggaacggaactggttaacttcttgagctatttcgtggaacttggaacacagcctgccacccagtgaagtgtccagaccattgtcttccaaccccagctggcctctagaacacccactggccagtcctagagctcctgtccctacccactctttgctacaataaatgctgaatgaatcca

SEQ ID NO: 108114 - DNA, 469 bp, Homo sapiens
  Payload ID: 1244
  Gene Symbol: APOA2
  Gene Name: apolipoprotein A-II
  ENST ID: ENST00000463273
  CDS Start-End: 185-469
ggaggcaagatgtgtgagcagcatccaaagaggcctgggcttcagttgtggagagggagagagccaggttggaatgggcagcaggtagggagatccctggggaggagctgaagcccatttggcttcagtgtcccccaaacccccaccaccctcttcctaggccgccctccccactgttaccaacatgaagctgctcgcagcaactgtgctactcctcaccatctgcagccttgaaggagctttggttcggagacaggcaaaggagccatgtgtggagagcctggtttctcagtacttccagaccgtgactgactatggcaaggacctgatggagaaggtcaagagcccagagcttcaggccgaggccaagtcttactttgaaaagtcaaaggagcagctgacacccctgatcaagaaggctggaacggaactggttaacttcttgagctatttcgtggaacttggaaca

SEQ ID NO: 108115 - DNA, 401 bp, Homo sapiens
  Payload ID: 1244
  Gene Symbol: APOA2
  Gene Name: apolipoprotein A-II
  ENST ID: ENST00000463812
  CDS Start-End: 130-288
ggcaggcacagacaccaaggacagagacgctggctaggagctttggttcggagacaggcaaaggagccatgtgtggagagcctggtttctcagtacttccagaccgtgactgactatggcaaggacctgatggagaaggtcaagagcccagagcttcaggccgaggccaagtcttactttgaaaagtcaaaggagcagctgacacccctgatcaagaaggctggaacggaactggttaacttcttgagctatttcgtggaacttggaacacagcctgccacccagtgaagtgtccagaccattgtcttccaaccccagctggcctctagaacacccactggccagtcctagagctcctgtccctacccactctttgctacaataaatgctgaatgaatcca

SEQ ID NO: 108116 - DNA, 530 bp, Homo sapiens
  Payload ID: 1244
  Gene Symbol: APOA2
  Gene Name: apolipoprotein A-II
  ENST ID: ENST00000464492
  CDS Start-End: 40-441
aaggacagagacgctggctaggtaagataaggaggcaagatgtgtgagcagcatccaaagaggcctgggcttcagttgtggagagggagagagccaggttggaatgggcagcaggccgccctccccactgttaccaacatgaagctgctcgcagcaactgtgctactcctcaccatctgcagccttgaaggagctttggttcggagacaggcaaaggagccatgtgtggagagcctggtttctcagtacttccagaccgtgactgactatggcaaggacctgatggagaaggtcaagagcccagagcttcaggccgaggccaagtcttactttgaaaagtcaaaggagcagctgacacccctgatcaagaaggctggaacggaactggttaacttcttgagctatttcgtggaacttggaacacagcctgccacccagtgaagtgtccagaccattgtcttccaaccccagctggcctctagaacacccactggccagtcctagagctcctgtccctacccactctttgc

SEQ ID NO: 108117 - DNA, 416 bp, Homo sapiens
  Payload ID: 1244
  Gene Symbol: APOA2
  Gene Name: apolipoprotein A-II
  ENST ID: ENST00000470459
  CDS Start-End: 59-307
aggcacagacaccaaggacagagacgctggctaggccgccctccccactgttaccaacatgaagctgctcgcagcaactgtgctactcctcaccatctgcagccttgaaggagctttggttcggagacaggcaaaggagccatgtgtggagagcctggtttctcagtacttccagaccgtgactgactatggcaaggacctgatggagaaggtcaagagcccagagcttcaggccgaggccaagtcttactttgaaaacttcttgagctatttcgtggaacttggaacacagcctgccacccagtgaagtgtccagaccattgtcttccaaccccagctggcctctagaacacccactggccagtcctagagctcctgtccctacccactctttgctacaataaatgctgaatgaa

SEQ ID NO: 108118 - DNA, 655 bp, Homo sapiens
  Payload ID: 1244
  Gene Symbol: APOA2
  Gene Name: apolipoprotein A-II
  ENST ID: ENST00000481511
  CDS Start-End: 25-243
gccgccctccccactgttaccaacatgaagctgctcgcagcaactgtgctactcctcaccatctgcagccttgaaggtctggcaaccaaagggctcaaaaggaagatcattccctctctaaagcccagaaagcccatccaaagatctggctggatacctttttggggagggggcagagagctggggtgggtactggcagaggtatggcaggaggccaggattcactgctgtggacccagctgaaaagagtgtgtgtgtgtgtgtgtgtgtgtgtgtgtgtgtgtgtgggcaggagctttggttcggagacaggcaaaggagccatgtgtggagagcctggtttctcagtacttccagaccgtgactgactatggcaaggacctgatggagaaggtcaagagcccagagcttcaggccgaggccaagtcttactttgaaaagtcaaaggagcagctgacacccctgatcaagaaggctggaacggaactggttaacttcttgagctatttcgtggaacttggaacacagcctgccacccagtgaagtgtccagaccattgtcttccaaccccagctggcctctagaacacccactggccagtcctagagctcctgtccctacccactctttgctacaataaatgctgaatgaatcc

SEQ ID NO: 108119 - DNA, 263 bp, Homo sapiens
  Payload ID: 1244
  Gene Symbol: APOA2
  Gene Name: apolipoprotein A-II
  ENST ID: ENST00000491350
  CDS Start-End: 8-91
taccaacatgaagctgctcgcagcaactgtgctactcctcaccatctgcagccttgaaggtcttactttgaaaagtcaaaggagcagctgacacccctgatcaagaaggctggaacggaactggttaacttcttgagctatttcgtggaacttggaacacagcctgccacccagtgaagtgtccagaccattgtcttccaaccccagctggcctctagaacacccactggccagtcctagagctcctgtccctacccactctt

SEQ ID NO: 108120 - DNA, 1473 bp, Homo sapiens
  Payload ID: 1245
  Gene Symbol: APOA4
  Gene Name: apolipoprotein A-IV
  Uniprot ID: P06727
  ENST ID: ENST00000357780
  CDS Start-End: 116-1306
tcagttcccactgcagcgcaggtgagctctcctgaggacctctctgtcagctcccctgattgtagggaggatccagtgtggcaagaaactcctccagcccagcaagcagctcaggatgttcctgaaggccgtggtcctgaccctggccctggtggctgtcgccggagccagggctgaggtcagtgctgaccaggtggccacggtgatgtgggactacttcagccagctgagcaacaatgccaaggaggccgtggaacatctccagaaatctgaactcacccagcaactcaatgccctcttccaggacaaacttggagaagtgaacacttacgcaggtgacctgcagaagaagctggtgccctttgccaccgagctgcatgaacgcctggccaaggactcggagaaactgaaggaggagattgggaaggagctggaggagctgagggcccggctgctgccccatgccaatgaggtgagccagaagatcggggacaacctgcgagagcttcagcagcgcctggagccctacgcggaccagctgcgcacccaggtcagcacgcaggccgagcagctgcggcgccagctgaccccctacgcacagcgcatggagagagtgctgcgggagaacgccgacagcctgcaggcctcgctgaggccccacgccgacgagctcaaggccaagatcgaccagaacgtggaggagctcaagggacgccttacgccctacgctgacgaattcaaagtcaagattgaccagaccgtggaggagctgcgccgcagcctggctccctatgctcaggacacgcaggagaagctcaaccaccagcttgagggcctgaccttccagatgaagaagaacgccgaggagctcaaggccaggatctcggccagtgccgaggagctgcggcagaggctggcgcccttggccgaggacgtgcgtggcaacctgaggggcaacaccgaggggctgcagaagtcactggcagagctgggtgggcacctggaccagcaggtggaggagttccgacgccgggtggagccctacggggaaaacttcaacaaagccctggtgcagcagatggaacagctcaggcagaaactgggcccccatgcgggggacgtggaaggccacttgagcttcctggagaaggacctgagggacaaggtcaactccttcttcagcaccttcaaggagaaagagagccaggacaagactctctccctccctgagctggagcaacagcaggaacagcagcaggagcagcagcaggagcaggtgcagatgctggcccctttggagagctgagctgcccctggtgcactggccccaccctcgtggacacctgccctgccctgccacctgtctgtctgtctgtcccaaagaagttctggtatgaacttgaggacacatgtccagtgggaggtgagaccacctctcaatattcaataaagctgctgagaatctagcctcaa

SEQ ID NO: 108121 - DNA, 1897 bp, Homo sapiens
  Payload ID: 1246
  Gene Symbol: APOA5
  Gene Name: apolipoprotein A-V
  Uniprot ID: Q6Q788
  ENST ID: ENST00000227665
  CDS Start-End: 36-1136
caggcctccctccacctgtcttctcagagcaggtaatggcaagcatggctgccgtgctcacctgggctctggctcttctttcagcgttttcggccacccaggcacggaaaggcttctgggactacttcagccagaccagcggggacaaaggcagggtggagcagatccatcagcagaagatggctcgcgagcccgcgaccctgaaagacagccttgagcaagacctcaacaatatgaacaagttcctggaaaagctgaggcctctgagtgggagcgaggctcctcggctcccacaggacccggtgggcatgcggcggcagctgcaggaggagttggaggaggtgaaggctcgcctccagccctacatggcagaggcgcacgagctggtgggctggaatttggagggcttgcggcagcaactgaagccctacacgatggatctgatggagcaggtggccctgcgcgtgcaggagctgcaggagcagttgcgcgtggtgggggaagacaccaaggcccagttgctggggggcgtggacgaggcttgggctttgctgcagggactgcagagccgcgtggtgcaccacaccggccgcttcaaagagctcttccacccatacgccgagagcctggtgagcggcatcgggcgccacgtgcaggagctgcaccgcagtgtggctccgcacgcccccgccagccccgcgcgcctcagtcgctgcgtgcaggtgctctcccggaagctcacgctcaaggccaaggccctgcacgcacgcatccagcagaacctggaccagctgcgcgaagagctcagcagagcctttgcaggcactgggactgaggaaggggccggcccggacccccagatgctctccgaggaggtgcgccagcgacttcaggctttccgccaggacacctacctgcagatagctgccttcactcgcgccatcgaccaggagactgaggaggtccagcagcagctggcgccacctccaccaggccacagtgccttcgccccagagtttcaacaaacagacagtggcaaggttctgagcaagctgcaggcccgtctggatgacctgtgggaagacatcactcacagccttcatgaccagggccacagccatctgggggacccctgaggatctacctgcccaggcccattcccagctccttgtctggggagccttggctctgagcctctagcatggttcagtccttgaaagtggcctgttgggtggagggtggaaggtcctgtgcaggacagggaggccaccaaaggggctgctgtctcctgcacatccagcctcctgcgactccccaatctggatgcattacattcaccaggctttgcaaacccagcctcccagtgctcatttgggaatgctcatgagttactccattcaagggtgagggagtagggagggagaggcaccatgcatgtgggtgattatctgcaagcctgtttgccgtgatgctggaagcctgtgccactacatcctggagtttggctctagtcacttctggctgcctggtggccactgctacagctggtccacagagaggagcacttgtctccccagggctgccatggcagctatcaggggaatagaagggagaaagagaatatcatggggagaacatgtgatggtgtgtgaatatccctgctggctctgatgctggtgggtacgaaaggtgtgggctgtgataggagagggcagagcccatgtttcctgacatagctctacacctaaataagggactgaaccctcccaactgtgggagctccttaaaccctctggggagcatactgtgtgctctccccatctccagcccctccctctgggttcccaagttgaagcctagacttctggctcaaatgaaatagatgtttatgatagaa

SEQ ID NO: 108122 - DNA, 526 bp, Homo sapiens
  Payload ID: 1246
  Gene Symbol: APOA5
  Gene Name: apolipoprotein A-V
  ENST ID: ENST00000433069
  CDS Start-End: 41-526
aatgtctgctctctgtgcccagacgtgagcagagcaggtaatggcaagcatggctgccgtgctcacctgggctctggctcttctttcagcgttttcggccacccaggcacggaaaggcttctgggactacttcagccagaccagcggggacaaaggcagggtggagcagatccatcagcagaagatggctcgcgagcccgcgaccctgaaagacagccttgagcaagacctcaacaatatgaacaagttcctggaaaagctgaggcctctgagtgggagcgaggctcctcggctcccacaggacccggtgggcatgcggcggcagctgcaggaggagttggaggaggtgaaggctcgcctccagccctacatggcagaggcgcacgagctggtgggctggaatttggagggcttgcggcagcaactgaagccctacacgatggatctgatggagcaggtggccctgcgcgtgcaggagctgcaggagcagttgcgcgtggtgggggaagacaccaaggcccagttg

SEQ ID NO: 108123 - DNA, 1929 bp, Homo sapiens
  Payload ID: 1246
  Gene Symbol: APOA5
  Gene Name: apolipoprotein A-V
  Uniprot ID: Q6Q788
  ENST ID: ENST00000542499
  CDS Start-End: 74-1174
ataaagcagaatgtctgctctctgtgcccagacgtgagcaggcctccctccacctgtcttctcagagcaggtaatggcaagcatggctgccgtgctcacctgggctctggctcttctttcagcgttttcggccacccaggcacggaaaggcttctgggactacttcagccagaccagcggggacaaaggcagggtggagcagatccatcagcagaagatggctcgcgagcccgcgaccctgaaagacagccttgagcaagacctcaacaatatgaacaagttcctggaaaagctgaggcctctgagtgggagcgaggctcctcggctcccacaggacccggtgggcatgcggcggcagctgcaggaggagttggaggaggtgaaggctcgcctccagccctacatggcagaggcgcacgagctggtgggctggaatttggagggcttgcggcagcaactgaagccctacacgatggatctgatggagcaggtggccctgcgcgtgcaggagctgcaggagcagttgcgcgtggtgggggaagacaccaaggcccagttgctggggggcgtggacgaggcttgggctttgctgcagggactgcagagccgcgtggtgcaccacaccggccgcttcaaagagctcttccacccatacgccgagagcctggtgagcggcatcgggcgccacgtgcaggagctgcaccgcagtgtggctccgcacgcccccgccagccccgcgcgcctcagtcgctgcgtgcaggtgctctcccggaagctcacgctcaaggccaaggccctgcacgcacgcatccagcagaacctggaccagctgcgcgaagagctcagcagagcctttgcaggcactgggactgaggaaggggccggcccggacccccagatgctctccgaggaggtgcgccagcgacttcaggctttccgccaggacacctacctgcagatagctgccttcactcgcgccatcgaccaggagactgaggaggtccagcagcagctggcgccacctccaccaggccacagtgccttcgccccagagtttcaacaaacagacagtggcaaggttctgagcaagctgcaggcccgtctggatgacctgtgggaagacatcactcacagccttcatgaccagggccacagccatctgggggacccctgaggatctacctgcccaggcccattcccagctccttgtctggggagccttggctctgagcctctagcatggttcagtccttgaaagtggcctgttgggtggagggtggaaggtcctgtgcaggacagggaggccaccaaaggggctgctgtctcctgcacatccagcctcctgcgactccccaatctggatgcattacattcaccaggctttgcaaacccagcctcccagtgctcatttgggaatgctcatgagttactccattcaagggtgagggagtagggagggagaggcaccatgcatgtgggtgattatctgcaagcctgtttgccgtgatgctggaagcctgtgccactacatcctggagtttggctctagtcacttctggctgcctggtggccactgctacagctggtccacagagaggagcacttgtctccccagggctgccatggcagctatcaggggaatagaagggagaaagagaatatcatggggagaacatgtgatggtgtgtgaatatccctgctggctctgatgctggtgggtacgaaaggtgtgggctgtgataggagagggcagagcccatgtttcctgacatagctctacacctaaataagggactgaaccctcccaactgtgggagctccttaaaccctctggggagcatactgtgtgctctccccatctccagcccctccctctgggttcccaagttgaagcctagacttctggctcaaatgaaatagatgtttatg

SEQ ID NO: 108124 - DNA, 14121 bp, Homo sapiens
  Payload ID: 1247
  Gene Symbol: APOB
  Gene Name: apolipoprotein B
  Uniprot ID: P04114
  ENST ID: ENST00000233242
  CDS Start-End: 129-13820
attcccaccgggacctgcggggctgagtgcccttctcggttgctgccgctgaggagcccgcccagccagccagggccgcgaggccgaggccaggccgcagcccaggagccgccccaccgcagctggcgatggacccgccgaggcccgcgctgctggcgctgctggcgctgcctgcgctgctgctgctgctgctggcgggcgccagggccgaagaggaaatgctggaaaatgtcagcctggtctgtccaaaagatgcgacccgattcaagcacctccggaagtacacatacaactatgaggctgagagttccagtggagtccctgggactgctgattcaagaagtgccaccaggatcaactgcaaggttgagctggaggttccccagctctgcagcttcatcctgaagaccagccagtgcaccctgaaagaggtgtatggcttcaaccctgagggcaaagccttgctgaagaaaaccaagaactctgaggagtttgctgcagccatgtccaggtatgagctcaagctggccattccagaagggaagcaggttttcctttacccggagaaagatgaacctacttacatcctgaacatcaagaggggcatcatttctgccctcctggttcccccagagacagaagaagccaagcaagtgttgtttctggataccgtgtatggaaactgctccactcactttaccgtcaagacgaggaagggcaatgtggcaacagaaatatccactgaaagagacctggggcagtgtgatcgcttcaagcccatccgcacaggcatcagcccacttgctctcatcaaaggcatgacccgccccttgtcaactctgatcagcagcagccagtcctgtcagtacacactggacgctaagaggaagcatgtggcagaagccatctgcaaggagcaacacctcttcctgcctttctcctacaagaataagtatgggatggtagcacaagtgacacagactttgaaacttgaagacacaccaaagatcaacagccgcttctttggtgaaggtactaagaagatgggcctcgcatttgagagcaccaaatccacatcacctccaaagcaggccgaagctgttttgaagactctccaggaactgaaaaaactaaccatctctgagcaaaatatccagagagctaatctcttcaataagctggttactgagctgagaggcctcagtgatgaagcagtcacatctctcttgccacagctgattgaggtgtccagccccatcactttacaagccttggttcagtgtggacagcctcagtgctccactcacatcctccagtggctgaaacgtgtgcatgccaacccccttctgatagatgtggtcacctacctggtggccctgatccccgagccctcagcacagcagctgcgagagatcttcaacatggcgagggatcagcgcagccgagccaccttgtatgcgctgagccacgcggtcaacaactatcataagacaaaccctacagggacccaggagctgctggacattgctaattacctgatggaacagattcaagatgactgcactggggatgaagattacacctatttgattctgcgggtcattggaaatatgggccaaaccatggagcagttaactccagaactcaagtcttcaatcctgaaatgtgtccaaagtacaaagccatcactgatgatccagaaagctgccatccaggctctgcggaaaatggagcctaaagacaaggaccaggaggttcttcttcagactttccttgatgatgcttctccgggagataagcgactggctgcctatcttatgttgatgaggagtccttcacaggcagatattaacaaaattgtccaaattctaccatgggaacagaatgagcaagtgaagaactttgtggcttcccatattgccaatatcttgaactcagaagaattggatatccaagatctgaaaaagttagtgaaagaagctctgaaagaatctcaacttccaactgtcatggacttcagaaaattctctcggaactatcaactctacaaatctgtttctcttccatcacttgacccagcctcagccaaaatagaagggaatcttatatttgatccaaataactaccttcctaaagaaagcatgctgaaaactaccctcactgcctttggatttgcttcagctgacctcatcgagattggcttggaaggaaaaggctttgagccaacattggaagctctttttgggaagcaaggatttttcccagacagtgtcaacaaagctttgtactgggttaatggtcaagttcctgatggtgtctctaaggtcttagtggaccactttggctataccaaagatgataaacatgagcaggatatggtaaatggaataatgctcagtgttgagaagctgattaaagatttgaaatccaaagaagtcccggaagccagagcctacctccgcatcttgggagaggagcttggttttgccagtctccatgacctccagctcctgggaaagctgcttctgatgggtgcccgcactctgcaggggatcccccagatgattggagaggtcatcaggaagggctcaaagaatgacttttttcttcactacatcttcatggagaatgcctttgaactccccactggagctggattacagttgcaaatatcttcatctggagtcattgctcccggagccaaggctggagtaaaactggaagtagccaacatgcaggctgaactggtggcaaaaccctccgtgtctgtggagtttgtgacaaatatgggcatcatcattccggacttcgctaggagtggggtccagatgaacaccaacttcttccacgagtcgggtctggaggctcatgttgccctaaaagctgggaagctgaagtttatcattccttccccaaagagaccagtcaagctgctcagtggaggcaacacattacatttggtctctaccaccaaaacggaggtgatcccacctctcattgagaacaggcagtcctggtcagtttgcaagcaagtctttcctggcctgaattactgcacctcaggcgcttactccaacgccagctccacagactccgcctcctactatccgctgaccggggacaccagattagagctggaactgaggcctacaggagagattgagcagtattctgtcagcgcaacctatgagctccagagagaggacagagccttggtggataccctgaagtttgtaactcaagcagaaggtgcgaagcagactgaggctaccatgacattcaaatataatcggcagagtatgaccttgtccagtgaagtccaaattccggattttgatgttgacctcggaacaatcctcagagttaatgatgaatctactgagggcaaaacgtcttacagactcaccctggacattcagaacaagaaaattactgaggtcgccctcatgggccacctaagttgtgacacaaaggaagaaagaaaaatcaagggtgttatttccataccccgtttgcaagcagaagccagaagtgagatcctcgcccactggtcgcctgccaaactgcttctccaaatggactcatctgctacagcttatggctccacagtttccaagagggtggcatggcattatgatgaagagaagattgaatttgaatggaacacaggcaccaatgtagataccaaaaaaatgacttccaatttccctgtggatctctccgattatcctaagagcttgcatatgtatgctaatagactcctggatcacagagtccctcaaacagacatgactttccggcacgtgggttccaaattaatagttgcaatgagctcatggcttcagaaggcatctgggagtcttccttatacccagactttgcaagaccacctcaatagcctgaaggagttcaacctccagaacatgggattgccagacttccacatcccagaaaacctcttcttaaaaagcgatggccgggtcaaatataccttgaacaagaacagtttgaaaattgagattcctttgccttttggtggcaaatcctccagagatctaaagatgttagagactgttaggacaccagccctccacttcaagtctgtgggattccatctgccatctcgagagttccaagtccctacttttaccattcccaagttgtatcaactgcaagtgcctctcctgggtgttctagacctctccacgaatgtctacagcaacttgtacaactggtccgcctcctacagtggtggcaacaccagcacagaccatttcagccttcgggctcgttaccacatgaaggctgactctgtggttgacctgctttcctacaatgtgcaaggatctggagaaacaacatatgaccacaagaatacgttcacactatcatgtgatgggtctctacgccacaaatttctagattcgaatatcaaattcagtcatgtagaaaaacttggaaacaacccagtctcaaaaggtttactaatattcgatgcatctagttcctggggaccacagatgtctgcttcagttcatttggactccaaaaagaaacagcatttgtttgtcaaagaagtcaagattgatgggcagttcagagtctcttcgttctatgctaaaggcacatatggcctgtcttgtcagagggatcctaacactggccggctcaatggagagtccaacctgaggtttaactcctcctacctccaaggcaccaaccagataacaggaagatatgaagatggaaccctctccctcacctccacctctgatctgcaaagtggcatcattaaaaatactgcttccctaaagtatgagaactacgagctgactttaaaatctgacaccaatgggaagtataagaactttgccacttctaacaagatggatatgaccttctctaagcaaaatgcactgctgcgttctgaatatcaggctgattacgagtcattgaggttcttcagcctgctttctggatcactaaattcccatggtcttgagttaaatgctgacatcttaggcactgacaaaattaatagtggtgctcacaaggcgacactaaggattggccaagatggaatatctaccagtgcaacgaccaacttgaagtgtagtctcctggtgctggagaatgagctgaatgcagagcttggcctctctggggcatctatgaaattaacaacaaatggccgcttcagggaacacaatgcaaaattcagtctggatgggaaagccgccctcacagagctatcactgggaagtgcttatcaggccatgattctgggtgtcgacagcaaaaacattttcaacttcaaggtcagtcaagaaggacttaagctctcaaatgacatgatgggctcatatgctgaaatgaaatttgaccacacaaacagtctgaacattgcaggcttatcactggacttctcttcaaaacttgacaacatttacagctctgacaagttttataagcaaactgttaatttacagctacagccctattctctggtaactactttaaacagtgacctgaaatacaatgctctggatctcaccaacaatgggaaactacggctagaacccctgaagctgcatgtggctggtaacctaaaaggagcctaccaaaataatgaaataaaacacatctatgccatctcttctgctgccttatcagcaagctataaagcagacactgttgctaaggttcagggtgtggagtttagccatcggctcaacacagacatcgctgggctggcttcagccattgacatgagcacaaactataattcagactcactgcatttcagcaatgtcttccgttctgtaatggccccgtttaccatgaccatcgatgcacatacaaatggcaatgggaaactcgctctctggggagaacatactgggcagctgtatagcaaattcctgttgaaagcagaacctctggcatttactttctctcatgattacaaaggctccacaagtcatcatctcgtgtctaggaaaagcatcagtgcagctcttgaacacaaagtcagtgccctgcttactccagctgagcagacaggcacctggaaactcaagacccaatttaacaacaatgaatacagccaggacttggatgcttacaacactaaagataaaattggcgtggagcttactggacgaactctggctgacctaactctactagactccccaattaaagtgccacttttactcagtgagcccatcaatatcattgatgctttagagatgagagatgccgttgagaagccccaagaatttacaattgttgcttttgtaaagtatgataaaaaccaagatgttcactccattaacctcccattttttgagaccttgcaagaatattttgagaggaatcgacaaaccattatagttgtactggaaaacgtacagagaaacctgaagcacatcaatattgatcaatttgtaagaaaatacagagcagccctgggaaaactcccacagcaagctaatgattatctgaattcattcaattgggagagacaagtttcacatgccaaggagaaactgactgctctcacaaaaaagtatagaattacagaaaatgatatacaaattgcattagatgatgccaaaatcaactttaatgaaaaactatctcaactgcagacatatatgatacaatttgatcagtatattaaagatagttatgatttacatgatttgaaaatagctattgctaatattattgatgaaatcattgaaaaattaaaaagtcttgatgagcactatcatatccgtgtaaatttagtaaaaacaatccatgatctacatttgtttattgaaaatattgattttaacaaaagtggaagtagtactgcatcctggattcaaaatgtggatactaagtaccaaatcagaatccagatacaagaaaaactgcagcagcttaagagacacatacagaatatagacatccagcacctagctggaaagttaaaacaacacattgaggctattgatgttagagtgcttttagatcaattgggaactacaatttcatttgaaagaataaatgacattcttgagcatgtcaaacactttgttataaatcttattggggattttgaagtagctgagaaaatcaatgccttcagagccaaagtccatgagttaatcgagaggtatgaagtagaccaacaaatccaggttttaatggataaattagtagagttggcccaccaatacaagttgaaggagactattcagaagctaagcaatgtcctacaacaagttaagataaaagattactttgagaaattggttggatttattgatgatgctgtcaagaagcttaatgaattatcttttaaaacattcattgaagatgttaacaaattccttgacatgttgataaagaaattaaagtcatttgattaccaccagtttgtagatgaaaccaatgacaaaatccgtgaggtgactcagagactcaatggtgaaattcaggctctggaactaccacaaaaagctgaagcattaaaactgtttttagaggaaaccaaggccacagttgcagtgtatctggaaagcctacaggacaccaaaataaccttaatcatcaattggttacaggaggctttaagttcagcatctttggctcacatgaaggccaaattccgagagaccctagaagatacacgagaccgaatgtatcaaatggacattcagcaggaacttcaacgatacctgtctctggtaggccaggtttatagcacacttgtcacctacatttctgattggtggactcttgctgctaagaaccttactgactttgcagagcaatattctatccaagattgggctaaacgtatgaaagcattggtagagcaagggttcactgttcctgaaatcaagaccatccttgggaccatgcctgcctttgaagtcagtcttcaggctcttcagaaagctaccttccagacacctgattttatagtccccctaacagatttgaggattccatcagttcagataaacttcaaagacttaaaaaatataaaaatcccatccaggttttccacaccagaatttaccatccttaacaccttccacattccttcctttacaattgactttgtagaaatgaaagtaaagatcatcagaaccattgaccagatgctgaacagtgagctgcagtggcccgttccagatatatatctcagggatctgaaggtggaggacattcctctagcgagaatcaccctgccagacttccgtttaccagaaatcgcaattccagaattcataatcccaactctcaaccttaatgattttcaagttcctgaccttcacataccagaattccagcttccccacatctcacacacaattgaagtacctacttttggcaagctatacagtattctgaaaatccaatctcctcttttcacattagatgcaaatgctgacatagggaatggaaccacctcagcaaacgaagcaggtatcgcagcttccatcactgccaaaggagagtccaaattagaagttctcaattttgattttcaagcaaatgcacaactctcaaaccctaagattaatccgctggctctgaaggagtcagtgaagttctccagcaagtacctgagaacggagcatgggagtgaaatgctgttttttggaaatgctattgagggaaaatcaaacacagtggcaagtttacacacagaaaaaaatacactggagcttagtaatggagtgattgtcaagataaacaatcagcttaccctggatagcaacactaaatacttccacaaattgaacatccccaaactggacttctctagtcaggctgacctgcgcaacgagatcaagacactgttgaaagctggccacatagcatggacttcttctggaaaagggtcatggaaatgggcctgccccagattctcagatgagggaacacatgaatcacaaattagtttcaccatagaaggacccctcacttcctttggactgtccaataagatcaatagcaaacacctaagagtaaaccaaaacttggtttatgaatctggctccctcaacttttctaaacttgaaattcaatcacaagtcgattcccagcatgtgggccacagtgttctaactgctaaaggcatggcactgtttggagaagggaaggcagagtttactgggaggcatgatgctcatttaaatggaaaggttattggaactttgaaaaattctcttttcttttcagcccagccatttgagatcacggcatccacaaacaatgaagggaatttgaaagttcgttttccattaaggttaacagggaagatagacttcctgaataactatgcactgtttctgagtcccagtgcccagcaagcaagttggcaagtaagtgctaggttcaatcagtataagtacaaccaaaatttctctgctggaaacaacgagaacattatggaggcccatgtaggaataaatggagaagcaaatctggatttcttaaacattcctttaacaattcctgaaatgcgtctaccttacacaataatcacaactcctccactgaaagatttctctctatgggaaaaaacaggcttgaaggaattcttgaaaacgacaaagcaatcatttgatttaagtgtaaaagctcagtataagaaaaacaaacacaggcattccatcacaaatcctttggctgtgctttgtgagtttatcagtcagagcatcaaatcctttgacaggcattttgaaaaaaacagaaacaatgcattagattttgtcaccaaatcctataatgaaacaaaaattaagtttgataagtacaaagctgaaaaatctcacgacgagctccccaggacctttcaaattcctggatacactgttccagttgtcaatgttgaagtgtctccattcaccatagagatgtcggcattcggctatgtgttcccaaaagcagtcagcatgcctagtttctccatcctaggttctgacgtccgtgtgccttcatacacattaatcctgccatcattagagctgccagtccttcatgtccctagaaatctcaagctttctcttccagatttcaaggaattgtgtaccataagccatatttttattcctgccatgggcaatattacctatgatttctcctttaaatcaagtgtcatcacactgaataccaatgctgaactttttaaccagtcagatattgttgctcatctcctttcttcatcttcatctgtcattgatgcactgcagtacaaattagagggcaccacaagattgacaagaaaaaggggattgaagttagccacagctctgtctctgagcaacaaatttgtggagggtagtcataacagtactgtgagcttaaccacgaaaaatatggaagtgtcagtggcaacaaccacaaaagcccaaattccaattttgagaatgaatttcaagcaagaacttaatggaaataccaagtcaaaacctactgtctcttcctccatggaatttaagtatgatttcaattcttcaatgctgtactctaccgctaaaggagcagttgaccacaagcttagcttggaaagcctcacctcttacttttccattgagtcatctaccaaaggagatgtcaagggttcggttctttctcgggaatattcaggaactattgctagtgaggccaacacttacttgaattccaagagcacacggtcttcagtgaagctgcagggcacttccaaaattgatgatatctggaaccttgaagtaaaagaaaattttgctggagaagccacactccaacgcatatattccctctgggagcacagtacgaaaaaccacttacagctagagggcctctttttcaccaacggagaacatacaagcaaagccaccctggaactctctccatggcaaatgtcagctcttgttcaggtccatgcaagtcagcccagttccttccatgatttccctgaccttggccaggaagtggccctgaatgctaacactaagaaccagaagatcagatggaaaaatgaagtccggattcattctgggtctttccagagccaggtcgagctttccaatgaccaagaaaaggcacaccttgacattgcaggatccttagaaggacacctaaggttcctcaaaaatatcatcctaccagtctatgacaagagcttatgggatttcctaaagctggatgtaaccaccagcattggtaggagacagcatcttcgtgtttcaactgcctttgtgtacaccaaaaaccccaatggctattcattctccatccctgtaaaagttttggctgataaattcattattcctgggctgaaactaaatgatctaaattcagttcttgtcatgcctacgttccatgtcccatttacagatcttcaggttccatcgtgcaaacttgacttcagagaaatacaaatctataagaagctgagaacttcatcatttgccctcaacctaccaacactccccgaggtaaaattccctgaagttgatgtgttaacaaaatattctcaaccagaagactccttgattcccttttttgagataaccgtgcctgaatctcagttaactgtgtcccagttcacgcttccaaaaagtgtttcagatggcattgctgctttggatctaaatgcagtagccaacaagatcgcagactttgagttgcccaccatcatcgtgcctgagcagaccattgagattccctccattaagttctctgtacctgctggaattgtcattccttcctttcaagcactgactgcacgctttgaggtagactctcccgtgtataatgccacttggagtgccagtttgaaaaacaaagcagattatgttgaaacagtcctggattccacatgcagctcaaccgtacagttcctagaatatgaactaaatgttttgggaacacacaaaatcgaagatggtacgttagcctctaagactaaaggaacatttgcacaccgtgacttcagtgcagaatatgaagaagatggcaaatatgaaggacttcaggaatgggaaggaaaagcgcacctcaatatcaaaagcccagcgttcaccgatctccatctgcgctaccagaaagacaagaaaggcatctccacctcagcagcctccccagccgtaggcaccgtgggcatggatatggatgaagatgacgacttttctaaatggaacttctactacagccctcagtcctctccagataaaaaactcaccatattcaaaactgagttgagggtccgggaatctgatgaggaaactcagatcaaagttaattgggaagaagaggcagcttctggcttgctaacctctctgaaagacaacgtgcccaaggccacaggggtcctttatgattatgtcaacaagtaccactgggaacacacagggctcaccctgagagaagtgtcttcaaagctgagaagaaatctgcagaacaatgctgagtgggtttatcaaggggccattaggcaaattgatgatatcgacgtgaggttccagaaagcagccagtggcaccactgggacctaccaagagtggaaggacaaggcccagaatctgtaccaggaactgttgactcaggaaggccaagccagtttccagggactcaaggataacgtgtttgatggcttggtacgagttactcaagaattccatatgaaagtcaagcatctgattgactcactcattgattttctgaacttccccagattccagtttccggggaaacctgggatatacactagggaggaactttgcactatgttcataagggaggtagggacggtactgtcccaggtatattcgaaagtccataatggttcagaaatactgttttcctatttccaagacctagtgattacacttcctttcgagttaaggaaacataaactaatagatgtaatctcgatgtatagggaactgttgaaagatttatcaaaagaagcccaagaggtatttaaagccattcagtctctcaagaccacagaggtgctacgtaatcttcaggaccttttacaattcattttccaactaatagaagataacattaaacagctgaaagagatgaaatttacttatcttattaattatatccaagatgagatcaacacaatcttcagtgattatatcccatatgtttttaaattgttgaaagaaaacctatgccttaatcttcataagttcaatgaatttattcaaaacgagcttcaggaagcttctcaagagttacagcagatccatcaatacattatggcccttcgtgaagaatattttgatccaagtatagttggctggacagtgaaatattatgaacttgaagaaaagatagtcagtctgatcaagaacctgttagttgctcttaaggacttccattctgaatatattgtcagtgcctctaactttacttcccaactctcaagtcaagttgagcaatttctgcacagaaatattcaggaatatcttagcatccttaccgatccagatggaaaagggaaagagaagattgcagagctttctgccactgctcaggaaataattaaaagccaggccattgcgacgaagaaaataatttctgattaccaccagcagtttagatataaactgcaagatttttcagaccaactctctgattactatgaaaaatttattgctgaatccaaaagattgattgacctgtccattcaaaactaccacacatttctgatatacatcacggagttactgaaaaagctgcaatcaaccacagtcatgaacccctacatgaagcttgctccaggagaacttactatcatcctctaattttttaaaagaaatcttcatttattcttcttttccaattgaactttcacatagcacagaaaaaattcaaactgcctatattgataaaaccatacagtgagccagccttgcagtaggcagtagactataagcagaagcacatatgaactggacctgcaccaaagctggcaccagggctcggaaggtctctgaactcagaaggatggcattttttgcaagttaaagaaaatcaggatctgagttattttgctaaacttgggggaggaggaacaaataaatggagtctttattgtgtatcata

SEQ ID NO: 108125 - DNA, 3128 bp, Homo sapiens
  Payload ID: 1247
  Gene Symbol: APOB
  Gene Name: apolipoprotein B
  ENST ID: ENST00000399256
  CDS Start-End: 18-2504
ccccaccgcagctggcgatggacccgccgaggcccgcgctgctggcgctgctggcgctgcctgcgctgctgctgctgctgctggcgggcgccagggccgaagaggaaatgctggaaaatgtcagcctggtctgtccaaaagatgcgacccgattcaagcacctccggaagtacacatacaactatgaggctgagagttccagtggagtccctgggactgctgattcaagaagtgccaccaggatcaactgcaaggttgagctggaggttccccagctctgcagcttcatcctgaagaccagccagtgcaccctgaaagaggtgtatggcttcaaccctgagggcaaagccttgctgaagaaaaccaagaactctgaggagtttgctgcagccatgtccaggtatgagctcaagctggccattccagaagggaagcaggttttcctttacccggagaaagatgaacctacttacatcctgaacatcaagaggggcatcatttctgccctcctggttcccccagagacagaagaagccaagcaagtgttgtttctggataccgtgtatggaaactgctccactcactttaccgtcaagacgaggaagggcaatgtggcaacagaaatatccactgaaagagacctggggcagtgtgatcgcttcaagcccatccgcacaggcatcagcccacttgctctcatcaaaggcatgacccgccccttgtcaactctgatcagcagcagccagtcctgtcagtacacactggacgctaagaggaagcatgtggcagaagccatctgcaaggagcaacacctcttcctgcctttctcctacaagaataagtatgggatggtagcacaagtgacacagactttgaaacttgaagacacaccaaagatcaacagccgcttctttggtgaaggtactaagaagatgggcctcgcatttgagagcaccaaatccacatcacctccaaagcaggccgaagctgttttgaagactctccaggaactgaaaaaactaaccatctctgagcaaaatatccagagagctaatctcttcaataagctggttactgagctgagaggcctcagtgatgaagcagtcacatctctcttgccacagctgattgaggtgtccagccccatcactttacaagccttggttcagtgtggacagcctcagtgctccactcacatcctccagtggctgaaacgtgtgcatgccaacccccttctgatagatgtggtcacctacctggtggccctgatccccgagccctcagcacagcagctgcgagagatcttcaacatggcgagggatcagcgcagccgagccaccttgtatgcgctgagccacgcggtcaacaactatcataagacaaaccctacagggacccaggagctgctggacattgctaattacctgatggaacagattcaagatgactgcactggggatgaagattacacctatttgattctgcgggtcattggaaatatgggccaaaccatggagcagttaactccagaactcaagtcttcaatcctgaaatgtgtccaaagtacaaagccatcactgatgatccagaaagctgccatccaggctctgcggaaaatggagcctaaagacaaggaccaggaggttcttcttcagactttccttgatgatgcttctccgggagataagcgactggctgcctatcttatgttgatgaggagtccttcacaggcagatattaacaaaattgtccaaattctaccatgggaacagaatgagcaagtgaagaactttgtggcttcccatattgccaatatcttgaactcagaagaattggatatccaagatctgaaaaagttagtgaaagaagctctgaaagaatctcaacttccaactgtcatggacttcagaaaattctctcggaactatcaactctacaaatctgtttctcttccatcacttgacccagcctcagccaaaatagaagggaatcttatatttgatccaaataactaccttcctaaagaaagcatgctgaaaactaccctcactgcctttggatttgcttcagctgacctcatcgagattggcttggaaggaaaaggctttgagccaacattggaagctctttttgggaagcaaggatttttcccagacagtgtcaacaaagctttgtactgggttaatggtcaagttcctgatggtgtctctaaggtcttagtggaccactttggctataccaaagatgataaacatgagcaggatatggtaaatggaataatgctcagtgttgagaagctgattaaagatttgaaatccaaagaagtcccggaagccagagcctacctccgcatcttgggagaggagcttggttttgccagtctccatgacctccagctcctgggaaagctgcttctgatggatcgcccagactcccttacgatcccagctgcacaagcccgaaaagatgcttgtactttcttcagagatggaggtttgccttgaatttcactgaagatgactcttggatcacatggaaatgttaacatttagaaattaagctattcataatgttagctgtatttttaagagcattaatttattcatctggaaaacaatgttcggtataccttcctctacctttgctgaaggtccttttatttttatttttatttttttaattttttgagatggagtcttgctcccaggctggagtgcagtgatacaatctcggctcactgcaactctgccttccgggttcaagcaattctcctgcctcagcctcccaagtagctgggactgtggacgtgcaccagcatgcccggctaatttgtgtatctttagtagagacaagcctgttgacaaccatgtcaggctggtttcgaactcctgacctcaagtgatcctccagcctgggcctcccacagtgctggaataacaggtgtgagccactgcacctgacctgaaggtccttttaagattgaaatgatacaatgattataaaagaaagtatttggcaaactataattcactatctaaatatgctataatttttattattaattcataaaaggaaatatataaatgtactcctatggcttgattaaaaaaatgttgactttaagaaaa

SEQ ID NO: 108126 - DNA, 13991 bp, Homo sapiens
  Payload ID: 1247
  Gene Symbol: APOB
  Gene Name: apolipoprotein B
  ENST ID: ENST00000616098
  CDS Start-End: 1-13035
atggacccgccgaggcccgcgctgctggcgctgctggcgctgcctgcgctgctgctgctgctgctggcgggcgccagggccgaagaggaaatgctggaaaatgtcagcctggtctgtccaaaagatgcgacccgattcaagcacctccggaagtacacatacaactatgaggctgagagttccagtggagtccctgggactgctgattcaagaagtgccaccaggatcaactgcaaggttgagctggaggttccccagctctgcagcttcatcctgaagaccagccagtgcaccctgaaagaggtgtatggcttcaaccctgagggcaaagccttgctgaagaaaaccaagaactctgaggagtttgctgcagccatgtccaggtatgagctcaagctggccattccagaagggaagcaggttttcctttacccggagaaagatgaacctacttacatcctgaacatcaagaggggcatcatttctgccctcctggttcccccagagacagaagaagccaagcaagtgttgtttctggataccgtgtatggaaactgctccactcactttaccgtcaagacgaggaagggcaatgtggcaacagaaatatccactgaaagagacctggggcagtgtgatcgcttcaagcccatccgcacaggcatcagcccacttgctctcatcaaaggcatgacccgccccttgtcaactctgatcagcagcagccagtcctgtcagtacacactggacgctaagaggaagcatgtggcagaagccatctgcaaggagcaacacctcttcctgcctttctcctacaagaataagtatgggatggtagcacaagtgacacagactttgaaacttgaagacacaccaaagatcaacagccgcttctttggtgaaggtactaagaagatgggcctcgcatttgagagcaccaaatccacatcacctccaaagcaggccgaagctgttttgaagactctccaggaactgaaaaaactaaccatctctgagcaaaatatccagagagctaatctcttcaataagctggttactgagctgagaggcctcagtgatgaagcagtcacatctctcttgccacagctgattgaggtgtccagccccatcactttacaagccttggttcagtgtggacagcctcagtgctccactcacatcctccagtggctgaaacgtgtgcatgccaacccccttctgatagatgtggtcacctacctggtggccctgatccccgagccctcagcacagcagctgcgagagatcttcaacatggcgagggatcagcgcagccgagccaccttgtatgcgctgagccacgcggtcaacaactatcataagacaaaccctacagggacccaggagctgctggacattgctaattacctgatggaacagattcaagatgactgcactggggatgaagattacacctatttgattctgcgggtcattggaaatatgggccaaaccatggagcagttaactccagaactcaagtcttcaatcctgaaatgtgtccaaagtacaaagccatcactgatgatccagaaagctgccatccaggctctgcggaaaatggagcctaaagacaaggaccaggaggttcttcttcagactttccttgatgatgcttctccgggagataagcgactggctgcctatcttatgttgatgaggagtccttcacaggcagatattaacaaaattgtccaaattctaccatgggaacagaatgagcaagtgaagaactttgtggcttcccatattgccaatatcttgaactcagaagaattggatatccaagatctgaaaaagttagtgaaagaagctctgaaagaatctcaacttccaactgtcatggacttcagaaaattctctcggaactatcaactctacaaatctgtttctcttccatcacttgacccagcctcagccaaaatagaagggaatcttatatttgatccaaataactaccttcctaaagaaagcatgctgaaaactaccctcactgcctttggatttgcttcagctgacctcatcgagattggcttggaaggaaaaggctttgagccaacattggaagctctttttgggaagcaaggatttttcccagacagtgtcaacaaagctttgtactgggttaatggtcaagttcctgatggtgtctctaaggtcttagtggaccactttggctataccaaagatgataaacatgagcaggatatggtaaatggaataatgctcagtgttgagaagctgattaaagatttgaaatccaaagaagtcccggaagccagagcctacctccgcatcttgggagaggagcttggttttgccagtctccatgacctccagctcctgggaaagctgcttctgatgggtgcccgcactctgcaggggatcccccagatgattggagaggtcatcaggaagggctcaaagaatgacttttttcttcactacatcttcatggagaatgcctttgaactccccactggagctggattacagttgcaaatatcttcatctggagtcattgctcccggagccaaggctggagtaaaactggaagtagccaacatgcaggctgaactggtggcaaaaccctccgtgtctgtggagtttgtgacaaatatgggcatcatcattccggacttcgctaggagtggggtccagatgaacaccaacttcttccacgagtcgggtctggaggctcatgttgccctaaaagctgggaagctgaagtttatcattccttccccaaagagaccagtcaagctgctcagtggaggcaacacattacatttggtctctaccaccaaaacggaggtgatcccacctctcattgagaacaggcagtcctggtcagtttgcaagcaagtctttcctggcctgaattactgcacctcaggcgcttactccaacgccagctccacagactccgcctcctactatccgctgaccggggacaccagattagagctggaactgaggcctacaggagagattgagcagtattctgtcagcgcaacctatgagctccagagagaggacagagccttggtggataccctgaagtttgtaactcaagcagaaggtgcgaagcagactgaggctaccatgacattcaaatataatcggcagagtatgaccttgtccagtgaagtccaaattccggattttgatgttgacctcggaacaatcctcagagttaatgatgaatctactgagggcaaaacgtcttacagactcaccctggacattcagaacaagaaaattactgaggtcgccctcatgggccacctaagttgtgacacaaaggaagaaagaaaaatcaagggtgttatttccataccccgtttgcaagcagaagccagaagtgagatcctcgcccactggtcgcctgccaaactgcttctccaaatggactcatctgctacagcttatggctccacagtttccaagagggtggcatggcattatgatgaagagaagattgaatttgaatggaacacaggcaccaatgtagataccaaaaaaatgacttccaatttccctgtggatctctccgattatcctaagagcttgcatatgtatgctaatagactcctggatcacagagtccctcaaacagacatgactttccggcacgtgggttccaaattaatagttgcaatgagctcatggcttcagaaggcatctgggagtcttccttatacccagactttgcaagaccacctcaatagcctgaaggagttcaacctccagaacatgggattgccagacttccacatcccagaaaacctcttcttaaaaagcgatggccgggtcaaatataccttgaacaagaacagtttgaaaattgagattcctttgccttttggtggcaaatcctccagagatctaaagatgttagagactgttaggacaccagccctccacttcaagtctgtgggattccatctgccatctcgagagttccaagtccctacttttaccattcccaagttgtatcaactgcaagtgcctctcctgggtgttctagacctctccacgaatgtctacagcaacttgtacaactggtccgcctcctacagtggtggcaacaccagcacagaccatttcagccttcgggctcgttaccacatgaaggctgactctgtggttgacctgctttcctacaatgtgcaaggatctggagaaacaacatatgaccacaagaatacgttcacactatcatgtgatgggtctctacgccacaaatttctagattcgaatatcaaattcagtcatgtagaaaaacttggaaacaacccagtctcaaaaggtttactaatattcgatgcatctagttcctggggaccacagatgtctgcttcagttcatttggactccaaaaagaaacagcatttgtttgtcaaagaagtcaagattgatgggcagttcagagtctcttcgttctatgctaaaggcacatatggcctgtcttgtcagagggatcctaacactggccggctcaatggagagtccaacctgaggtttaactcctcctacctccaaggcaccaaccagataacaggaagatatgaagatggaaccctctccctcacctccacctctgatctgcaaagtggcatcattaaaaatactgcttccctaaagtatgagaactacgagctgactttaaaatctgacaccaatgggaagtataagaactttgccacttctaacaagatggatatgaccttctctaagcaaaatgcactgctgcgttctgaatatcaggctgattacgagtcattgaggttcttcagcctgctttctggatcactaaattcccatggtcttgagttaaatgctgacatcttaggcactgacaaaattaatagtggtgctcacaaggcgacactaaggattggccaagatggaatatctaccagtgcaacgaccaacttgaagtgtagtctcctggtgctggagaatgagctgaatgcagagcttggcctctctggggcatctatgaaattaacaacaaatggccgcttcagggaacacaatgcaaaattcagtctggatgggaaagccgccctcacagagctatcactgggaagtgcttatcaggccatgattctgggtgtcgacagcaaaaacattttcaacttcaaggtcagtcaagaaggacttaagctctcaaatgacatgatgggctcatatgctgaaatgaaatttgaccacacaaacagtctgaacattgcaggcttatcactggacttctcttcaaaacttgacaacatttacagctctgacaagttttataagcaaactgttaatttacagctacagccctattctctggtaactactttaaacagtgacctgaaatacaatgctctggatctcaccaacaatgggaaactacggctagaacccctgaagctgcatgtggctggtaacctaaaaggagcctaccaaaataatgaaataaaacacatctatgccatctcttctgctgccttatcagcaagctataaagcagacactgttgctaaggttcagggtgtggagtttagccatcggctcaacacagacatcgctgggctggcttcagccattgacatgagcacaaactataattcagactcactgcatttcagcaatgtcttccgttctgtaatggccccgtttaccatgaccatcgatgcacatacaaatggcaatgggaaactcgctctctggggagaacatactgggcagctgtatagcaaattcctgttgaaagcagaacctctggcatttactttctctcatgattacaaaggctccacaagtcatcatctcgtgtctaggaaaagcatcagtgcagctcttgaacacaaagtcagtgccctgcttactccagctgagcagacaggcacctggaaactcaagacccaatttaacaacaatgaatacagccaggacttggatgcttacaacactaaagataaaattggcgtggagcttactggacgaactctggctgacctaactctactagactccccaattaaagtgccacttttactcagtgagcccatcaatatcattgatgctttagagatgagagatgccgttgagaagccccaagaatttacaattgttgcttttgtaaagtatgataaaaaccaagatgttcactccattaacctcccattttttgagaccttgcaagaatattttgagaggaatcgacaaaccattatagttgtactggaaaacgtacagagaaacctgaagcacatcaatattgatcaatttgtaagaaaatacagagcagccctgggaaaactcccacagcaagctaatgattatctgaattcattcaattgggagagacaagtttcacatgccaaggagaaactgactgctctcacaaaaaagtatagaattacagaaaatgatatacaaattgcattagatgatgccaaaatcaactttaatgaaaaactatctcaactgcagacatatatgatacaatttgatcagtatattaaagatagttatgatttacatgatttgaaaatagctattgctaatattattgatgaaatcattgaaaaattaaaaagtcttgatgagcactatcatatccgtgtaaatttagtaaaaacaatccatgatctacatttgtttattgaaaatattgattttaacaaaagtggaagtagtactgcatcctggattcaaaatgtggatactaagtaccaaatcagaatccagatacaagaaaaactgcagcagcttaagagacacatacagaatatagacatccagcacctagctggaaagttaaaacaacacattgaggctattgatgttagagtgcttttagatcaattgggaactacaatttcatttgaaagaataaatgacattcttgagcatgtcaaacactttgttataaatcttattggggattttgaagtagctgagaaaatcaatgccttcagagccaaagtccatgagttaatcgagaggtatgaagtagaccaacaaatccaggttttaatggataaattagtagagttggcccaccaatacaagttgaaggagactattcagaagctaagcaatgtcctacaacaagttaagataaaagattactttgagaaattggttggatttattgatgatgctgtcaagaagcttaatgaattatcttttaaaacattcattgaagatgttaacaaattccttgacatgttgataaagaaattaaagtcatttgattaccaccagtttgtagatgaaaccaatgacaaaatccgtgaggtgactcagagactcaatggtgaaattcaggctctggaactaccacaaaaagctgaagcattaaaactgtttttagaggaaaccaaggccacagttgcagtgtatctggaaagcctacaggacaccaaaataaccttaatcatcaattggttacaggaggctttaagttcagcatctttggctcacatgaaggccaaattccgagagaccctagaagatacacgagaccgaatgtatcaaatggacattcagcaggaacttcaacgatacctgtctctggtaggccaggtttatagcacacttgtcacctacatttctgattggtggactcttgctgctaagaaccttactgactttgcagagcaatattctatccaagattgggctaaacgtatgaaagcattggtagagcaagggttcactgttcctgaaatcaagaccatccttgggaccatgcctgcctttgaagtcagtcttcaggctcttcagaaagctaccttccagacacctgattttatagtccccctaacagatttgaggattccatcagttcagataaacttcaaagacttaaaaaatataaaaatcccatccaggttttccacaccagaatttaccatccttaacaccttccacattccttcctttacaattgactttgtagaaatgaaagtaaagatcatcagaaccattgaccagatgctgaacagtgagctgcagtggcccgttccagatatatatctcagggatctgaaggtggaggacattcctctagcgagaatcaccctgccagacttccgtttaccagaaatcgcaattccagaattcataatcccaactctcaaccttaatgattttcaagttcctgaccttcacataccagaattccagcttccccacatctcacacacaattgaagtacctacttttggcaagctatacagtattctgaaaatccaatctcctcttttcacattagatgcaaatgctgacatagggaatggaaccacctcagcaaacgaagcaggtatcgcagcttccatcactgccaaaggagagtccaaattagaagttctcaattttgattttcaagcaaatgcacaactctcaaaccctaagattaatccgctggctctgaaggagtcagtgaagttctccagcaagtacctgagaacggagcatgggagtgaaatgctgttttttggaaatgctattgagggaaaatcaaacacagtggcaagtttacacacagaaaaaaatacactggagcttagtaatggagtgattgtcaagataaacaatcagcttaccctggatagcaacactaaatacttccacaaattgaacatccccaaactggacttctctagtcaggctgacctgcgcaacgagatcaagacactgttgaaagctggccacatagcatggacttcttctggaaaagggtcatggaaatgggcctgccccagattctcagatgagggaacacatgaatcacaaattagtttcaccatagaaggacccctcacttcctttggactgtccaataagatcaatagcaaacacctaagagtaaaccaaaacttggtttatgaatctggctccctcaacttttctaaacttgaaattcaatcacaagtcgattcccagcatgtgggccacagtgttctaactgctaaaggcatggcactgtttggagaagggaaggcagagtttactgggaggcatgatgctcatttaaatggaaaggttattggaactttgaaaaattctcttttcttttcagcccagccatttgagatcacggcatccacaaacaatgaagggaatttgaaagttcgttttccattaaggttaacagggaagatagacttcctgaataactatgcactgtttctgagtcccagtgcccagcaagcaagttggcaagtaagtgctaggttcaatcagtataagtacaaccaaaatttctctgctggaaacaacgagaacattatggaggcccatgtaggaataaatggagaagcaaatctggatttcttaaacattcctttaacaattcctgaaatgcgtctaccttacacaataatcacaactcctccactgaaagatttctctctatgggaaaaaacaggcttgaaggaattcttgaaaacgacaaagcaatcatttgatttaagtgtaaaagctcagtataagaaaaacaaacacaggcattccatcacaaatcctttggctgtgctttgtgagtttatcagtcagagcatcaaatcctttgacaggcattttgaaaaaaacagaaacaatgcattagattttgtcaccaaatcctataatgaaacaaaaattaagtttgataagtacaaagctgaaaaatctcacgacgagctccccaggacctttcaaattcctggatacactgttccagttgtcaatgttgaagtgtctccattcaccatagagatgtcggcattcggctatgtgttcccaaaagcagtcagcatgcctagtttctccatcctaggttctgacgtccgtgtgccttcatacacattaatcctgccatcattagagctgccagtccttcatgtccctagaaatctcaagctttctcttccagatttcaaggaattgtgtaccataagccatatttttattcctgccatgggcaatattacctatgatttctcctttaaatcaagtgtcatcacactgaataccaatgctgaactttttaaccagtcagatattgttgctcatctcctttcttcatcttcatctgtcattgatgcactgcagtacaaattagagggcaccacaagattgacaagaaaaaggggattgaagttagccacagctctgtctctgagcaacaaatttgtggagggtagtcataacagtactgtgagcttaaccacgaaaaatatggaagtgtcagtggcaacaaccacaaaagcccaaattccaattttgagaatgaatttcaagcaagaacttaatggaaataccaagtcaaaacctactgtctcttcctccatggaatttaagtatgatttcaattcttcaatgctgtactctaccgctaaaggagcagttgaccacaagcttagcttggaaagcctcacctcttacttttccattgagtcatctaccaaaggagatgtcaagggttcggttctttctcgggaatattcaggaactattgctagtgaggccaacacttacttgaattccaagagcacacggtcttcagtgaagctgcagggcacttccaaaattgatgatatctggaaccttgaagtaaaagaaaattttgctggagaagccacactccaacgcatatattccctctgggagcacagtacgaaaaaccacttacagctagagggcctctttttcaccaacggagaacatacaagcaaagccaccctggaactctctccatggcaaatgtcagctcttgttcaggtccatgcaagtcagcccagttccttccatgatttccctgaccttggccaggaagtggccctgaatgctaacactaagaaccagaagatcagatggaaaaatgaagtccggattcattctgggtctttccagagccaggtcgagctttccaatgaccaagaaaaggcacaccttgacattgcaggatccttagaaggacacctaaggttcctcaaaaatatcatcctaccagtctatgacaagagcttatgggatttcctaaagctggatgtaaccaccagcattggtaggagacagcatcttcgtgtttcaactgcctttgtgtacaccaaaaaccccaatggctattcattctccatccctgtaaaagttttggctgataaattcattattcctgggctgaaactaaatgatctaaattcagttcttgtcatgcctacgttccatgtcccatttacagatcttcaggttccatcgtgcaaacttgacttcagagaaatacaaatctataagaagctgagaacttcatcatttgccctcaacctaccaacactccccgaggtaaaattccctgaagttgatgtgttaacaaaatattctcaaccagaagactccttgattcccttttttgagataaccgtgcctgaatctcagttaactgtgtcccagttcacgcttccaaaaagtgtttcagatggcattgctgctttggatctaaatgcagtagccaacaagatcgcagactttgagttgcccaccatcatcgtgcctgagcagaccattgagattccctccattaagttctctgtacctgctggaattgtcattccttcctttcaagcactgactgcacgctttgaggtagactctcccgtgtataatgccacttggagtgccagtttgaaaaacaaagcagattatgttgaaacagtcctggattccacatgcagctcaaccgtacagttcctagaatatgaactaaatgttttgggaacacacaaaatcgaagatggtacgttagcctctaagactaaaggaacatttgcacaccgtgacttcagtgcagaatatgaagaagatggcaaatatgaaggacttcaggaatgggaaggaaaagcgcacctcaatatcaaaagcccagcgttcaccgatctccatctgcgctaccagaaagacaagaaaggcatctccacctcagcagcctccccagccgtaggcaccgtgggcatggatatggatgaagatgacgacttttctaaatggaacttctactacagccctcagtcctctccagataaaaaactcaccatattcaaaactgagttgagggtccgggaatctgatgaggaaactcagatcaaagttaattgggaagaagaggcagcttctggcttgctaacctctctgaaagacaacgtgcccaaggccacaggggtcctttatgattatgtcaacaagtaccactgggaacacacagggctcaccctgagagaagtgtcttcaaagctgagaagaaatctgcagaacaatgctgagtgggtttatcaaggggccattaggcaaattgatgatatcgacgtgaggttccagaaagcagccagtggcaccactgggacctaccaagagtggaaggacaaggcccagaatctgtaccaggaactgttgactcaggaaggccaagccagtttccagggactcaaggataacgtgtttgatggcttggtacgagttactcaagaattccatatgaaagtcaagcatctgattgactcactcattgattttctgaacttccccagattccagtttccggggaaacctgggatatacactagggaggaactttgcactatgttcataagggaggtagggacggtactgtcccaggtatattcgaaagtccataatggttcagaaatactgttttcctatttccaagacctagtgattacacttcctttcgagttaaggaaacataaactaatagatgtaatctcgatgtatagggaactgttgaaagatttatcaaaagaagcccaagaggtatttaaagccattcagtctctcaagaccacagaggtgctacgtaatcttcaggaccttttacaattcattttccaactaatagaagataacattaaacagctgaaagagatgaaatttacttatcttattaattatatccaagatgagatcaacacaatcttcagtgattatatcccatgtttttaaattgttgaaagaaaacctatgccttaatcttcataagttcaatgaatttattcaaaacgagcttcaggaagcttctcaagagttacagcagatccatcaatacattatggcccttcgtgaagaatattttgatccaagtatagttggctggacagtgaaatattatgaacttgaagaaaagatagtcagtctgatcaagaacctgttagttgctcttaaggacttccattctgaatatattgtcagtgcctctaactttacttcccaactctcaagtcaagttgagcaatttctgcacagaaatattcaggaatatcttagcatccttaccgatccagatggaaaagggaaagagaagattgcagagctttctgccactgctcaggaaataattaaaagccaggccattgcgacgaagaaaataatttctgattaccaccagcagtttagatataaactgcaagatttttcagaccaactctctgattactatgaaaaatttattgctgaatccaaaagattgattgacctgtccattcaaaactaccacacatttctgatatacatcacggagttactgaaaaagctgcaatcaaccacagtcatgaacccctacatgaagcttgctccaggagaacttactatcatcctctaattttttaaaagaaatcttcatttattcttcttttccaattgaactttcacatagcacagaaaaaattcaaactgcctatattgataaaaccatacagtgagccagccttgcagtaggcagtagactataagcagaagcacatatgaactggacctgcaccaaagctggcaccagggctcggaaggtctctgaactcagaaggatggcattttttgcaagttaaagaaaatcaggatctgagttattttgctaaacttgggggaggaggaacaaataaatggagtctttattgtgtatcata

SEQ ID NO: 108127 - DNA, 879 bp, Homo sapiens
  Payload ID: 1248
  Gene Symbol: APOBEC1
  Gene Name: apolipoprotein B mRNA editing enzyme, catalytic polypeptide 1
  Uniprot ID: P41238
  ENST ID: ENST00000229304
  CDS Start-End: 22-732
gaagtccagagacagagcaccatgacttctgagaaaggtccttcaaccggtgaccccactctgaggagaagaatcgaaccctgggagtttgacgtcttctatgaccccagagaacttcgtaaagaggcctgtctgctctacgaaatcaagtggggcatgagccggaagatctggcgaagctcaggcaaaaacaccaccaatcacgtggaagttaattttataaaaaaatttacgtcagaaagagattttcacccatccatgagctgctccatcacctggttcttgtcctggagtccctgctgggaatgctcccaggctattagagagtttctgagtcggcaccctggtgtgactctagtgatctacgtagctcggcttttttggcacatggatcaacaaaatcggcaaggtctcagggaccttgttaacagtggagtaactattcagattatgagagcatcagagtattatcactgctggaggaattttgtcaactacccacctggggatgaagctcactggccacaatacccacctctgtggatgatgttgtacgcactggagctgcactgcataattctaagtcttccaccctgtttaaagatttcaagaagatggcaaaatcatcttacatttttcagacttcatcttcaaaactgccattaccaaacgattccgccacacatccttttagctacagggctgatacatccttctgtggcttggagatgaataggatgattccgtgtgtgtactgattcaagaacaagcaatgatgacccactaaagagtgaatgccatttagaatctagaaatgttcacaaggtaccccaaaactctgtagcttaaaccaacaataaatatgtattacctctggca

SEQ ID NO: 108128 - DNA, 861 bp, Homo sapiens
  Payload ID: 1248
  Gene Symbol: APOBEC1
  Gene Name: apolipoprotein B mRNA editing enzyme, catalytic polypeptide 1
  ENST ID: ENST00000467171
  CDS Start-End: 32-142
tccagaggaggaagtccagagacagagcaccatgacttctgagaaaggagaagaatcgaaccctgggagtttgacgtcttctatgaccccagagaacttcgtaaagaggcctgtctgctctacgaaatcaagtggggcatgagccggaagatctggcgaagctcaggcaaaaacaccaccaatcacgtggaagttaattttataaaaaaatttacgtcagaaagagattttcacccatccatgagctgctccatcacctggttcttgtcctggagtccctgctgggaatgctcccaggctattagagagtttctgagtcggcaccctggtgtgactctagtgatctacgtagctcggcttttttggcacatggatcaacaaaatcggcaaggtctcagggaccttgttaacagtggagtaactattcagattatgagagcatcagagtattatcactgctggaggaattttgtcaactacccacctggggatgaagctcactggccacaatacccacctctgtggatgatgttgtacgcactggagctgcactgcataattctaagtcttccaccctgtttaaagatttcaagaagatggcaaaatcatcttacatttttcagacttcatcttcaaaactgccattaccaaacgattccgccacacatccttttagctacagggctgatacatccttctgtggcttggagatgaataggatgattccgtgtgtgtactgattcaagaacaagcaatgatgacccactaaagagtgaatgccatttagaatctagaaatgttcacaaggtaccccaaaactctgtagcttaaaccaacaataaatatgtattacctctggca

SEQ ID NO: 108129 - DNA, 1151 bp, Homo sapiens
  Payload ID: 1249
  Gene Symbol: APOBEC2
  Gene Name: apolipoprotein B mRNA editing enzyme, catalytic polypeptide-like 2
  Uniprot ID: Q9Y235
  ENST ID: ENST00000244669
  CDS Start-End: 45-719
gcctctctcctctccctcagtgactcctgagccacagcccctccatggcccagaaggaagaggctgctgtggccactgaggctgcctcccagaatggggaggatctggagaacctggacgaccctgagaagctgaaagagctgattgagctgccgccctttgagattgtcacaggagaacggctgcctgccaacttctttaaattccagttccggaatgtggagtacagttccgggaggaacaagaccttcctctgctatgtggttgaagcacagggcaaggggggccaagtgcaggcatctcggggatacctagaggatgagcatgcggctgcccatgcagaggaagctttcttcaacaccatcctgccagccttcgacccagccctgcggtacaatgtcacctggtatgtgtcctccagcccctgtgcagcgtgtgctgaccgcattatcaaaacccttagcaagaccaagaacctgcgtctgctcattctggtgggtcgactcttcatgtgggaggagccggagatccaggctgctctgaagaagctgaaggaggctggctgtaaactgcgcatcatgaagccccaggacttcgaatatgtctggcagaattttgtggagcaagaagagggtgaatccaaggcctttcagccctgggaggacattcaggagaacttcctatactacgaggagaagttggcagacatcctgaagtagggcaactgggctttgcctcacgtattcctgctgccaccaagagacagcaatgacatgtacagccatctgggacatgcctgtcttcctaataccatttggagctggacaacatttgacaccaaccaatcatactggacaaggcccttagaggacttgaaatatacttctcatgctgtagtttatttaggctgtgactctctctctaatgctgctctcgggaaggacgaaagtgacctgcaaggagagaaatgcaaccatacatgggctccagtcaactatgggactgaaggtcctaattgctcacccaagggggctgcttaacacaaacagcctcagacccgaggtttagatttctgaaatatgcattttatgttaagttgggtatttttttaaaaaaagaaaaacagcaacattaataaaagaagtggtgtg

SEQ ID NO: 108130 - DNA, 1444 bp, Homo sapiens
  Payload ID: 1250
  Gene Symbol: APOBEC3A
  Gene Name: apolipoprotein B mRNA editing enzyme, catalytic polypeptide-like 3A
  Uniprot ID: P31941
  ENST ID: ENST00000249116
  CDS Start-End: 171-770
ggagaaggggtggggcagggtatcgctgactcagcagcttccaggttgctctgatgatatattaaggctcctgaatcctaagagaatgttggtgaagatcttaacaccacgccttgagcaagtcgcaagagcgggaggacacagaccaggaaccgagaagggacaagcacatggaagccagcccagcatccgggcccagacacttgatggatccacacatattcacttccaactttaacaatggcattggaaggcataagacctacctgtgctacgaagtggagcgcctggacaatggcacctcggtcaagatggaccagcacaggggctttctacacaaccaggctaagaatcttctctgtggcttttacggccgccatgcggagctgcgcttcttggacctggttccttctttgcagttggacccggcccagatctacagggtcacttggttcatctcctggagcccctgcttctcctggggctgtgccggggaagtgcgtgcgttccttcaggagaacacacacgtgagactgcgtatcttcgctgcccgcatctatgattacgaccccctatataaggaggcactgcaaatgctgcgggatgctggggcccaagtctccatcatgacctacgatgaatttaagcactgctgggacacctttgtggaccaccagggatgtcccttccagccctgggatggactagatgagcacagccaagccctgagtgggaggctgcgggccattctccagaatcagggaaactgaaggatgggcctcagtctctaaggaaggcagagacctgggttgagcagcagaataaaagatcttcttccaagaaatgcaaacagaccgttcaccaccatctccagctgctcacagacgccagcaaagcagtatgctcccgatcaagtagatttttaaaaaatcagagtgggccgggcgcggtggctcacgcctgtaatcccagcactttggaggccaaggcgggtggatcacgaggtcaggagatcgagaccatcctggctaacacggtgaaaccctgtctctactaaaaatacaaaaaattagccaggcgtggtggcgggcgcctgtagtcccagctactctggaggctgaggcaggagagtagcgtgaacccgggaggcagagcttgcggtgagccgagattgcgctactgcactccagcctgggcgacagtaccagactccatctcaaaaaaaaaaaaaccagactgaattaattttaactgaaaatttctcttatgttccaagtacacaatagtaagattatgctcaatattctcagaataattttcaatgtattaatgaaatgaaatgataatttggcttcatatctagactaacacaaaattaagaatcttccataattgcttttgctcagtaactgtgtcatgaattgcaagagtttccacaaacact

SEQ ID NO: 108131 - DNA, 1478 bp, Homo sapiens
  Payload ID: 1250
  Gene Symbol: APOBEC3A
  Gene Name: apolipoprotein B mRNA editing enzyme, catalytic polypeptide-like 3A
  Uniprot ID: P31941
  ENST ID: ENST00000402255
  CDS Start-End: 205-804
ggcctccctgccacggggatgctgccttttctgctccgggtgtttccacgaggcaggcatggaatcttccctggacaagcgacataccgtggagagacaggctcctgaatcctaagagaatgttggtgaagatcttaacaccacgccttgagcaagtcgcaagagcgggaggacacagaccaggaaccgagaagggacaagcacatggaagccagcccagcatccgggcccagacacttgatggatccacacatattcacttccaactttaacaatggcattggaaggcataagacctacctgtgctacgaagtggagcgcctggacaatggcacctcggtcaagatggaccagcacaggggctttctacacaaccaggctaagaatcttctctgtggcttttacggccgccatgcggagctgcgcttcttggacctggttccttctttgcagttggacccggcccagatctacagggtcacttggttcatctcctggagcccctgcttctcctggggctgtgccggggaagtgcgtgcgttccttcaggagaacacacacgtgagactgcgtatcttcgctgcccgcatctatgattacgaccccctatataaggaggcactgcaaatgctgcgggatgctggggcccaagtctccatcatgacctacgatgaatttaagcactgctgggacacctttgtggaccaccagggatgtcccttccagccctgggatggactagatgagcacagccaagccctgagtgggaggctgcgggccattctccagaatcagggaaactgaaggatgggcctcagtctctaaggaaggcagagacctgggttgagcagcagaataaaagatcttcttccaagaaatgcaaacagaccgttcaccaccatctccagctgctcacagacgccagcaaagcagtatgctcccgatcaagtagatttttaaaaaatcagagtgggccgggcgcggtggctcacgcctgtaatcccagcactttggaggccaaggcgggtggatcacgaggtcaggagatcgagaccatcctggctaacacggtgaaaccctgtctctactaaaaatacaaaaaattagccaggcgtggtggcgggcgcctgtagtcccagctactctggaggctgaggcaggagagtagcgtgaacccgggaggcagagcttgcggtgagccgagattgcgctactgcactccagcctgggcgacagtaccagactccatctcaaaaaaaaaaaaaccagactgaattaattttaactgaaaatttctcttatgttccaagtacacaatagtaagattatgctcaatattctcagaataattttcaatgtattaatgaaatgaaatgataatttggcttcatatctagactaacacaaaattaagaatcttccataattgcttttgctcagtaactgtgtcatgaattgcaagagtttccacaaacact

SEQ ID NO: 108132 - DNA, 1103 bp, Homo sapiens
  Payload ID: 1250
  Gene Symbol: APOBEC3A
  Gene Name: apolipoprotein B mRNA editing enzyme, catalytic polypeptide-like 3A
  Uniprot ID: P31941
  ENST ID: ENST00000570508
  CDS Start-End: 171-770
ggagaaggggtggggcagggtatcgctgactcagcagcttccaggttgctctgatgatatattaaggctcctgaatcctaagagaatgttggtgaagatcttaacaccacgccttgagcaagtcgcaagagcgggaggacacagaccaggaaccgagaagggacaagcacatggaagccagcccagcatccgggcccagacacttgatggatccacacatattcacttccaactttaacaatggcattggaaggcataagacctacctgtgctacgaagtggagcgcctggacaatggcacctcggtcaagatggaccagcacaggggctttctacacaaccaggctaagaatcttctctgtggcttttacggccgccatgcggagctgcgcttcttggacctggttccttctttgcagttggacccggcccagatctacagggtcacttggttcatctcctggagcccctgcttctcctggggctgtgccggggaagtgcgtgcgttccttcaggagaacacacacgtgagactgcgtatcttcgctgcccgcatctatgattacgaccccctatataaggaggcactgcaaatgctgcgggatgctggggcccaagtctccatcatgacctacgatgaatttaagcactgctgggacacctttgtggaccaccagggatgtcccttccagccctgggatggactagatgagcacagccaagccctgagtgggaggctgcgggccattctccagaatcagggaaactgaaggatgggcctcagtctctaaggaaggcagagacctgggttgagcagcagaataaaagatcttcttccaagaaatgcaaacagaccgttcaccaccatctccagctgctcacagacaccagcaaagcaatgtgctcctgatcaagtagattttttaaaaatcagagtcaattaattttaattgaaaatttctcttatgttccaagtgtacaagagtaagattatgctcaatattcccagaatagttttcaatgtattaatgaagtgattaattggctccatatttagactaataaaacattaagaatcttccataattgtttccacaaacact

SEQ ID NO: 108133 - DNA, 1103 bp, Homo sapiens; identical to SEQ ID NO: 108132
  Payload ID: 1250
  Gene Symbol: APOBEC3A
  Gene Name: apolipoprotein B mRNA editing enzyme, catalytic polypeptide-like 3A
  Uniprot ID: P31941
  ENST ID: ENST00000618553
  CDS Start-End: 171-770

SEQ ID NO: 108134 - DNA, 1135 bp, Homo sapiens
  Payload ID: 1250
  Gene Symbol: APOBEC3A
  Gene Name: apolipoprotein B mRNA editing enzyme, catalytic polypeptide-like 3A
  Uniprot ID: P31941
  ENST ID: ENST00000623492
  CDS Start-End: 205-804
ggcctccctgccacggggatgctgccttttctgctccgggtgtttccacgaggcaggcatggaatcttccctggacaagcgacataccgtggagagacaggctcctgaatcctaagagaatgttggtgaagatcttaacaccacgccttgagcaagtcgcaagagcgggaggacacagaccaggaaccgagaagggacaagcacatggaagccagcccagcatccgggcccagacacttgatggatccacacatattcacttccaactttaacaatggcattggaaggcataagacctacctgtgctacgaagtggagcgcctggacaatggcacctcggtcaagatggaccagcacaggggctttctacacaaccaggctaagaatcttctctgtggcttttacggccgccatgcggagctgcgcttcttggacctggttccttctttgcagttggacccggcccagatctacagggtcacttggttcatctcctggagcccctgcttctcctggggctgtgccggggaagtgcgtgcgttccttcaggagaacacacacgtgagactgcgtatcttcgctgcccgcatctatgattacgaccccctatataaggaggcactgcaaatgctgcgggatgctggggcccaagtctccatcatgacctacgatgaatttaagcactgctgggacacctttgtggaccaccagggatgtcccttccagccctgggatggactagatgagcacagccaagccctgagtgggaggctgcgggccattctccagaatcagggaaactgaaggatgggcctcagtctctaaggaaggcagagacctgggttgagcagcagaataaaagatcttcttccaagaaatgcaaacagaccgttcaccaccatctccagctgctcacagacaccagcaaagcaatgtgctcctgatcaagtagattttttaaaaatcagagtcaattaattttaattgaaaatttctcttatgttccaagtgtacaagagtaagattatgctcaatattcccagaatagttttcaatgtattaatgaagtgattaattggctccatatttagactaataaaacattaagaatcttccataattgtttccacaaaca

SEQ ID NO: 108135 - DNA, 1533 bp, Homo sapiens
  Payload ID: 1251
  Gene Symbol: APOBEC3B
  Gene Name: apolipoprotein B mRNA editing enzyme, catalytic polypeptide-like 3B
  Uniprot ID: Q9UH17
  ENST ID: ENST00000333467
  CDS Start-End: 46-1194
caaaaaaagagcgggacagggacaagcgtatctaagaggctgaacatgaatccacagatcagaaatccgatggagcggatgtatcgagacacattctacgacaactttgaaaacgaacccatcctctatggtcggagctacacttggctgtgctatgaagtgaaaataaagaggggccgctcaaatctcctttgggacacaggggtctttcgaggccaggtgtatttcaagcctcagtaccacgcagaaatgtgcttcctctcttggttctgtggcaaccagctgcctgcttacaagtgtttccagatcacctggtttgtatcctggaccccctgcccggactgtgtggcgaagctggccgaattcctgtctgagcaccccaatgtcaccctgaccatctctgccgcccgcctctactactactgggaaagagattaccgaagggcgctctgcaggctgagtcaggcaggagcccgcgtgacgatcatggactatgaagaatttgcatactgctgggaaaactttgtgtacaatgaaggtcagcaattcatgccttggtacaaattcgatgaaaattatgcattcctgcaccgcacgctaaaggagattctcagatacctgatggatccagacacattcactttcaactttaataatgaccctttggtccttcgacggcgccagacctacttgtgctatgaggtggagcgcctggacaatggcacctgggtcctgatggaccagcacatgggctttctatgcaacgaggctaagaatcttctctgtggcttttacggccgccatgcggagctgcgcttcttggacctggttccttctttgcagttggacccggcccagatctacagggtcacttggttcatctcctggagcccctgcttctcctggggctgtgccggggaagtgcgtgcgttccttcaggagaacacacacgtgagactgcgcatcttcgctgcccgcatctatgattacgaccccctatataaggaggcgctgcaaatgctgcgggatgctggggcccaagtctccatcatgacctacgatgagtttgagtactgctgggacacctttgtgtaccgccagggatgtcccttccagccctgggatggactagaggagcacagccaagccctgagtgggaggctgcgggccattctccagaatcagggaaactgaaggatgggcctcagtctctaaggaaggcagagacctgggttgagcagcagaataaaagatcttcttccaagaaatgcaaacagaccgttcaccaccatctccagctgctcacagacaccagcaaagcaatgtgctcctgatcaagtagattttttaaaaatcagagtcaattaattttaattgaaaatttctcttatgttccaagtgtacaagagtaagattatgctcaatattcccagaatagttttcaatgtattaatgaagtgattaattggctccatatttagactaataaaacattaagaatcttccataattgtttccacaaacactagcaaa

SEQ ID NO: 108136 - DNA, 1359 bp, Homo sapiens
  Payload ID: 1251
  Gene Symbol: APOBEC3B
  Gene Name: apolipoprotein B mRNA editing enzyme, catalytic polypeptide-like 3B
  Uniprot ID: Q9UH17
  ENST ID: ENST00000335760
  CDS Start-End: 49-804
cttcaaaaaaagagcgggacagggacaagcgtatctaagaggctgaacatgaatccacagatcagaaatccgatggagcggatgtatcgagacacattctacgacaactttgaaaacgaacccatcctctatggtcggagctacacttggctgtgctatgaagtgaaaataaagaggggccgctcaaatctcctttgggacacaggggtctttcgaggccaggtgtatttcaagcctcagtaccacgcagaaatgtgcttcctctcttggttctgtggcaaccagctgcctgcttacaagtgtttccagatcacctggtttgtatcctggaccccctgcccggactgtgtggcgaagctggccgaattcctgtctgagcaccccaatgtcaccctgaccatctctgccgcccgcctctactactactgggaaagagattaccgaagggcgctctgcaggctgagtcaggcaggagcccgcgtgacgatcatggactatgaagaatttgcatactgctgggaaaactttgtgtacaatgaaggtcagcaattcatgccttggtacaaattcgatgaaaattatgcattcctgcaccgcacgctaaaggagattctcaggctaagaatcttctctgtggcttttacggccgccatgcggagctgcgcttcttggacctggttccttctttgcagttggacccggcccagatctacagggtcacttggttcatctcctggagcccctgcttctcctggggctgtgccggggaagtgcgtgcgttccttcaggagaacacacacgtgagactgcgcatcttcgctgcccgcatctatgattacgaccccctatataaggaggcgctgcaaatgctgcgggatgctggggcccaagtctccatcatgacctacgatgagtttgagtactgctgggacacctttgtgtaccgccagggatgtcccttccagccctgggatggactagaggagcacagccaagccctgagtgggaggctgcgggccattctccagaatcagggaaactgaaggatgggcctcagtctctaaggaaggcagagacctgggttgagcagcagaataaaagatcttcttccaagaaatgcaaacagaccgttcaccaccatctccagctgctcacagacaccagcaaagcaatgtgctcctgatcaagtagattttttaaaaatcagagtcaattaattttaattgaaaatttctcttatgttccaagtgtacaagagtaagattatgctcaatattcccagaatagttttcaatgtattaatgaagtgattaattggctccatatttagactaataaaacattaagaatcttccataa

SEQ ID NO: 108137 - DNA, 1844 bp, Homo sapiens
  Payload ID: 1251
  Gene Symbol: APOBEC3B
  Gene Name: apolipoprotein B mRNA editing enzyme, catalytic polypeptide-like 3B
  ENST ID: ENST00000402182
  CDS Start-End: 56-1528
cacagagcttcaaaaaaagagcgggacagggacaagcgtatctaagaggctgaacatgaatccacagatcagaaatccgatggagcggatgtatcgagacacattctacgacaactttgaaaacgaacccatcctctatggtcggagctacacttggctgtgctatgaagtgaaaataaagaggggccgctcaaatctcctttgggacacaggggtctttcgaggccaggtgtatttcaagcctcagtaccacgcagaaatgtgcttcctctcttggttctgtggcaaccagctgcctgcttacaagtgtttccagatcacctggtttgtatcctggaccccctgcccggactgtgtggcgaagctggccgaattcctgtctgagcaccccaatgtcaccctgaccatctctgccgcccgcctctactactactgggaaagagattaccgaagggcgctctgcaggctgagtcaggcaggagcccgcgtgacgatcatggactatgaagaatttgcatactgctgggaaaactttgtgtacaatgaaggtcagcaattcatgccttggtacaaattcgatgaaaattatgcattcctgcaccgcacgctaaaggagattctcagatacctgatggatccagacacattcactttcaactttaataatgaccctttggtccttcgacggcgccagacctacttgtgctatgaggtggagcgcctggacaatggcacctgggtcctgatggaccagcacatgggctttctatgcaacgaggctaagaatcttctctgtggcttttacggccgccatgcggagctgcgcttcttggacctggttccttctttgcagttggacccggcccagatctacagggtcacttggttcatctcctggagcccctgcttctcctggggctgtgccggggaagtgcgtgcgttccttcaggagaacacacacgtgagactgcgcatcttcgctgcccgcatctatgattacgaccccctatataaggaggcgctgcaaatgctgcgggatgctggggcccaagtctccatcatgacctacgatgagtttgagtactgctgggacacctttgtgtaccgccagggatgtcccttccagccctgggatggactagaggagcacagccaagccctgagtgggaggctgcgggccattctccaggtgagggcttcctccctctgcctggtgccccatcggcctccccctcctccccgctcccctgtgccttgccttcccctctgctcagagcctcctctgggttccctgctccccacagggcgcccagctccgtccctccctttccttctcacagcctccttctctttcccacctcccgcatccctccctcctctcccgtcattgtcactgtccccaggccacctccctgtgccctctttccactctctcacctcctgctccattcaacccccctgctcttccagaatcagggaaactgaaggatgggcctcagtctctaaggaaggcagagacctgggttgagcagcagaataaaagatcttcttccaagaaatgcaaacagaccgttcaccaccatctccagctgctcacagacaccagcaaagcaatgtgctcctgatcaagtagattttttaaaaatcagagtcaattaattttaattgaaaatttctcttatgttccaagtgtacaagagtaagattatgctcaatattcccagaatagttttcaatgtattaatgaagtgattaattggctccatatttagactaataaaacattaagaatcttccataattgtttccacaaacactagcaaatgtgtagatgtctttccttg

SEQ ID NO: 108138 - DNA, 1282 bp, Homo sapiens
  Payload ID: 1251
  Gene Symbol: APOBEC3B
  Gene Name: apolipoprotein B mRNA editing enzyme, catalytic polypeptide-like 3B
  Uniprot ID: Q9UH17
  ENST ID: ENST00000407298
  CDS Start-End: 108-1181
actttaaggagggctgtccaactgcaaggacgctgtaagcaggaagtgaaaccacagagcttcaaaaaaagagcgggacagggacaagcgtatctaagaggctgaacatgaatccacagatcagaaatccgatggagcggatgtatcgagacacattctacgacaactttgaaaacgaacccatcctctatggtcggagctacacttggctgtgctatgaagtgaaaataaagaggggccgctcaaatctcctttgggacacaggggtctttcgaggccaggtgtatttcaagcctcagtaccacgcagaaatgtgcttcctctcttggttctgtggcaaccagctgcctgcttacaagtgtttccagatcacctggtttgtatcctggaccccctgcccggactgtgtggcgaagctggccgaattcctgtctgagcaccccaatgtcaccctgaccatctctgccgcccgcctctactactactgggaaagagattaccgaagggcgctctgcaggctgagtcaggcaggagcccgcgtgacgatcatggactatgaagaatttgcatactgctgggaaaactttgtgtacaatgaaggtcagcaattcatgccttggtacaaattcgatgaaaattatgcattcctgcaccgcacgctaaaggagattctcagatacctgatggatccagacacattcactttcaactttaataatgaccctttggtccttcgacggcgccagacctacttgtgctatgaggtggagcgcctggacaatggcacctgggtcctgatggaccagcacatgggctttctatgcaacgagttggacccggcccagatctacagggtcacttggttcatctcctggagcccctgcttctcctggggctgtgccggggaagtgcgtgcgttccttcaggagaacacacacgtgagactgcgcatcttcgctgcccgcatctatgattacgaccccctatataaggaggcgctgcaaatgctgcgggatgctggggcccaagtctccatcatgacctacgatgagtttgagtactgctgggacacctttgtgtaccgccagggatgtcccttccagccctgggatggactagaggagcacagccaagccctgagtgggaggctgcgggccattctccagaatcagggaaactgaaggatgggcctcagtctctaaggaaggcagagacctgggttgagcagcagaataaaagatcttcttccaagaaatgcaaacagaccgttcaccaccatctc

SEQ ID NO: 108139 - DNA, 2818 bp, Homo sapiens
  Payload ID: 1252
  Gene Symbol: APOBEC3C
  Gene Name: apolipoprotein B mRNA editing enzyme, catalytic polypeptide-like 3C
  Uniprot ID: Q9NRW3
  ENST ID: ENST00000361441
  CDS Start-End: 281-853
agataaagacagagcagcctgtctttatcggaggttcctctgccagtaggaggggcccggagaaaaccagaaagagggccagagccagagaaacatgaagcaccccggggcctcccacaccagtgcctgagcaggaatggggaggggccatgattcacaaggccctgggaggtcactttaaagagggctgctcaactgcaaggacgctgtaagcaggaagagaagccacagcgcttcagaaaagagtgggacagggacaagcatatctaagaggctgaacatgaatccacagatcagaaacccgatgaaggcaatgtatccaggcacattctacttccaatttaaaaacctatgggaagccaacgatcggaacgaaacttggctgtgcttcaccgtggaaggtataaagcgccgctcagttgtctcctggaagacgggcgtcttccgaaaccaggtggattctgagacccattgtcatgcagaaaggtgcttcctctcttggttctgcgacgacatactgtctcctaacacaaagtaccaggtcacctggtacacatcttggagcccttgcccagactgtgcaggggaggtggccgagttcctggccaggcacagcaacgtgaatctcaccatcttcaccgcccgcctctactacttccagtatccatgttaccaggaggggctccgcagcctgagtcaggaaggggtcgctgtggagatcatggactatgaagattttaaatattgttgggaaaactttgtgtacaatgataatgagccattcaagccttggaagggattaaaaaccaactttcgacttctgaaaagaaggctacgggagagtctccagtgaggggtctccctgggcctcatggtctgtctcctctagcctcctgctcatgctgcacgggcctcccctccaccctggacccgctctgtttctgcctggtcatcctgagcccctcctggcctcagggccattccacagtgctcccctgcctcaccgcttcctcctcgctcttccagactcttcctgcagaggctcctttctgcctccatggctatccatccacccccacagaccccgttcctccagcctgcgtgcccctaacctggcttttcccatctccccagcataaccaaatcttactaaactcatcctaggctgggcatggtgactcacgcctgtaatcccccagcaatttgggaggcaaaggtgggagaatcgcgtgagcccaggagttccagaccaggctgggtcacatgacaaagccccatctctacaaaaaaaaaaaaaaaaaaaaaaaaaaagccagatgtggtggcatgcatctgtagtccaagctacttgggaggctgaagtgggaggattacttgagcccgagaggtggaggctggagtgaacagagatcgcgccactgaactcgggtctgggcaacagatagagaccctgcctgaaaataaatcgataaataaactcaacctaaacaggtgtgaatatatgtaagttgaaaacccgaagttttgagaaacatcctttgtaaatttcatcctatgaattgggtcattcatgtcctacccagctaaaacagaggccaggagccagggaggaaaagcagtcaggccacacaacattgtttccgaaatggacttctctgcaagcctgactcctgagactgtgcattgtaccctgaaaccagctttatccatagcttctgcgataaatggctgtaagtcttggactccttgctccaaacgcagcgactcagcaatagaacctcccagctcccagcccttcctagtgcccatgggctttacatagggcaagagaacatttctccttctataattgccatctctttgctctctcaacatggtgaacaccatccggactccgtgtatgtctcaaattacaattctttctttgcaaatgaaatatgaaatttagaggctcttctaaacactttaaatttgatttgacattttcaaagcagatgtaagttttagagaatgagattctccataaaaatgaccctttcatgctgtggcctccatagaagatgtcccaggccaggtgcccacatggcaggcatttattttctcacagatctggaagctgcaggtccaacttcgaggggtgggtggggttgtttcctctgaggccgctccttctggctggcagggagtctcttccagccgtgtcctctgtggcctttcctctatgcacacgcacctctgggatctctctgcctccaaatatcatcttttttttttttttttttttttttgagacagagtgttgctcctcttgtccaggctggaatgcaatggcacaatctggactcactgcaacctccgcctcccgagtttaagcgattcttctgcttcagcctcccgagtaaaaggcatgcatcaccacacctggttaattttgtagttttagtagagatggggtctcaccatgttggccagactggtctcgaactcctgacctcaggtgatccgcctgtctcagcctctccaagtgctgggattacaggcatcagccactatgcccggctgggatcatatgttccacacatgtttgttcaataagcatggactgcaaccacctacatgaatattcatagctcctcctgtagcctgttgaatatgtatgtttagccaacctcttcagcataaagctcctgcccaaacccctcctgctcctaaatgtctgtctctggtgttaaccagaggctgctcttcccaggctgctggatggctaccttgcaggctgtcacccttaacaagaaataaagtgtcctttgcaaatgca

SEQ ID NO: 108140 - DNA, 1056 bp, Homo sapiens
  Payload ID: 1252
  Gene Symbol: APOBEC3C
  Gene Name: apolipoprotein B mRNA editing enzyme, catalytic polypeptide-like 3C
  ENST ID: ENST00000428892
  CDS Start-End: 102-287
aaagagggctgctcaactgcaaggacgctgtaagcaggaagagaagccacagcgcttcagaaaagagtgggacagggacaagcatatctaagaggctgaacatgaatccacagatcaggtggattctgagacccattgtcatgcagaaaggtgcttcctctcttggttctgcgacgacatactgtctcctaacacaaagtaccaggtcacctggtacacatcttggagcccttgcccagactgtgcaggggaggtggccgagttcctggccaggcacagcaacgtgaatctcaccatcttcaccgcccgcctctactacttccagtatccatgttaccaggaggggctccgcagcctgagtcaggaaggggtcgctgtggagatcatggactatgaagattttaaatattgttgggaaaactttgtgtacaatgataatgagccattcaagccttggaagggattaaaaaccaactttcgacttctgaaaagaaggctacgggagagtctccagtgaggggtctccctgggcctcatggtctgtctcctctagcctcctgctcatgctgcacgggcctcccctccaccctggacccgctctgtttctgcctggtcatcctgagcccctcctggcctcagggccattccacagtgctcccctgcctcaccgcttcctcctcgctcttccagactcttcctgcagaggctcctttctgcctccatggctatccatccacccccacagaccccgttcctccagcctgcgtgcccctaacctggcttttcccatctccccagcataaccaaatcttactaaactcatcctaggctgggcatggtgactcacgcctgtaatcccccagcaatttgggaggcaaaggtgggagaatcgcgtgagcccaggagttccagaccaggctgggtcacatgacaaagccccatctctacaaaaaaaaaaaaaaaaaaaaaaaaaaagccagatgtggtggcatgcatctgtagtccaagctacttgggaggctgaagtgggaggattacttgagcccgagaggtgga

SEQ ID NO: 108141 - DNA, 2528 bp, Homo sapiens
  Payload ID: 1253
  Gene Symbol: APOBEC3D
  Gene Name: apolipoprotein B mRNA editing enzyme, catalytic polypeptide-like 3D
  Uniprot ID: Q96AK3
  ENST ID: ENST00000216099
  CDS Start-End: 408-1568
tttttttttttttgagaggaagcctcgctctctcacccaggctggagtgcagtggcaggaacttggctcactgcaacctccgcttcccaggttcaagtgattctcctgcctcagcctccagagtagctgggattacaggcgcacgtcaccacacctggctaatttttgtatttttagtagagacggggtttctccatgttggtcaggctggtctcgaactcctgacctcgtgatccgcccgcctcggcctcccaaagtgctgggattacaggcgtgagccaccgtgcccggccgggaggtcactttaaggagggctgtccaactgcaaggagccgcaagcaggaagtgaaaccacagcacttcaaaaaaagagggagactgggacaagcgtatctaagaggctgaacatgaatccacagatcagaaatccgatggagcggatgtatcgagacacattctacgacaactttgaaaacgaacccatcctctatggtcggagctacacttggctgtgctatgaagtgaaaataaagaggggccgctcaaatctcctttgggacacaggggtctttcgaggcccggtactacccaaacgtcagtcgaatcacaggcaggaggtgtatttccggtttgagaaccacgcagaaatgtgcttcttatcttggttctgtggcaaccgactgcctgctaacaggcgcttccagatcacctggtttgtatcatggaacccctgcctgccctgtgtggtgaaggtgaccaaattcttggctgagcaccccaatgtcaccctgaccatctctgccgcccgcctctactactaccgggatagagattggcggtgggtgctcctcaggctgcataaggcaggggcccgtgtgaagatcatggactatgaagactttgcatactgctgggaaaactttgtgtgcaatgaaggtcagccattcatgccttggtacaaattcgatgacaattatgcatccctgcaccgcacgctaaaggagattctcagaaacccgatggaggcaatgtacccacacatattctacttccactttaaaaacctactgaaagcctgtggtcggaacgaaagctggctgtgcttcaccatggaagttacaaagcaccactcagctgtcttccggaagaggggcgtcttccgaaaccaggtggatcctgagacccattgtcatgcagaaaggtgcttcctctcttggttctgtgacgacatactgtctcctaacacaaactacgaggtcacctggtacacatcttggagcccttgcccagagtgtgcaggggaggtggccgagttcctggccaggcacagcaacgtgaatctcaccatcttcaccgcccgcctctgctacttctgggatacagattaccaggaggggctctgcagcctgagtcaggaaggggcctccgtgaagatcatgggctacaaagattttgtatcttgttggaaaaactttgtgtacagtgatgatgagccattcaagccttggaagggactacaaaccaactttcgacttctgaaaagaaggctacgggagattctccagtgaggggtctccctgggcctcatggtctgtctcttctagcctcctgctcatgctgcacgggcctcccctccatcctgcaccagctgtgcttttgcctggtcatcctgagcccctcctggcctcagggccattccatagtgcccccctgcctcaccacctcctccccgctctcccaggctcttcttgtagaggctctccatccacctccccagtcctgttcccccagcctgggtgcccctaacttgactcttcccatctccccagcataaccaaatcttttttttttttttttttttttgagacggagtttcactctgtcgcccagactagagtgcaatggctggatctcagctcactgcaaactctgcttactgggttcaagtgattctcctgtctcagcttctgagtagctgggattacagatgcctgccaccacgcccagctaatttttttttttttttttttttttttttgtatttttagtagtgactgggtttcaccatgttggccaggctggtcttgaactcctgacctcaggtgatctgcccatctctgtctcccaaagtgctgggattacgggcgtgagccacccggctcggccgcacaaccaaatcttattaaactcaatctagtctggccctggtgactcacgcctttcggaggcagaggtgggagaatcgcttgagcccagaagtttgagaccagcctgggccacacgacaaagccccatttctacaaaaaaaaataccaaaaaaaagccagatgtggtggcatgcacctgtagtttaagctacttgggaggatgaagtgggaggactgcttgagccggggaggtggaggctggagtaaactgagatcgcgccacagaactccagtttgagcaacagatcaagaccctgcctgaaaataaatcaataaatacactcaacctaaatggatatgaatatatgtaagttgaaaacc

SEQ ID NO: 108142 - DNA, 1161 bp, Homo sapiens
  Payload ID: 1253
  Gene Symbol: APOBEC3D
  Gene Name: apolipoprotein B mRNA editing enzyme, catalytic polypeptide-like 3D
  Uniprot ID: Q96AK3
  ENST ID: ENST00000381568
  CDS Start-End: 1-1161
atgaatccacagatcagaaatccgatggagcggatgtatcgagacacattctacgacaactttgaaaacgaacccatcctctatggtcggagctacacttggctgtgctatgaagtgaaaataaagaggggccgctcaaatctcctttgggacacaggggtctttcgaggcccggtactacccaaacgtcagtcgaatcacaggcaggaggtgtatttccggtttgagaaccacgcagaaatgtgcttcttatcttggttctgtggcaaccgactgcctgctaacaggcgcttccagatcacctggtttgtatcatggaacccctgcctgccctgtgtggtgaaggtgaccaaattcttggctgagcaccccaatgtcaccctgaccatctctgccgcccgcctctactactaccgggatagagattggcggtgggtgctcctcaggctgcataaggcaggggcccgtgtgaagatcatggactatgaagactttgcatactgctgggaaaactttgtgtgcaatgaaggtcagccattcatgccttggtacaaattcgatgacaattatgcatccctgcaccgcacgctaaaggagattctcagaaacccgatggaggcaatgtacccacacatattctacttccactttaaaaacctactgaaagcctgtggtcggaacgaaagctggctgtgcttcaccatggaagttacaaagcaccactcagctgtcttccggaagaggggcgtcttccgaaaccaggtggatcctgagacccattgtcatgcagaaaggtgcttcctctcttggttctgtgacgacatactgtctcctaacacaaactacgaggtcacctggtacacatcttggagcccttgcccagagtgtgcaggggaggtggccgagttcctggccaggcacagcaacgtgaatctcaccatcttcaccgcccgcctctgctacttctgggatacagattaccaggaggggctctgcagcctgagtcaggaaggggcctccgtgaagatcatgggctacaaagattttgtatcttgttggaaaaactttgtgtacagtgatgatgagccattcaagccttggaagggactacaaaccaactttcgacttctgaaaagaaggctacgggagattctccagtga

SEQ ID NO: 108143 - DNA, 1961 bp, Homo sapiens
  Payload ID: 1253
  Gene Symbol: APOBEC3D
  Gene Name: apolipoprotein B mRNA editing enzyme, catalytic polypeptide-like 3D
  ENST ID: ENST00000427494
  CDS Start-End: 408-1016
tttttttttttttgagaggaagcctcgctctctcacccaggctggagtgcagtggcaggaacttggctcactgcaacctccgcttcccaggttcaagtgattctcctgcctcagcctccagagtagctgggattacaggcgcacgtcaccacacctggctaatttttgtatttttagtagagacggggtttctccatgttggtcaggctggtctcgaactcctgacctcgtgatccgcccgcctcggcctcccaaagtgctgggattacaggcgtgagccaccgtgcccggccgggaggtcactttaaggagggctgtccaactgcaaggagccgcaagcaggaagtgaaaccacagcacttcaaaaaaagagggagactgggacaagcgtatctaagaggctgaacatgaatccacagatcagaaatccgatggagcggatgtatcgagacacattctacgacaactttgaaaacgaacccatcctctatggtcggagctacacttggctgtgctatgaagtgaaaataaagaggggccgctcaaatctcctttgggacacaggggtctttcgaggcccggtactacccaaacgtcagtcgaatcacaggcaggaggtggatcctgagacccattgtcatgcagaaaggtgcttcctctcttggttctgtgacgacatactgtctcctaacacaaactacgaggtcacctggtacacatcttggagcccttgcccagagtgtgcaggggaggtggccgagttcctggccaggcacagcaacgtgaatctcaccatcttcaccgcccgcctctgctacttctgggatacagattaccaggaggggctctgcagcctgagtcaggaaggggcctccgtgaagatcatgggctacaaagattttgtatcttgttggaaaaactttgtgtacagtgatgatgagccattcaagccttggaagggactacaaaccaactttcgacttctgaaaagaaggctacgggagattctccagtgaggggtctccctgggcctcatggtctgtctcttctagcctcctgctcatgctgcacgggcctcccctccatcctgcaccagctgtgcttttgcctggtcatcctgagcccctcctggcctcagggccattccatagtgcccccctgcctcaccacctcctccccgctctcccaggctcttcttgtagaggctctccatccacctccccagtcctgttcccccagcctgggtgcccctaacttgactcttcccatctccccagcataaccaaatcttttttttttttttttttttttgagacggagtttcactctgtcgcccagactagagtgcaatggctggatctcagctcactgcaaactctgcttactgggttcaagtgattctcctgtctcagcttctgagtagctgggattacagatgcctgccaccacgcccagctaatttttttttttttttttttttttttttgtatttttagtagtgactgggtttcaccatgttggccaggctggtcttgaactcctgacctcaggtgatctgcccatctctgtctcccaaagtgctgggattacgggcgtgagccacccggctcggccgcacaaccaaatcttattaaactcaatctagtctggccctggtgactcacgcctttcggaggcagaggtgggagaatcgcttgagcccagaagtttgagaccagcctgggccacacgacaaagccccatttctacaaaaaaaaataccaaaaaaaagccagatgtggtggcatgcacctgtagtttaagctacttgggaggatgaagtgggaggactgcttgagccggggaggtggaggctggagtaaactgagatcgcgccacagaactccagtttgagcaacagatcaagaccctgcctgaaaataaatcaataaatacactcaacctaaatggatatgaatata

SEQ ID NO: 108144 - DNA, 591 bp, Homo sapiens
  Payload ID: 1253
  Gene Symbol: APOBEC3D
  Gene Name: apolipoprotein B mRNA editing enzyme, catalytic polypeptide-like 3D
  ENST ID: ENST00000622217
  CDS Start-End: 19-591
gtatctaagaggctgaacatgaatccacagatcagaaacccgatggaggcaatgtacccacacatattctacttccactttaaaaacctactgaaagcctgtggtcggaacgaaagctggctgtgcttcaccatggaagttacaaagcaccactcagctgtcttccggaagaggggcgtcttccgaaaccaggtggatcctgagacccattgtcatgcagaaaggtgcttcctctcttggttctgtgacgacatactgtctcctaacacaaactacgaggtcacctggtacacatcttggagcccttgcccagagtgtgcaggggaggtggccgagttcctggccaggcacagcaacgtgaatctcaccatcttcaccgcccgcctctgctacttctgggatacagattaccaggaggggctctgcagcctgagtcaggaaggggcctccgtgaagatcatgggctacaaagattttgtatcttgttggaaaaactttgtgtacagtgatgatgagccattcaagccttggaagggactacaaaccaactttcgacttctgaaaagaaggctacgggagattctccagtga

SEQ ID NO: 108145 - DNA, 2694 bp, Homo sapiens
  Payload ID: 1254
  Gene Symbol: APOBEC3F
  Gene Name: apolipoprotein B mRNA editing enzyme, catalytic polypeptide-like 3F
  Uniprot ID: Q8IUX4
  ENST ID: ENST00000308521
  CDS Start-End: 358-1479
gtgctctgctggctcagcctggtgtggacccacctcgcgggcgctggctgcaatgactttctctttccctttgcaattgccttgggtcctgccgcacagagcggcctgtctttatcagaggtccctctgccagggggagggccccagagaaaaccagaaagagggtgagagactgaggaagataaagcgtcccagggcctcctacaccagcgcctgagcaggaagggggaggggccatgactacgaggccctgggaggtcactttagggagggctgtcctgaaacctggagcctggagcagaaagtgaaaccctggtgctccagacaaagatcttagtcgggactagccggccaaggatgaagcctcacttcagaaacacagtggagcgaatgtatcgagacacattctcctacaacttttataatagacccatcctttctcgtcggaataccgtctggctgtgctacgaagtgaaaacaaagggtccctcaaggccccgtttggacgcaaagatctttcgaggccaggtgtattcccagcctgagcaccacgcagaaatgtgcttcctctcttggttctgtggcaaccagctgcctgcttacaagtgtttccagatcacctggtttgtatcctggaccccctgcccggactgtgtggcgaagctggccgaattcctggctgagcaccccaatgtcaccctgaccatctccgccgcccgcctctactactactgggaaagagattaccgaagggcgctctgcaggctgagtcaggcaggggcccgcgtgaagattatggacgatgaagaatttgcatactgctgggaaaactttgtgtacagtgaaggtcagccattcatgccttggtacaaattcgatgacaattatgcattcctgcaccgcacgctaaaggagattctcagaaacccgatggaggcaatgtatccacacatattctacttccactttaaaaacctacgcaaagcctatggtcggaacgaaagctggctgtgcttcaccatggaagttgtaaagcaccactcacctgtctcctggaagaggggcgtcttccgaaaccaggtggatcctgagacccattgtcatgcagaaaggtgcttcctctcttggttctgtgacgacatactgtctcctaacacaaactacgaggtcacctggtacacatcttggagcccttgcccagagtgtgcaggggaggtggccgagttcctggccaggcacagcaacgtgaatctcaccatcttcaccgcccgcctctactacttctgggatacagattaccaggaggggctccgcagcctgagtcaggaaggggcctccgtggagatcatgggctacaaagattttaaatattgttgggaaaactttgtgtacaatgatgatgagccattcaagccttggaaaggactaaaatacaactttctattcctggacagcaagctgcaggagattctcgagtgaggggtctccccgggcctcatggtctgtctcctctagcctcctgctcatgttgtgcaggcctcccctccatcctggaccagctgtgcttttgcctggtcatcctgagcccctcctggcctcagggccattccatagtgctcccctgcctcaccacctcctctccgctctcccaggctcttcctgcagaggcctctttctgcctccatggctatccatccacccaccaagaccctgttccctgagcctgcatgcccctaacctgccttttcccatctccccagcataacctaatattttttttttttttttgagacggaatttcgctctgtcacccagactggagtgcaatggcttgatcttggctcactgcaaactctgcctaccaggttcaagcgattctcctgcctccgcctcccgagtagctggaattacagacgcctgccaccacgcacagctaactttttttttttttgtatttttagtagtgactgggtttcaccatgttggccaggctggtcttgaactcctgacctcaggtgatccgcctatctcagcctcccaaagtgctgggattacaggcgtgagccactggcccggcggcacaaccaaatcttattaaactcaccctaggctggccgcggtgactcatgcctataatcccccagcaatttgggaggcagaggtgagagaatcgcttgagcccaggaattcgagaccagcctgggccacatgacaaagccccatctctacaaaaaaattacaaaaaaaaaaaaaacaggtgtggtggcatgcacctgtagttgaagctacttggaaggatgaagtgggaggattgcttgagccggggaggtggaggctgcagtgaactgagatcacgtcactgaactccagtctgagcaacagatcgagaccctgcctgaaaataaatcaataaataaactcaaccgaaatgggtatgaaagttgaaatgggtatgtaagttgaaaaccagaagttttgagaaacatcctttgttaactttcatcctacaaattgggtcattcatgtcctacgcagctaaaacagagcccaggagccagggaggaaaagcagtcaggccacacaccattgctcccaaaatggacttctctgcaagcctgactcctgaaactgtgcattgtaccctgaaaccagctttatccatagcttctgcaataaatggctgtaagtcttgga

SEQ ID NO: 108146 - DNA, 616 bp, Homo sapiens
  Payload ID: 1254
  Gene Symbol: APOBEC3F
  Gene Name: apolipoprotein B mRNA editing enzyme, catalytic polypeptide-like 3F
  Uniprot ID: Q8IUX4
  ENST ID: ENST00000381565
  CDS Start-End: 105-410
ggaggtcactttagggagggctgtcctgaaacctggagcctggagcagaaagtgaaaccctggtgctccagacaaagatcttagtcgggactagccggccaaggatgaagcctcacttcagaaacacagtggagcgaatgtatcgagacacattctcctacaacttttataatagacccatcctttctcgtcggaataccgtctggctgtgctacgaagtgaaaacaaagggtccctcaaggccccgtttggacgcaaagatctttcgaggccaggtgcccaggtctttcatcagagccccatttcaagtgctcagtagcccctttggccagtgcgccccaccacatgggacagcgcaggtccagtggcctccccagctgaccgcaggcagggaacaaggcagaccctagagggccaggccacagcaggggctgaggatgcctggtgaatggatgcctgggagaatggatgccagaattcacgcatgaggctctgaacagggctgggaaaacttccaaacgaagggaagctcatgtcttggtgcactttgtgatgatgcttcaacagcaggactgagatggggacatttacaataaacagaaatgtatgggctcga

SEQ ID NO: 108147 - DNA, 1834 bp, Homo sapiens
  Payload ID: 1255
  Gene Symbol: APOBEC3G
  Gene Name: apolipoprotein B mRNA editing enzyme, catalytic polypeptide-like 3G
  Uniprot ID: Q9HC16
  ENST ID: ENST00000407997
  CDS Start-End: 358-1512
gtgctctgctggctcagcctggtgtggacccacctcccgggcgctggctgcaatgactttctctttccctttgcaattgccttgggtcctgccgcacagagcggcctgtctttatcagaggtccctctgccagggggagggccccagagaaaaccagaaagagggtgagagactgaggaagataaagcgtcccagggcctcctacaccagcgcctgagcaggaagcgggaggggccatgactacgaggccctgggaggtcactttagggagggctgtcctaaaaccagaagcttggagcagaaagtgaaaccctggtgctccagacaaagatcttagtcgggactagccggccaaggatgaagcctcacttcagaaacacagtggagcgaatgtatcgagacacattctcctacaacttttataatagacccatcctttctcgtcggaataccgtctggctgtgctacgaagtgaaaacaaagggtccctcaaggccccctttggacgcaaagatctttcgaggccaggtgtattccgaacttaagtaccacccagagatgagattcttccactggttcagcaagtggaggaagctgcatcgtgaccaggagtatgaggtcacctggtacatatcctggagcccctgcacaaagtgtacaagggatatggccacgttcctggccgaggacccgaaggttaccctgaccatctttgttgcccgcctctactacttctgggacccagattaccaggaggcgcttcgcagcctgtgtcagaaaagagacggtccgcgtgccaccatgaagatcatgaattatgacgaatttcagcactgttggagcaagttcgtgtacagccaaagagagctatttgagccttggaataatctgcctaaatattatatattactgcacatcatgctgggggagattctcagacactcgatggatccacccacattcactttcaactttaacaatgaaccttgggtcagaggacggcatgagacttacctgtgttatgaggtggagcgcatgcacaatgacacctgggtcctgctgaaccagcgcaggggctttctatgcaaccaggctccacataaacacggtttccttgaaggccgccatgcagagctgtgcttcctggacgtgattcccttttggaagctggacctggaccaggactacagggttacctgcttcacctcctggagcccctgcttcagctgtgcccaggaaatggctaaattcatttcaaaaaacaaacacgtgagcctgtgcatcttcactgcccgcatctatgatgatcaaggaagatgtcaggaggggctgcgcaccctggccgaggctggggccaaaatttcaataatgacatacagtgaatttaagcactgctgggacacctttgtggaccaccagggatgtcccttccagccctgggatggactagatgagcacagccaagacctgagtgggaggctgcgggccattctccagaatcaggaaaactgaaggatgggcctcagtctctaaggaaggcagagacctgggttgagcctcagaataaaagatcttcttccaagaaatgcaaacaggctgttcaccaccatctccagctgatcacagacaccagcaaagcaatgcactcctgaccaagtagattcttttaaaaattagagtgcattactttgaatcaaaaatttatttatatttcaagaataaagtactaagattgtgctcaatacacagaaaagtttcaaacctactaatccagcgacaatttgaatcggttttgtaggtagaggaataaaatgaaatactaaatctttctgta

SEQ ID NO: 108148 - DNA, 1155 bp, Homo sapiens
  Payload ID: 1255
  Gene Symbol: APOBEC3G
  Gene Name: apolipoprotein B mRNA editing enzyme, catalytic polypeptide-like 3G
  Uniprot ID: Q9HC16
  ENST ID: ENST00000452957
  CDS Start-End: 1-1155
atgaagcctcacttcagaaacacagtggagcgaatgtatcgagacacattctcctacaacttttataatagacccatcctttctcgtcggaataccgtctggctgtgctacgaagtgaaaacaaagggtccctcaaggccccctttggacgcaaagatctttcgaggccaggtgtattccgaacttaagtaccacccagagatgagattcttccactggttcagcaagtggaggaagctgcatcgtgaccaggagtatgaggtcacctggtacatatcctggagcccctgcacaaagtgtacaagggatatggccacgttcctggccgaggacccgaaggttaccctgaccatctttgttgcccgcctctactacttctgggacccagattaccaggaggcgcttcgcagcctgtgtcagaaaagagacggtccgcgtgccaccatgaagatcatgaattatgacgaatttcagcactgttggagcaagttcgtgtacagccaaagagagctatttgagccttggaataatctgcctaaatattatatattactgcacatcatgctgggggagattctcagacactcgatggatccacccacattcactttcaactttaacaatgaaccttgggtcagaggacggcatgagacttacctgtgttatgaggtggagcgcatgcacaatgacacctgggtcctgctgaaccagcgcaggggctttctatgcaaccaggctccacataaacacggtttccttgaaggccgccatgcagagctgtgcttcctggacgtgattcccttttggaagctggacctggaccaggactacagggttacctgcttcacctcctggagcccctgcttcagctgtgcccaggaaatggctaaattcatttcaaaaaacaaacacgtgagcctgtgcatcttcactgcccgcatctatgatgatcaaggaagatgtcaggaggggctgcgcaccctggccgaggctggggccaaaatttcaataatgacatacagtgaatttaagcactgctgggacacctttgtggaccaccagggatgtcccttccagccctgggatggactagatgagcacagccaagacctgagtgggaggctgcgggccattctccagaatcaggaaaactga

SEQ ID NO: 108149 - DNA, 1046 bp, Homo sapiens
  Payload ID: 1256
  Gene Symbol: APOBEC3H
  Gene Name: apolipoprotein B mRNA editing enzyme, catalytic polypeptide-like 3H
  Uniprot ID: Q6NTF7
  ENST ID: ENST00000348946
  CDS Start-End: 128-676
tgacttttgggagagctgaccttttgtgacttttgggagagctgccaaaagtgaaacttagtgcctcagacaagcaggggcaagtctgctaaggaagctgtggccagaagcacagatcagaaacacgatggctctgttaacagccgaaacattccgcttacagtttaacaacaagcgccgcctcagaaggccttactacccgaggaaggccctcttgtgttaccagctgacgccgcagaatggctccacgcccacgagaggctactttgaaaacaagaaaaagtgccatgcagaaatttgctttattaacgagatcaagtccatgggactggacgaaacgcagtgctaccaagtcacctgttacctcacgtggagcccctgctcctcctgtgcctgggagctggttgacttcatcaaggctcacgaccatctgaacctgggcatcttcgcctcccgcctgtactaccactggtgcaagccccagcagaaggggctgcggcttctgtgtggatcccaggtcccggtggaggtcatgggcttcccagagtttgctgactgctgggaaaactttgtggaccacgagaaaccgctttccttcaacccctataagatgttagaggagctagataaaaacagtcgagccataaagcgacggcttgagaggataaagtcctgaagtgtggatgttttagagaatgacttaagaagtttgcagcttggacccgtatcccactcattatcaagaagcaactcaagatgactttccctggggcatgtcagttgcctcatagcctgctggtcctgtaagcaagcactaagctccacagtgccagttccttgccccaacctggccccatccaagtacagaagaccttcctttcctcctttttccatattgctttctgttctaagtgggtgaataattttataattgaaaaaataaagataaagtctgtaaatccagccgggtacggtggctcacgcctgtaatcctagcactttgggaggctgagatgctcggccaataaatttctattgtttatgaa

SEQ ID NO: 108150 - DNA, 1023 bp, Homo sapiens
  Payload ID: 1256
  Gene Symbol: APOBEC3H
  Gene Name: apolipoprotein B mRNA editing enzyme, catalytic polypeptide-like 3H
  Uniprot ID: Q6NTF7
  ENST ID: ENST00000401756
  CDS Start-End: 77-679
tgaaacttagtgcctcagacaagcaggggcaagtctgctaaggaagctgtggccagaagcacagatcagaaacacgatggctctgttaacagccgaaacattccgcttacagtttaacaacaagcgccgcctcagaaggccttactacccgaggaaggccctcttgtgttaccagctgacgccgcagaatggctccacgcccacgagaggctactttgaaaacaagaaaaagtgccatgcagaaatttgctttattaacgagatcaagtccatgggactggacgaaacgcagtgctaccaagtcacctgttacctcacgtggagcccctgctcctcctgtgcctgggagctggttgacttcatcaaggctcacgaccatctgaacctgggcatcttcgcctcccgcctgtactaccactggtgcaagccccagcagaaggggctgcggcttctgtgtggatcccaggtcccggtggaggtcatgggcttcccagagtttgctgactgctgggaaaactttgtggaccacgagaaaccgctttccttcaacccctataagatgttagaggagctagataaaaacagtcgagccataaagcgacggcttgagaggataaagattccaggggtacgtgcgcagggtcgttacatggatatattgtgtgatgctgaggtctgagtcacccaatctactggaacatagcacccaatagcagtcctgaagtgtggatgttttagagaatgacttaagaagtttgcagcttggacccgtatcccactcattatcaagaagcaactcaagatgactttccctggggcatgtcagttgcctcatagcctgctggtcctgtaagcaagcactaagctccacagtgccagttccttgccccaacctggccccatccaagtacagaagaccttcctttcctcctttttccatattgctttctgttctaagtgggtgaataattttataattgaaaaaataaagataaagtctgtaaatccagccgggtacggtgg

SEQ ID NO: 108151 - DNA, 592 bp, Homo sapiens
  Payload ID: 1256
  Gene Symbol: APOBEC3H
  Gene Name: apolipoprotein B mRNA editing enzyme, catalytic polypeptide-like 3H
  Uniprot ID: Q6NTF7
  ENST ID: ENST00000421988
  CDS Start-End: 128-592
tgacttttgggagagctgaccttttgtgacttttgggagagctgccaaaagtgaaacttagtgcctcagacaagcaggggcaagtctgctaaggaagctgtggccagaagcacagatcagaaacacgatggctctgttaacagccgaaacattccgcttacagtttaacaacaagcgccgcctcagaaggccttactacccgaggaaggccctcttgtgttaccagctgacgccgcagaatggctccacgcccacgagaggctactttgaaaacaagaaaaagtgccatgcagaaatttgctttattaacgagatcaagtccatgggactggacgaaacgcagtgctaccaagtcacctgttacctcacgtggagcccctgctcctcctgtgcctgggagctggttgacttcatcaaggctcacgaccatctgaacctgggcatcttcgcctcccgcctgtactaccactggtgcaagccccagcagaaggggctgcggcttctgtgtggatcccaggtcccggtggaggtcatgggcttcccagattccaggggtacgtgcgcagggtcgttacatggatatattgtgtga

SEQ ID NO: 108152 - DNA, 988 bp, Homo sapiens
  Payload ID: 1256
  Gene Symbol: APOBEC3H
  Gene Name: apolipoprotein B mRNA editing enzyme, catalytic polypeptide-like 3H
  Uniprot ID: Q6NTF7
  ENST ID: ENST00000442487
  CDS Start-End: 67-618
tgcctcagacaagcaggggcaagtctgctaaggaagctgtggccagaagcacagatcagaaacacgatggctctgttaacagccgaaacattccgcttacagtttaacaacaagcgccgcctcagaaggccttactacccgaggaaggccctcttgtgttaccagctgacgccgcagaatggctccacgcccacgagaggctactttgaaaacaagaaaaagtgccatgcagaaatttgctttattaacgagatcaagtccatgggactggacgaaacgcagtgctaccaagtcacctgttacctcacgtggagcccctgctcctcctgtgcctgggagctggttgacttcatcaaggctcacgaccatctgaacctgggcatcttcgcctcccgcctgtactaccactggtgcaagccccagcagaaggggctgcggcttctgtgtggatcccaggtcccggtggaggtcatgggcttcccagagtttgctgactgctgggaaaactttgtggaccacgagaaaccgctttccttcaacccctataagatgttagaggagctagataaaaacagtcgagccataaagcgacggcttgagaggataaagcagtcctgaagtgtggatgttttagagaatgacttaagaagtttgcagcttggacccgtatcccactcattatcaagaagcaactcaagatgactttccctggggcatgtcagttgcctcatagcctgctggtcctgtaagcaagcactaagctccacagtgccagttccttgccccaacctggccccatccaagtacagaagaccttcctttcctcctttttccatattgctttctgttctaagtgggtgaataattttataattgaaaaaataaagataaagtctgtaaatccagccgggtacggtggctcacgcctgtaatcctagcactttgggaggctgagatgctcggccaataaatttctattgtttatgaa

SEQ ID NO: 108153 - DNA, 465 bp, Homo sapiens
  Payload ID: 1256
  Gene Symbol: APOBEC3H
  Gene Name: apolipoprotein B mRNA editing enzyme, catalytic polypeptide-like 3H
  ENST ID: ENST00000613996
  CDS Start-End: 1-465
atggctctgttaacagccgaaacattccgcttacagtttaacaacaagcgccgcctcagaaggccttactacccgaggaaggccctcttgtgttaccagctgacgccgcagaatggctccacgcccacgagaggctactttgaaaacaagaaaaagtgccatgcagaaatttgctttattaacgagatcaagtccatgggactggacgaaacgcagtgctaccaagtcacctgttacctcacgtggagcccctgctcctcctgtgcctgggagctggttgacttcatcaaggctcacgaccatctgaacctgggcatcttcgcctcccgcctgtactaccactggtgcaagccccagcagaaggggctgcggcttctgtgtggatcccaggtcccggtggaggtcatgggcttcccagattccaggggtacgtgcgcagggtcgttacatggatatattgtgtga

SEQ ID NO: 108154 - DNA, 730 bp, Homo sapiens
  Payload ID: 1256
  Gene Symbol: APOBEC3H
  Gene Name: apolipoprotein B mRNA editing enzyme, catalytic polypeptide-like 3H
  ENST ID: ENST00000613677
  CDS Start-End: 128-730
tgacttttgggagagctgaccttttgtgacttttgggagagctgccaaaagtgaaacttagtgcctcagacaagcaggggcaagtctgctaaggaagctgtggccagaagcacagatcagaaacacgatggctctgttaacagccgaaacattccgcttacagtttaacaacaagcgccgcctcagaaggccttactacccgaggaaggccctcttgtgttaccagctgacgccgcagaatggctccacgcccacgagaggctactttgaaaacaagaaaaagtgccatgcagaaatttgctttattaacgagatcaagtccatgggactggacgaaacgcagtgctaccaagtcacctgttacctcacgtggagcccctgctcctcctgtgcctgggagctggttgacttcatcaaggctcacgaccatctgaacctgggcatcttcgcctcccgcctgtactaccactggtgcaagccccagcagaaggggctgcggcttctgtgtggatcccaggtcccggtggaggtcatgggcttcccagagtttgctgactgctgggaaaactttgtggaccacgagaaaccgctttccttcaacccctataagatgttagaggagctagataaaaacagtcgagccataaagcgacggcttgagaggataaagattccaggggtacgtgcgcagggtcgttacatggatatattgtgtgatgctgaggtctga

SEQ ID NO: 108155 - DNA, 2650 bp, Homo sapiens
  Payload ID: 1257
  Gene Symbol: APOBEC4
  Gene Name: apolipoprotein B mRNA editing enzyme, catalytic polypeptide-like 4 (putative)
  Uniprot ID: Q8WW27
  ENST ID: ENST00000308641
  CDS Start-End: 273-1376
agtgttcttagaggtagccacacctcagcaagggctttctaacttggaacagcaaagttcaaatgaacgaatagacacaaactgtgaaagagtcctgaacccattacaaggtgaatctttacagcacaattgccttctgaagctacttgaaacagggcatgggacttaaaggagaaaaaaaaggaaatggaccatctcttctaacacctggaatgtgatccaagcctggagacaaattgatggtttgcagctagaagacagtaaatctagcaatggagcccatatatgaggagtacctagcaaatcatggaacaatagtaaaaccatattactggctaagcttctctctcgattgctctaattgtccttaccatattcgaacaggtgaagaagcaagagtttccctcacagaattttgtcagatttttggattcccttatgggacaacatttcctcaaacaaaacacctcacattttatgaactaaaaacttcttctggtagcctggtgcaaaagggccatgctagcagttgcactgggaattatatccatccagaatcaatgctctttgaaatgaatggttatcttgactcagccatatacaataatgacagcatcaggcatatcattctgtattccaacaactccccttgtaatgaagctaaccactgctgcatcagcaaaatgtataatttcctgattacgtatccaggcatcactcttagtatttatttttctcagctctatcatactgagatggactttcctgcctcagcatggaaccgcgaagctctccggagcctggccagcttatggccgcgggttgttttgagtccaataagtggtgggatctggcattctgttctccacagctttataagtggtgtctcaggatcacatgtttttcagcccattttaactgggagagcactggctgacaggcacaacgcatatgaaatcaatgccataacaggcgtaaaaccttacttcactgatgttcttctccagacaaaaaggaatccaaacacaaaagctcaggaggctttagagagctaccccttaaacaatgcctttcctggacagttttttcaaatgccgagtggacaactccaacccaacctacctccagacctcagggctcctgttgtttttgtgctagtgcctctcagggacttaccaccaatgcatatgggccaaaacccaaataaacccaggaatatcgtaaggcacttaaatatgcctcaaatgtcattccaggaaaccaaggaccttggaaggcttcccactggaaggtcagtggagatagtggaaatcacagaacagtttgcaagtagcaaggaggcagatgaaaagaagaagaagaaagggaagaaataaaatctacattcctacagcatgaaaccaattaccaagggacttattagataggcaataaaaatctggaaactttctctctcagggctgagccaagatggagataaactgatgcactaaaagcaaaccttgaattatttaccatatcaactattataaagttacactattttaaacataatccaaaatgtttccataagcaacttgatctctctcctttattttgaaagtggcagtatcaaaatggaaccattagcagcttgctaatattttgatgcagaaaaggaatctcattattctattttactcacatcatctttccactacaaaagcccatggacaaaatagctacctaaatttgtttcggtaaaaaatttactgtaaaattgaaaaacagcctgaagctactgacattaagtgctgtttgcaggagcaaaccagtgattttctattaattgttaatcatggacagaagattttaggcagctcatttttttctaaagtgattcaaaatagttttgtgtgggaaaaagctcttctgctgattacatatagctataaagattaaaacctagccacctgctcagtttgatcttccccagctcagacctctcccttctgagcagatgatagaggtaagatgatacatgagaacctccaatggctcctgtcatcacatactgtataaaatccaagttcctcttactggctttcaaggatcctcctttaacttcctgttgccttgtctcatcagcaagatcataagtacctacaggtcaagcactgtctctcccttctctttagcttttcccttaggatctagcacattacccagcaaaatgtgagtagcaaggctgaaatgacatctcaataacttcaccaatgattgtaactcagcatcccttctccatcccagctgaaagcctgcttcaccatcctgcaagagatgttttttctttttgttagcatccattcccctttctaatgcagctcccaatgcataatgtgtgttttacttccctctttctgactccatcctcgtcaccagtgaatatttgtaccttctcttaaaatcttcaaaacacacttctaggaagtgctccttgattaatcctctaagcacttaaatgaaagcactttgcttatgcttatttcacatttgctgccacttgcctctttgaaatatgtaaagatacattacaagaaaaatgtacattttctcgtaacttgctattaatttttttctttatatatatatataaagtaatcctaagcta

SEQ ID NO: 108156 - DNA, 3765 bp, Homo sapiens
  Payload ID: 1258
  Gene Symbol: APOBR
  Gene Name: apolipoprotein B receptor
  Uniprot ID: Q0VD83
  ENST ID: ENST00000431282
  CDS Start-End: 34-3300
agctttctggacacacagacagagacagacaggatggacttcctccggctatacctccctgggctgcaccaggccttgaggggggcactggattccctcggcacctttgtctcctacctcctgggagatgcagtccccactgtagagcgggaggcgcaggcggctgaggaactgggggtggtggcggtgggaaagacagggaagattgtagaggaggaagcccaggaggacctggagggccttagaggcagccaaaacgagggggctggaaggctgagagggcctggagatgacagaagacatgaagtggggagctcagctgtagaacagacctggggctggggagatggcagctcccatgggtcccaagcagagaggcaggacagtggggctggggagacagccaaggctgccaggtgccaggagccaagcgcccacttggaggccagaaagaaatccaaggcagggtctggggcttgccaagacaggagcggccaagcccaggagaggcaggagtcccatgagcaggaagtgaacagagaagagaggctgagaagctgggaacaggaggaggaggaggaagaggtcagggcaagagagccagggatggccagaggggcggagtcagagtggacctggcatggggagacggaggggaaggctggtgctgttgggccaaaggcggcaggggacaaccgggagatggagcagggggtcagggaggcagatgcaggggaaactgaggagcctggggccgaaggggctgggaaaggagaagaggtggtagtggtggagaaggcctgtgaaagcactagggcatgggggacgtggggcccaggggcagagcctgaggactggggaatcttaggcagagaggaggccaggacaaccccaggtagggaagaggccagggcaattttagatggggaggaagccaggacaatctcaggcggggaggaggctgagacagcctcaggcggggaggaggctgaaacagcctcaggcggggaggaggccgggacagcctcgggaggggaggaggccgggatagcctcaggcggggaggctgggacagcctcaggaggggaggaggccgggacagcctcaggaggggacgaggcctggacaacctcaggcaaagaggaggctgacctgctgggagtcagacagacagaatatggagcagtcccaggagaaaggctcctagaggctactggaaaagtctgggtcctagaggaggagggggatgaggagagagaggctgaggtgagccctttccccaaacagccccaggtcctgggcactgaaagaacagaagaggctgctgagagccagaccgcagggagggaagctgtgggaggccaggaggcaggggagagctttgagggccaggtagacctgcgtggtaaggaggctgagatgaggcaggacttggggatcagggccgaccgggccaggatggaagagctggtacaggcagaggaggcccaggaggagagagggagcagcagggatccagtggctgagctgccctcagatggagaggctgaaggcactgccgacttggaggcaactccagaggccaggcctgaggaggagctcacaggggaggagagtgaggcggcccagactagctgtggcctactgggcgtggaatggggtggcctcacacacagcgtcaccaaaggccaaggacctgagctgatggggggcgcccagaccccaactaagcaacccgaggaaagggaggcaggggaggtggagctcatgggagttctggccctgagcaaagaggagcaggagaggagcctggaggcaggtcccaggcacgcggggtctgtaaagcctgaggcctccgaggccttcccaggagcctgggaaaaccgcacgagaaaggacatggagagaggaaatactcaggaggatgcggccgatggcgagcagcgggaggaggaggagactgcgggaggccagaccctggcggctgaggctgaaggagaccgagagtctgaactatcagaagtcccagaggcaggcggggaggggctgacaacccaggacgcgggatgtggaactgaggagggagaggcatctgtctcagagaaccaggagctggacggaagcacaggggcagacgcagggccttgcccgtcactgggagaggcctatgccagagaaactgaggatgaggaggcggaggctgacagaacatccagaagaggctggaggctgcaagcggtggctgtgggcctcccggaccgtgaggatgcacagactggctctgtggctgctgggattatggggggtgatgtggtcccacacatcagcgctgctggcgctggtgaagctttggaaggggtgcttgggcaaggctgggactcgaaagaaaaggaagaggcagcagcaggagagcatgcaggtgggcaagaatttggtctggagggctcagcagaggaagaggtgactggcagaggcagccaagtagaggcttttgagtccagggagggaggaccttggggagggcgggtagaggccgaggaatctgcaggcgcagaggacagctgtgggctggatcccgcgggctcccagacagcgagggcagaggggatgggagccatggtggaggctggggggcttctagaaaagtggacgctgttggaagaagaggctgttggatggcaggagagagaacagagggaagacagtgaggggcggtgtggggactaccaccctgagggagaggcaccaaggctccttgatgcagagggtctcatggtgaccgggggccggagggcagaggccaaggagactgagccagaaagcctggaacatgtcaggggccaggaggagcagccaacacaccaggcccctgcagaagctgcgccggagtcagtcggggaagccgagacggctgaggccatgggcagtgccagaggaggtgctgccaacagctggagcgaggccccgctccccgggtccctcctagacgtctctgtcccaaggagtcgcgtgcacctctcgagaagctcctcacagcgtcgctcccggccctcttttcgtcggactccggcctgggagcagcaggaggagcccccagcccccaaccctcctgaggaggagctgtcagctcctgagcagagacccctccagctggaggaacccctggagccaagccctctgaggcatgatgggaccccggtgccagccaggagaaggcccctgggacacgggtttggcctcgcgcaccctggcatgatgcaggagctgcaagcccgtctgggccggcctaagccccagtgactgagacccggtgctctgggagccaggccctgagtgggtgccagaaggcttgctccaatgccactgagccctgctccctctgccactgtggacacatcctctccaccctctgggcctcagtgtcttgatgtatcattcatggagcaggcaaaaccagacgtctgggaagaccgtgaacttaaggagtctgattctccgacacaggctggtggaccacctaccccactgagaccacctctcagggtgcctgccctggttcctccccagcctgagtcagctgtctggactgcaaggaggctgggcacgggggctcacgcctgtcaccccagagctttgggaggccaaggtgggaggatcgcttgagaccaggagttcgagaccagcctgggcagcatagcaagatccccatcttttaaaaacaaaataaaacaataaagactgcaaggaagactgagggaacagcga

SEQ ID NO: 108157 - DNA, 3792 bp, Homo sapiens
  Payload ID: 1258
  Gene Symbol: APOBR
  Gene Name: apolipoprotein B receptor
  Uniprot ID: Q0VD83
  ENST ID: ENST00000564831
  CDS Start-End: 34-3327
agctttctggacacacagacagagacagacaggatggacttcctccggctatacctccctgggctgcaccaggccttgaggggggcactggattccctcggcacctttgtctcctacctcctgggagatgcagtccccactgtagagcgggaggcgcaggcggctgaggaactgggggtggtggcggtgggaaagacagggaagattgtagaggaggaagcccaggaggacctggagggccttagaggcagccaaaacgagggggctggaaggctgagagggcctggagatgacagaagacatgaagtggggagctcagctgtagaacagacctggggctggggagatggcagctcccatgggtcccaagcagagaggcaggacagtggggctggggagacagccaaggctgccaggtgccaggagccaagcgcccacttggaggccagaaagaaatccaaggcagggtctggggcttgccaagacaggagcggccaagcccaggagaggcaggagtcccatgagcaggaagtgaacagagaagagaggctgagaagctgggaacaggaggaggaggaggaagaggtcagggcaagagagccagggatggccagaggggcggagtcagagtggacctggcatggggagacggaggggaaggctggtgctgttgggccaaaggcggcaggggacaaccgggagatggagcagggggtcagggaggcagatgcaggggaaactgaggagcctggggccgaaggggctgggaaaggagaagaggtggtagtggtggagaaggcctgtgaaagcactagggcatgggggacgtggggcccaggggcagagcctgaggactggggaatcttaggcagagaggaggccaggacaaccccaggtagggaagaggccagggcaattttagatggggaggaagccaggacaatctcaggcggggaggaggctgagacagcctcaggcggggaggaggctgaaacagcctcaggcggggaggaggccgggacagcctcgggaggggaggaggccgggatagcctcaggcggggaggctgggacagcctcaggaggggaggaggccgggacagcctcaggaggggaggaggccgggacagcctcaggaggggacgaggcctggacaacctcaggcaaagaggaggctgacctgctgggagtcagacagacagaatatggagcagtcccaggagaaaggctcctagaggctactggaaaagtctgggtcctagaggaggagggggatgaggagagagaggctgaggtgagccctttccccaaacagccccaggtcctgggcactgaaagaacagaagaggctgctgagagccagaccgcagggagggaagctgtgggaggccaggaggcaggggagagctttgagggccaggtagacctgcgtggtaaggaggctgagatgaggcaggacttggggatcagggccgaccgggccaggatggaagagctggtacaggcagaggaggcccaggaggagagagggagcagcagggatccagtggctgagctgccctcagatggagaggctgaaggcactgccgacttggaggcaactccagaggccaggcctgaggaggagctcacaggggaggagagtgaggcggcccagactagctgtggcctactgggcgtggaatggggtggcctcacacacagcgtcaccaaaggccaaggacctgagctgatggggggcgcccagaccccaactaagcaacccgaggaaagggaggcaggggaggtggagctcatgggagttctggccctgagcaaagaggagcaggagaggagcctggaggcaggtcccaggcacgcggggtctgtaaagcctgaggcctccgaggccttcccaggagcctgggaaaaccgcacgagaaaggacatggagagaggaaatactcaggaggatgcggccgatggcgagcagcgggaggaggaggagactgcgggaggccagaccctggcggctgaggctgaaggagaccgagagtctgaactatcagaagtcccagaggcaggcggggaggggctgacaacccaggacgcgggatgtggaactgaggagggagaggcatctgtctcagagaaccaggagctggacggaagcacaggggcagacgcagggccttgcccgtcactgggagaggcctatgccagagaaactgaggatgaggaggcggaggctgacagaacatccagaagaggctggaggctgcaagcggtggctgtgggcctcccggaccgtgaggatgcacagactggctctgtggctgctgggattatggggggtgatgtggtcccacacatcagcgctgctggcgctggtgaagctttggaaggggtgcttgggcaaggctgggactcgaaagaaaaggaagaggcagcagcaggagagcatgcaggtgggcaagaatttggtctggagggctcagcagaggaagaggtgactggcagaggcagccaagtagaggcttttgagtccagggagggaggaccttggggagggcgggtagaggccgaggaatctgcaggcgcagaggacagctgtgggctggatcccgcgggctcccagacagcgagggcagaggggatgggagccatggtggaggctggggggcttctagaaaagtggacgctgttggaagaagaggctgttggatggcaggagagagaacagagggaagacagtgaggggcggtgtggggactaccaccctgagggagaggcaccaaggctccttgatgcagagggtctcatggtgaccgggggccggagggcagaggccaaggagactgagccagaaagcctggaacatgtcaggggccaggaggagcagccaacacaccaggcccctgcagaagctgcgccggagtcagtcggggaagccgagacggctgaggccatgggcagtgccagaggaggtgctgccaacagctggagcgaggccccgctccccgggtccctcctagacgtctctgtcccaaggagtcgcgtgcacctctcgagaagctcctcacagcgtcgctcccggccctcttttcgtcggactccggcctgggagcagcaggaggagcccccagcccccaaccctcctgaggaggagctgtcagctcctgagcagagacccctccagctggaggaacccctggagccaagccctctgaggcatgatgggaccccggtgccagccaggagaaggcccctgggacacgggtttggcctcgcgcaccctggcatgatgcaggagctgcaagcccgtctgggccggcctaagccccagtgactgagacccggtgctctgggagccaggccctgagtgggtgccagaaggcttgctccaatgccactgagccctgctccctctgccactgtggacacatcctctccaccctctgggcctcagtgtcttgatgtatcattcatggagcaggcaaaaccagacgtctgggaagaccgtgaacttaaggagtctgattctccgacacaggctggtggaccacctaccccactgagaccacctctcagggtgcctgccctggttcctccccagcctgagtcagctgtctggactgcaaggaggctgggcacgggggctcacgcctgtcaccccagagctttgggaggccaaggtgggaggatcgcttgagaccaggagttcgagaccagcctgggcagcatagcaagatccccatcttttaaaaacaaaataaaacaataaagactgcaaggaagactgagggaacagcga

SEQ ID NO: 108158 - DNA, 508 bp, Homo sapiens
  Payload ID: 1259
  Gene Symbol: APOC1
  Gene Name: apolipoprotein C-I
  ENST ID: ENST00000590334
  CDS Start-End: 24-275
cagagtgcccctccggcctcgccatgaggctcttcctgtcgctcccggtcctggtggtggttctgtcgatcgtcttggaaggcccagccccagcccaggggaccccagacgtctccagtgccttggataagctgaaggagtttggaaacacactggaggacaaggctcgggaactcatcagccgcatcaaacagagtgaactttctgccaagatgcgtgaagatgacatttcaccatgttgcccaggttggtctcgaactcctgacctcaagtgatcagcctacctcggcctcccaaagtgttgggattacaggcgtgagccaaatgcccagccaaggggagtggttttcagagacatttcagaaagtgaaggagaaactcaagattgactcatgaggacctgaagggtgacatcccaggaggggcctctgaaatttcccacaccccagcgcctgtgctgaggactccctccatgtggccccaggtgccaccaataaaaatcctacag

SEQ ID NO: 108159 - DNA, 689 bp, Homo sapiens
  Payload ID: 1259
  Gene Symbol: APOC1
  Gene Name: apolipoprotein C-I
  Uniprot ID: P02654
  ENST ID: ENST00000588750
  CDS Start-End: 326-577
tcaatcgatcacgaccctctcacgtgcacccacttagagttgtgagcccttaaaaggaacagggattgctcactcggggagctcggctcttgagacaggaatcttgcccattccccgaacgaataaaccccttccttaactcagcgtctgaggaattttgtctgcggctcctcctgctacattctgagtggggaaagggactaaggtggtctgaggaccccacagagtcaggaagattgagagcctgataaaggtcctgcgggcaggacaggacctcccaaccaagccctccagcaaggattcagagtgcccctccggcctcgccatgaggctcttcctgtcgctcccggtcctggtggtggttctgtcgatcgtcttggaaggcccagccccagcccaggggaccccagacgtctccagtgccttggataagctgaaggagtttggaaacacactggaggacaaggctcgggaactcatcagccgcatcaaacagagtgaactttctgccaagatgcgggagtggttttcagagacatttcagaaagtgaaggagaaactcaagattgactcatgaggacctgaagggtgacatcccaggaggggcctctgaaatttcccacaccccagcgcctgtgctgaggactccctccatgtggccccaggtgccaccaataaaaatcctacag

SEQ ID NO: 108160 - DNA, 213 bp, Homo sapiens
  Payload ID: 1259
  Gene Symbol: APOC1
  Gene Name: apolipoprotein C-I
  ENST ID: ENST00000589078
  CDS Start-End: 53-213
ctgatcccctgaacccctgcctctgcctccagagtgcccctccggcctcgccatgaggctcttcctgtcgctcccggtcctggtggtggttctgtcgatcgtcttggaaggcccagccccagcccaggggaccccagacgtctccagtgccttggataagctgaaggagtttggaaacacactggaggacaaggctcgggaactcatcagccg

SEQ ID NO: 108161 - DNA, 425 bp, Homo sapiens
  Payload ID: 1259
  Gene Symbol: APOC1
  Gene Name: apolipoprotein C-I
  ENST ID: ENST00000586638
  CDS Start-End: 24-302
cagagtgcccctccggcctcgccatgaggctcttcctgtcgctcccggtcctggtggtggttctgtcgatcgtcttggaaggcccagccccagcccaggggaccccagacgtctccagtgccttggataagctgaaggagtttggaaacacactggaggacaaggctcgggaactcatcagccgcatcaaacagagtgaactttctgccaagatgcggttagaacccttcccagggcacgggagagctgggggagtggttttcagagacatttcagaaagtgaaggagaaactcaagattgactcatgaggacctgaagggtgacatcccaggaggggcctctgaaatttcccacaccccagcgcctgtgctgaggactccctccatgtggccccaggtgccaccaataaaaatcctacagaaaa

SEQ ID NO: 108162 - DNA, 514 bp, Homo sapiens
  Payload ID: 1259
  Gene Symbol: APOC1
  Gene Name: apolipoprotein C-I
  ENST ID: ENST00000592176
  CDS Start-End: 24-143
cagagtgcccctccggcctcgccatgaggctcttcctgtcgctcccggtcctggtggtggttctgtcgatcgtcttggaaggttctcccaggctcagtcccgcaggcgccaaatctgcgcaggagagcactagcaaccgatgacgtattgaggcccacacctctgggattggctgtcctgcttcgacagccttgaaagtgggcccagccccagcccaggggaccccagacgtctccagtgccttggataagctgaaggagtttggaaacacactggaggacaaggctcgggaactcatcagccgcatcaaacagagtgaactttctgccaagatgcgggagtggttttcagagacatttcagaaagtgaaggagaaactcaagattgactcatgaggacctgaagggtgacatcccaggaggggcctctgaaatttcccacaccccagcgcctgtgctgaggactccctccatgtggccccaggtgccaccaataaaaatcctacagaaaattc

SEQ ID NO: 108163 - DNA, 562 bp, Homo sapiens
  Payload ID: 1259
  Gene Symbol: APOC1
  Gene Name: apolipoprotein C-I
  ENST ID: ENST00000592885
  CDS Start-End: 52-441
ctcccaaccaagccctccagcaaggattcagagtgcccctccggcctcgccatgaggctcttcctgtcgctcccggtcctggtggtggttctgtcgatcgtcttggaaggcccagccccagcccaggggaccccagacgtctccagtgccttggataagctgaaggagtttggaaacacactggaggacaaggctcgggaactcatcagccgcatcaaacagagtgaactttctgccaagatgcggttagaacccttcccagggcacgggagagctggggtgtgtttttgggtggagccctggcagatggtccaagatgaacagattgaaaaaaaaacaagtcctggagaggctgacaacatccctctggtcacacagctagatctcaagggagtggttttcagagacatttcagaaagtgaaggagaaactcaagattgactcatgaggacctgaagggtgacatcccaggaggggcctctgaaatttcccacaccccagcgcctgtgctgaggactccctccatgtggccccaggtgccaccaataaaaatcctacagaa

SEQ ID NO: 108164 - DNA, 273 bp, Homo sapiens
  Payload ID: 1259
  Gene Symbol: APOC1
  Gene Name: apolipoprotein C-I
  ENST ID: ENST00000589781
  CDS Start-End: 45-134
ccaagccctccagcaaggattcagagtgcccctccggcctcgccatgaggctcttcctgtcgctcccggtcctggtggtggttctgtcgatcgtcttggaagggagtggttttcagagacatttcagaaagtgaaggagaaactcaagattgactcatgaggacctgaagggtgacatcccaggaggggcctctgaaatttcccacaccccagcgcctgtgctgaggactccctccatgtggccccaggtgccaccaataaaaatcctacaga

SEQ ID NO: 108165 - DNA, 553 bp, Homo sapiens
  Payload ID: 1259
  Gene Symbol: APOC1
  Gene Name: apolipoprotein C-I
  Uniprot ID: P02654
  ENST ID: ENST00000588802
  CDS Start-End: 186-437
gagctcggctcttgagacaggaatcttgcccattccccgaacgaataaaccccttccttaactcagcgtctgaggaattttgtctgcggctcctcctgctacattctgagtggggaaagggactaaggtggtctgaggaccccacagagtcaggaagattgagagagtgcccctccggcctcgccatgaggctcttcctgtcgctcccggtcctggtggtggttctgtcgatcgtcttggaaggcccagccccagcccaggggaccccagacgtctccagtgccttggataagctgaaggagtttggaaacacactggaggacaaggctcgggaactcatcagccgcatcaaacagagtgaactttctgccaagatgcgggagtggttttcagagacatttcagaaagtgaaggagaaactcaagattgactcatgaggacctgaagggtgacatcccaggaggggcctctgaaatttcccacaccccagcgcctgtgctgaggactccctccatgtggccccaggtgccaccaataaaaatcctacagaaaa

SEQ ID NO: 108166 - DNA, 430 bp, Homo sapiens
  Payload ID: 1259
  Gene Symbol: APOC1
  Gene Name: apolipoprotein C-I
  ENST ID: ENST00000592535
  CDS Start-End: 200-430
aacgctcacgggacaggggcagaggagaaaaacgtgggtggacagagggaggcaggcggtcaggggaaggctcaggaggagggagatcaacatcaacctgccccgccccctccccagcctgataaaggtcctgcgggcaggacaggacctcccaaccaagccctccagcaaggattcagagtgcccctccggcctcgccatgaggctcttcctgtcgctcccggtcctggtggtggttctgtcgatcgtcttggaaggcccagccccagcccaggggaccccagacgtctccagtgccttggataagctgaaggagtttggaaacacactggaggacaaggctcgggaactcatcagccgcatcaaacagagtgaactttctgccaagatgcgggagtggttttcagagacatttcagaaagtgaaggag

SEQ ID NO: 108167 - DNA, 880 bp, Homo sapiens
  Payload ID: 1260
  Gene Symbol: APOC2
  Gene Name: apolipoprotein C-II
  ENST ID: ENST00000585786
  CDS Start-End: 194-412
agaatgttggaaagtgaggcccaagaagggggctgtgtccaagtccatgcatgggaaacttgactgggacaccgagctcacacagagcaggatctcagtcccccccaccagagtggggcgtgaccacaggaacagccgcctccagtcagcctgccacatgacaccccctcaatgttccaggtctctggacactatgggcacacgactcctcccagctctgtttcttgtcctcctggtattgggatttgaggtccaggggacccaacagccccagcaagatgagatgcctagcccgaccttcctcacccaggtgaaggaatctctctccagttactgggagtcagcaaagacagccgcccagaacctgtacgagaagacatacctgcccgctgtagatgagaaactcaggtagcacctgcccctggagaaatggggtctggcccataccaccgactgcatccaggacccagaagttcaggccccagcccctcctccctcagacccaggagtccaggcctcagcccctcctccctcagacccaggagtccaggcccccagcccgtcctccctcagacccaggagtccaggcccccagcccctcctccctcagacccaggagtccaggtccccagaccctcctccctcagacccaggagtccaggcccccagcccctcctccctctaaccatctgtgctttctccccagggacttgtacagcaaaagcacagcagccatgagcacttacacaggcatttttactgaccaagttctttctgtgctgaagggagaggagtaacagccagaccccccatcagtggacaaggggagagtcccctactcccctgatcccccaggttcagactgagctcccccttccca

SEQ ID NO: 108168 - DNA, 744 bp, Homo sapiens
  Payload ID: 1260
  Gene Symbol: APOC2
  Gene Name: apolipoprotein C-II
  Uniprot ID: P02655
  ENST ID: ENST00000590360
  CDS Start-End: 123-428
tcagatctcaccctctttctgccgtacttcctcatctcctacgtgtggatgatgatattgtgccctgtgcatgttcttcgtcaccaaaagtgcctctctcatagagcaggtctctggacactatgggcacacgactcctcccagctctgtttcttgtcctcctggtattgggatttgaggtccaggggacccaacagccccagcaagatgagatgcctagcccgaccttcctcacccaggtgaaggaatctctctccagttactgggagtcagcaaagacagccgcccagaacctgtacgagaagacatacctgcccgctgtagatgagaaactcagggacttgtacagcaaaagcacagcagccatgagcacttacacaggcatttttactgaccaagttctttctgtgctgaagggagaggagtaacagccagaccccccatcagtggacaaggggagagtcccctactcccctgatcccccaggttcagactgagctcccccttcccagtagctcttgcatcctcctcccaactctagcctgaattcttttcaataaaaaatacaattcaagttgcttctcatggatggcactgcttttctgaggactcaagggccaagatggaggggctgactcagtccagccaacatttaatgagcacctactttatgtatggagctctaacccatgggtccatgggaataaagcagtgaatagtaacaataaataatcgtaacagcaa

SEQ ID NO: 108169 - DNA, 447 bp, Homo sapiens
  Payload ID: 1260
  Gene Symbol: APOC2
  Gene Name: apolipoprotein C-II
  ENST ID: ENST00000591597
  CDS Start-End: 34-297
ggacagcctgccagagtctggtctctggacactatgggcacacgactcctcccagctctgtttcttgtcctcctggtattgggatttgaggtccaggggacccaacagccccagcaagatgagatgcctagcccgaccttcctcacccaggtgaaggaatctctctccagttactgggagtcagcaaagacagccgcccagaacctggacttgtacagcaaaagcacagcagccatgagcacttacacaggcatttttactgaccaagttctttctgtgctgaagggagaggagtaacagccagaccccccatcagtggacaaggggagagtcccctactcccctgatcccccaggttcagactgagctcccccttcccagtagctcttgcatcctcctcccaactctagcctgaattcttttcaataaaaaatacaattcaagttg

SEQ ID NO: 108170 - DNA, 444 bp, Homo sapiens
  Payload ID: 1260
  Gene Symbol: APOC2
  Gene Name: apolipoprotein C-II
  ENST ID: ENST00000592257
  CDS Start-End: 55-198
gtgcccgtccggagctggtgaggacagcctgccagagtctggtctctggacactatgggcacacgactcctcccagctctgtttcttgtcctcctggtattgggatttggtgaaggaatctctctccagttactgggagtcagcaaagacagccgcccagaacctgtacgagaagacatacctgcccgctgtagatgagaaactcagggacttgtacagcaaaagcacagcagccatgagcacttacacaggcatttttactgaccaagttctttctgtgctgaagggagaggagtaacagccagaccccccatcagtggacaaggggagagtcccctactcccctgatcccccaggttcagactgagctcccccttcccagtagctcttgcatcctcctcccaactctagcctgaattcttttcaataaaaaatacaattcaa

SEQ ID NO: 108171 - DNA, 550 bp, Homo sapiens
  Payload ID: 1261
  Gene Symbol: APOC3
  Gene Name: apolipoprotein C-III
  Uniprot ID: P02656
  ENST ID: ENST00000227667
  CDS Start-End: 63-362
aaccctcctgcctgtctgctcagttcatccctagaggcagctgctccaggaacagaggtgccatgcagccccgggtactccttgttgttgccctcctggcgctcctggcctctgcccgagcttcagaggccgaggatgcctcccttctcagcttcatgcagggttacatgaagcacgccaccaagaccgccaaggatgcactgagcagcgtgcaggagtcccaggtggcccagcaggccaggggctgggtgaccgatggcttcagttccctgaaagactactggagcaccgttaaggacaagttctctgagttctgggatttggaccctgaggtcagaccaacttcagccgtggctgcctgagacctcaataccccaagtccacctgcctatccatcctgcgagctccttgggtcctgcaatctccagggctgcccctgtaggttgcttaaaagggacagtattctcagtgctctcctaccccacctcatgcctggcccccctccaggcatgctggcctcccaataaagctggacaagaagctgctatga

SEQ ID NO: 108172 - DNA, 604 bp, Homo sapiens
  Payload ID: 1261
  Gene Symbol: APOC3
  Gene Name: apolipoprotein C-III
  ENST ID: ENST00000375345
  CDS Start-End: 63-416
ttcatccctagaggcagctgctccaggggccacgccacctccccagggaggggtccagaggcatggggacctggggtgcccctcacaggacacttccttgcaggaacagaggtgccatgcagccccgggtactccttgttgttgccctcctggcgctcctggcctctgcccgagcttcagaggccgaggatgcctcccttctcagcttcatgcagggttacatgaagcacgccaccaagaccgccaaggatgcactgagcagcgtgcaggagtcccaggtggcccagcaggccaggggctgggtgaccgatggcttcagttccctgaaagactactggagcaccgttaaggacaagttctctgagttctgggatttggaccctgaggtcagaccaacttcagccgtggctgcctgagacctcaataccccaagtccacctgcctatccatcctgcgagctccttgggtcctgcaatctccagggctgcccctgtaggttgcttaaaagggacagtattctcagtgctctcctaccccacctcatgcctggcccccctccaggcatgctggcctcccaataaagctggacaagaagctgctatga

SEQ ID NO: 108173 - DNA, 359 bp, Homo sapiens
  Payload ID: 1261
  Gene Symbol: APOC3
  Gene Name: apolipoprotein C-III
  ENST ID: ENST00000433777
  CDS Start-End: 195-359
ggctgcagggctggcgggacagcagcgtggactcagtctcctagggatttcccaactctcccgcccgcttgctgcatctggacaccctgcctcaggccctcatctccactggtcagcaggtgacctttgcccagcgccctgggtcctcagtgcctgctgccctggagatgatataaaacaggaacagaggtgccatgcagccccgggtactccttgttgttgccctcctggcgctcctggcctctgcccgagcttcagaggccgaggatgcctcccttctcagcttcatgcagggttacatgaagcacgccaccaagaccgccaaggatgcactgagcagcgtgcaggagtcccaggtg

SEQ ID NO: 108174 - DNA, 541 bp, Homo sapiens
  Payload ID: 1261
  Gene Symbol: APOC3
  Gene Name: apolipoprotein C-III
  ENST ID: ENST00000630701
  CDS Start-End: 1-354
atggggacctggggtgcccctcacaggacacttccttgcaggaacagaggtgccatgcagccccgggtactccttgttgttgccctcctggcgctcctggcctctgcccgagcttcagaggccgaggatgcctcccttctcagcttcatgcagggttacatgaagcacgccaccaagaccgccaaggatgcactgagcagcgtgcaggagtcccaggtggcccagcaggccaggggctgggtgaccgatggcttcagttccctgaaagactactggagcaccgttaaggacaagttctctgagttctgggatttggaccctgaggtcagaccaacttcagccgtggctgcctgagacctcaataccccaagtccacctgcctatccatcctgcgagctccttgggtcctgcaatctccagggctgcccctgtaggttgcttaaaagggacagtattctcagtgctctcctaccccacctcatgcctggcccccctccaggcatgctggcctcccaataaagctggacaagaagctgctatg

SEQ ID NO: 108175 - DNA, 348 bp, Homo sapiens
  Payload ID: 1262
  Gene Symbol: APOC4
  Gene Name: apolipoprotein C-IV
  ENST ID: ENST00000591600
  CDS Start-End: 5-226
agaaatgtccctcctcagaaacaggctccaggccctgcctgccctgtgcctctgcgtgctggtcctggcctgcattggggcatgccagccagaggcccaggaaggaaccctgagccccccaccaaagctaaagatgagtcgctggagcctggtgaggggcaggatgaaggagctgctggagacagtggtgaacaggaccagagacgggtggcaatggttctggtgagggtgtgctgggctgggtggtgggaggggactcctgggtctgagggaggaggggctggggcctggacccctgagtctcagggaggaggaaagggtgggagtggggctgtgacccctaggtct

SEQ ID NO: 108176 - DNA, 615 bp, Homo sapiens
  Payload ID: 1262
  Gene Symbol: APOC4
  Gene Name: apolipoprotein C-IV
  Uniprot ID: P55056
  ENST ID: ENST00000592954
  CDS Start-End: 41-424
gagttgagcacagagggacagaggcacggaacccccagaaatgtccctcctcagaaacaggctccaggccctgcctgccctgtgcctctgcgtgctggtcctggcctgcattggggcatgccagccagaggcccaggaaggaaccctgagccccccaccaaagctaaagatgagtcgctggagcctggtgaggggcaggatgaaggagctgctggagacagtggtgaacaggaccagagacgggtggcaatggttctggagcccgagcaccttccggggcttcatgcagacctactatgacgaccacctgagggacctgggtccgctcaccaaggcctggttcctcgaatccaaagacagcctcttgaagaagacccacagcctgtgccccaggcttgtctgtggggacaaggaccagggttaaaatgttcataaaagccaggtgtggttgtggcgggtgcctgtagtcccagctactcaggaggctgaggtaggatgatggcttgagcccaggagttcgagaccagcctgggcaacacagcgagatctcttgggggtaaaacaaaaagaaaaaaaaaagttcatacttctccaataaataaagtctcacctgtg

SEQ ID NO: 108177 - DNA, 1130 bp, Homo sapiens
  Payload ID: 1263
  Gene Symbol: APOD
  Gene Name: apolipoprotein D
  Uniprot ID: P05090
  ENST ID: ENST00000343267
  CDS Start-End: 363-932
tctctctcgcacacatacccacacacacacacacacacacacacgcgcgcgcgaaaacaatatctcatttcttcttcagggagcagctgtgaaggaaatcgggggaggaggatggacacaacatcccatctttgtgtttcgatacagactaagcttttaggccaaccctcctgactggatgggggcggcgggcgtggcatgcatgaaaagtaaacatcagagacctgaagaagcttataaaatagcttgggagaggccagtcaccaagacaggcatctcaaatcggctgattctgcatctggaaactgccttcatcttgaaagaaaagctccaggtcccttctccagccacccagccccaagatggtgatgctgctgctgctgctttccgcactggctggcctcttcggtgcggcagagggacaagcatttcatcttgggaagtgccccaatcctccggtgcaggagaattttgacgtgaataagtatctcggaagatggtacgaaattgagaagatcccaacaacctttgagaatggacgctgcatccaggccaactactcactaatggaaaacggaaagatcaaagtgttaaaccaggagttgagagctgatggaactgtgaatcaaatcgaaggtgaagccaccccagttaacctcacagagcctgccaagctggaagttaagttttcctggtttatgccatcggcaccgtactggatcctggccaccgactatgagaactatgccctcgtgtattcctgtacctgcatcatccaactttttcacgtggattttgcttggatcttggcaagaaaccctaatctccctccagaaacagtggactctctaaaaaatatcctgacttctaataacattgatgtcaagaaaatgacggtcacagaccaggtgaactgccccaagctctcgtaaccaggttctacagggaggctgcacccactccatgttacttctgcttcgctttcccctaccccccccccataaagacaaaccaatcaaccacgacaaaggaagttgacctgaacatgtaaccatgccctaccctgttaccttgctagctgcaaaataaacttgttgctgacctgctgtgctcgcagtagattccaagtt

SEQ ID NO: 108178 - DNA, 950 bp, Homo sapiens
  Payload ID: 1263
  Gene Symbol: APOD
  Gene Name: apolipoprotein D
  ENST ID: ENST00000458447
  CDS Start-End: 112-438
agaggccagtcaccaagacaggcatctcaaatcggctgattctgcatctggaaactgccttcatcttgaaagaaaagctccaggtcccttctccagccacccagccccaagatggtgatgctgctgctgctgctttccgcactggctggcctcttcggtgcggcagagggacaagcatttcatcttgggaagtgccccaatcctccggtgcaggagaattttgacgtgaataagacggagtctcactttgtcacccagggtggagtgcagcatcaccatcttggctcactgcaacctccgcctcccgggttcaagcaattctcctgcctcagcctcccaagtagctgggactacagtatctcggaagatggtacgaaattgagaagatcccaacaacctttgagaatggacgctgcatccaggccaactactcactaatggaaaacggaaagatcaaagtgttaaaccaggagttgagagctgatggaactgtgaatcaaatcgaaggtgaagccaccccagttaacctcacagagcctgccaagctggaagttaagttttcctggtttatgccatcggcaccgtactggatcctggccaccgactatgagaactatgccctcgtgtattcctgtacctgcatcatccaactttttcacgtggattttgcttggatcttggcaagaaaccctaatctccctccagaaacagtggactctctaaaaaatatcctgacttctaataacattgatgtcaagaaaatgacggtcacagaccaggtgaactgccccaagctctcgtaaccaggttctacagggaggctgcacccactccatgttacttctgcttcgctttcccctaccccccccccataaagacaaaccaatcaaccacgacaaaggaagttgacctgaacatgtaaccatgccctaccctgttaccttgctagc

SEQ ID NO: 108179 - DNA, 681 bp, Homo sapiens
  Payload ID: 1263
  Gene Symbol: APOD
  Gene Name: apolipoprotein D
  ENST ID: ENST00000453131
  CDS Start-End: 234-681
aagacaggcatctcaaatcggctgattctgcatctggaaactgccttcatcttgaaagaaaagtttaccaggaagtaacccgggcaaattcacctcgttggtatgaagagagtgtcagcagaggtcgcctccagaggaggtgctgtggagactgagcgcatagcacccttaaaatcctgggaccagggcttctccacggctccaggtcccttctccagccacccagccccaagatggtgatgctgctgctgctgctttccgcactggctggcctcttcggtgcggcagagggacaagcatttcatcttgggaagtgccccaatcctccggtgcaggagaattttgacgtgaataagtatctcggaagatggtacgaaattgagaagatcccaacaacctttgagaatggacgctgcatccaggccaactactcactaatggaaaacggaaagatcaaagtgttaaaccaggagttgagagctgatggaactgtgaatcaaatcgaaggtgaagccaccccagttaacctcacagagcctgccaagctggaagttaagttttcctggtttatgccatcggcaccgtactggatcctggccaccgactatgagaactatgccctcgtgtattcctgtacctgcatcatccaactttttcacgtggattttgcttggatcttgg

SEQ ID NO: 108180 - DNA, 782 bp, Homo sapiens
  Payload ID: 1263
  Gene Symbol: APOD
  Gene Name: apolipoprotein D
  ENST ID: ENST00000421243
  CDS Start-End: 137-782
aagacaggcatctcaaatcggctgattctgcatctggaaactgccttcatcttgaaagaaaagatggagtttttgctctgttgcccaagctagagtgcaatggtgtgatcttggcttactgcaacctctgcctcccatgttcaagcaattatcctgcatcagcctcccgagtagctgtgattacagctccaggtcccttctccagccacccagccccaagatggtgatgctgctgctgctgctttccgcactggctggcctcttcggtgcggcagagggacaagcatttcatcttgggaagtgccccaatcctccggtgcaggagaattttgacgtgaataagtatctcggaagatggtacgaaattgagaagatcccaacaacctttgagaatggacgctgcatccaggccaactactcactaatggaaaacggaaagatcaaagtgttaaaccaggagttgagagctgatggaactgtgaatcaaatcgaaggtgaagccaccccagttaacctcacagagcctgccaagctggaagttaagttttcctggtttatgccatcggcaccgtactggatcctggccaccgactatgagaactatgccctcgtgtattcctgtacctgcatcatccaactttttcacgtggattttgcttggatcttggcaagaaaccctaatctccctccagaaacagtggactctctaaaaaatatcctgacttctaataacattgatgtcaagaaaatgacggtcacagaccaggtgaactgccccaagc

SEQ ID NO: 108181 - DNA, 1208 bp, Homo sapiens
  Payload ID: 1264
  Gene Symbol: APOE
  Gene Name: apolipoprotein E
  Uniprot ID: P02649
  ENST ID: ENST00000252486
  CDS Start-End: 112-1065
agggggagccctataattggacaagtctgggatccttgagtcctactcagccccagcggaggtgaaggacgtccttccccaggagccgactggccaatcacaggcaggaagatgaaggttctgtgggctgcgttgctggtcacattcctggcaggatgccaggccaaggtggagcaagcggtggagacagagccggagcccgagctgcgccagcagaccgagtggcagagcggccagcgctgggaactggcactgggtcgcttttgggattacctgcgctgggtgcagacactgtctgagcaggtgcaggaggagctgctcagctcccaggtcacccaggaactgagggcgctgatggacgagaccatgaaggagttgaaggcctacaaatcggaactggaggaacaactgaccccggtggcggaggagacgcgggcacggctgtccaaggagctgcaggcggcgcaggcccggctgggcgcggacatggaggacgtgtgcggccgcctggtgcagtaccgcggcgaggtgcaggccatgctcggccagagcaccgaggagctgcgggtgcgcctcgcctcccacctgcgcaagctgcgtaagcggctcctccgcgatgccgatgacctgcagaagcgcctggcagtgtaccaggccggggcccgcgagggcgccgagcgcggcctcagcgccatccgcgagcgcctggggcccctggtggaacagggccgcgtgcgggccgccactgtgggctccctggccggccagccgctacaggagcgggcccaggcctggggcgagcggctgcgcgcgcggatggaggagatgggcagccggacccgcgaccgcctggacgaggtgaaggagcaggtggcggaggtgcgcgccaagctggaggagcaggcccagcagatacgcctgcaggccgaggccttccaggcccgcctcaagagctggttcgagcccctggtggaagacatgcagcgccagtgggccgggctggtggagaaggtgcaggctgccgtgggcaccagcgccgcccctgtgcccagcgacaatcactgaacgccgaagcctgcagccatgcgaccccacgccaccccgtgcctcctgcctccgcgcagcctgcagcgggagaccctgtccccgccccagccgtcctcctggggtggaccctagtttaataaagattcaccaagtttcacgca

SEQ ID NO: 108182 - DNA, 923 bp, Homo sapiens
  Payload ID: 1264
  Gene Symbol: APOE
  Gene Name: apolipoprotein E
  ENST ID: ENST00000425718
  CDS Start-End: 266-923
ccgggagaggaagatggaattttctatggaggccgacctggggatggggagataagagaagaccaggagggagttaaatagggaatgggttgggggcggcttggtaaatgtgctgggattaggctgttgcagataatgcaacaaggcttggaaggctaacctggggtgaggccgggttggggccgggctgggggtgggaggagtcctcactggcggttgattgacagtttctccttccccagactggccaatcacaggcaggaagatgaaggttctgtgggctgcgttgctggtcacattcctggcaggatgccaggccaaggtggagcaagcggtggagacagagccggagcccgagctgcgccagcagaccgagtggcagagcggccagcgctgggaactggcactgggtcgcttttgggattacctgcgctgggtgcagacactgtctgagcaggtgcaggaggagctgctcagctcccaggtcacccaggaactgagggcgctgatggacgagaccatgaaggagttgaaggcctacaaatcggaactggaggaacaactgaccccggtggcggaggagacgcgggcacggctgtccaaggagctgcaggcggcgcaggcccggctgggcgcggacatggaggacgtgtgcggccgcctggtgcagtaccgcggcgaggtgcaggccatgctcggccagagcaccgaggagctgcgggtgcgcctcgcctcccacctgcgcaagctgcgtaagcggctcctccgcgatgccgatgacctgcagaagcgcctggcagtgtaccaggccggggcccgcgagggcgccgagcgcggcctcagcgccatccgcgagcgcctggggcccctggtggaacagggccgcgtgcgggccgccactgtgggctccctggccggccagc

SEQ ID NO: 108183 - DNA, 737 bp, Homo sapiens
  Payload ID: 1264
  Gene Symbol: APOE
  Gene Name: apolipoprotein E
  ENST ID: ENST00000446996
  CDS Start-End: 90-737
gagtcctactcagccccagcggaggtgaaggacgtccttccccaggagccgtttctccttccccagactggccaatcacaggcaggaagatgaaggttctgtgggctgcgttgctggtcacattcctggcaggatgccaggccaaggtggagcaagcggtggagacagagccggagcccgagctgcgccagcagaccgagtggcagagcggccagcgctgggaactggcactgggtcgcttttgggattacctgcgctgggtgcagacactgtctgagcaggtgcaggaggagctgctcagctcccaggtcacccaggaactgagggcgctgatggacgagaccatgaaggagttgaaggcctacaaatcggaactggaggaacaactgaccccggtggcggaggagacgcgggcacggctgtccaaggagctgcaggcggcgcaggcccggctgggcgcggacatggaggacgtgtgcggccgcctggtgcagtaccgcggcgaggtgcaggccatgctcggccagagcaccgaggagctgcgggtgcgcctcgcctcccacctgcgcaagctgcgtaagcggctcctccgcgatgccgatgacctgcagaagcgcctggcagtgtaccaggccggggcccgcgagggcgccgagcgcggcctcagcgccatccgcgagcgcctggggcccctggtggaacagggccgcgtgcgggccgccactgtgggctccctg

SEQ ID NO: 108184 - DNA, 864 bp, Homo sapiens
  Payload ID: 1264
  Gene Symbol: APOE
  Gene Name: apolipoprotein E
  ENST ID: ENST00000434152
  CDS Start-End: 58-864
gaggtgaaggacgtccttccccaggagccggtgagaagcgcagtcgggggcacggggatgagctcaggggcctctagaaagagctgggaccctgggaacccctggcctccagactggccaatcacaggcaggaagatgaaggttctgtgggctgcgttgctggtcacattcctggcaggatgccaggccaaggtggagcaagcggtggagacagagccggagcccgagctgcgccagcagaccgagtggcagagcggccagcgctgggaactggcactgggtcgcttttgggattacctgcgctgggtgcagacactgtctgagcaggtgcaggaggagctgctcagctcccaggtcacccaggaactgagggcgctgatggacgagaccatgaaggagttgaaggcctacaaatcggaactggaggaacaactgaccccggtggcggaggagacgcgggcacggctgtccaaggagctgcaggcggcgcaggcccggctgggcgcggacatggaggacgtgtgcggccgcctggtgcagtaccgcggcgaggtgcaggccatgctcggccagagcaccgaggagctgcgggtgcgcctcgcctcccacctgcgcaagctgcgtaagcggctcctccgcgatgccgatgacctgcagaagcgcctggcagtgtaccaggccggggcccgcgagggcgccgagcgcggcctcagcgccatccgcgagcgcctggggcccctggtggaacagggccgcgtgcgggccgccactgtgggctccctggccggccagccgctacaggagcgggcccaggcctggggcgagcggctgcgcgcgcggatggaggagatgggcagccggacc

SEQ ID NO: 108185 - DNA, 1715 bp, Homo sapiens
  Payload ID: 1265
  Gene Symbol: APOF
  Gene Name: apolipoprotein F
  Uniprot ID: Q13790
  ENST ID: ENST00000398189
  CDS Start-End: 79-1059
cctttcctcatgggacacagaactaggcagaacaggatcaggaagcgatcaaacctaccaaggcagtctcacttctcaatgactggactgtgtgggtactctgctccagacatgcgtggcctcagactcatcatgataccagttgagctgctactttgctacctcctgctgcaccctgtggatgccacttcatatggaaagcagacaaatgtcttgatgcactttcccttgtccttggaatcccagacaccctcctcagaccccttgtcctgccaatttctgcacccaaagtcactgcctggtttcagccacatggcccctctacccaagttcttggtaagcctggctctaaggaatgccctggaggaagctggttgtcaggctgatgtttgggctctacagctacagctctaccgccagggtggtgtgaatgctacacaggtcctcatccagcatcttcgagggctccagaaaggcagaagcacagagaggaacgtgtcagtggaagccctggcctctgctctgcagctgttagccagggagcagcaaagcacaggaagggtcgggcgctccctcccgacagaggactgtgagaatgagaaggagcaagctgtgcacaatgtagtccagctgctgccaggagtgggaaccttctacaacctgggcacagctttgtattatgctactcaaaactgcctgggcaaggccagggaacgaggccgagatggggccatagatctgggatatgaccttctgatgaccatggctgggatgtcaggggggcctatgggtctagcgatcagtgctgcacttaaacctgcattaaggtctggggttcagcagttgatccagtattaccaagatcagaaagacgcaaacatctctcagccggagaccaccaaggagggtttgagggccatctcagatgtgagtgacttggaagaaacaactactctggcttctttcatatcagaagtagtaagttcagctccctactgggggtgggccataatcaagagctatgacttagatcctggggctgggagtcttgagatataaaagaatgtggtaaccacagaattaataactgtactaccctgacaagctatatacatgtcttcaaaattttaatctgatttatccaggaggaaggctgtacagtaaaacgtaagaacgtaaatgtttgggtgttgaagtcacagggtttggtttcgaatctaggctccacttgttagagcctcggtgatcactgaatagtaacttctttcttgaactaagatcagttttgaagtttctaaaggagatagaatgattttaacctcaatgagttgccctgtaaatttaaaatgatacaatgaatctaaaatgcttatcacagtactttcaataaatagctattagccaggtgcggtggctcacgcctgtaatcccagcactgtgagaggctgaggcgggatgatcacctgaggtcaggagttcaagatcagcctgggcaacatggcgaaaccccgtctctacaataaatacaaaaaattatcctggcggagttatgcacgcttgtagtcccaactacctgggaggctgaggcgggagaatcacctgagcctgggaggtcgaggctgcagcgagccgagatcgcgccgctgcattccagcctgggtgacagagcgagaccatgtctcaaaaaataaaaataaaaaaaaattgttttcatt

SEQ ID NO: 108186 - DNA, 1176 bp, Homo sapiens
  Payload ID: 1266
  Gene Symbol: APOH
  Gene Name: apolipoprotein H (beta-2-glycoprotein I)
  Uniprot ID: P02749
  ENST ID: ENST00000205948
  CDS Start-End: 39-1076
gaaaaccactttggtagtgccagtgtgactcatccacaatgatttctccagtgctcatcttgttctcgagttttctctgccatgttgctattgcaggacggacctgtcccaagccagatgatttaccattttccacagtggtcccgttaaaaacattctatgagccaggagaagagattacgtattcctgcaagccgggctatgtgtcccgaggagggatgagaaagtttatctgccctctcacaggactgtggcccatcaacactctgaaatgtacacccagagtatgtccttttgctggaatcttagaaaatggagccgtacgctatacgacttttgaatatcccaacacgatcagtttttcttgtaacactgggttttatctgaatggcgctgattctgccaagtgcactgaggaaggaaaatggagcccggagcttcctgtctgtgctcccatcatctgccctccaccatccatacctacgtttgcaacacttcgtgtttataagccatcagctggaaacaattccctctatcgggacacagcagtttttgaatgtttgccacaacatgcgatgtttggaaatgatacaattacctgcacgacacatggaaattggactaaattaccagaatgcagggaagtaaaatgcccattcccatcaagaccagacaatggatttgtgaactatcctgcaaaaccaacactttattacaaggataaagccacatttggctgccatgatggatattctctggatggcccggaagaaatagaatgtaccaaactgggaaactggtctgccatgccaagttgtaaagcatcttgtaaagtacctgtgaaaaaagccactgtggtgtaccaaggagagagagtaaagattcaggaaaaatttaagaatggaatgctacatggtgataaagtttctttcttctgcaaaaataaggaaaagaagtgtagctatacagaggatgctcagtgtatagatggcactatcgaagtccccaaatgcttcaaggaacacagttctctggctttttggaaaactgatgcatccgatgtaaagccatgctaaggtggttttcagattccacacaaaatgtcacacttgtttcttgttcatccaaggaacctaattgaaatttaaaaataaagctactgaatttattgccgca

SEQ ID NO: 108187 - DNA, 407 bp, Homo sapiens
  Payload ID: 1266
  Gene Symbol: APOH
  Gene Name: apolipoprotein H (beta-2-glycoprotein I)
  ENST ID: ENST00000585162
  CDS Start-End: 1-313
acaacatgcgatgtttggaaatgatacaattacctgcacgacacatggaaattggactaaattaccagaatgcagggaagtaaaatgcccattcccatcaagaccagacaatggatttgtgaactatcctgcaaaaccaacactttattacaaggataaagccacatttggctgccatgatggatattctctggatggcccggaagaaatagaatgtaccaaactgggaaactggtctgccatgccaagttgtaaagaacacagttctctggctttttggaaaactgatgcatccgatgtaaagccatgctaaggtggttttcagattccacacaaaatgtcacacttgtttcttgttcatccaaggaacctaattgaaatttaaaaataaagctactgaatttatt

SEQ ID NO: 108188 - DNA, 748 bp, Homo sapiens
  Payload ID: 1266
  Gene Symbol: APOH
  Gene Name: apolipoprotein H (beta-2-glycoprotein I)
  ENST ID: ENST00000581797
  CDS Start-End: 148-748
agtagagacggggtttcaccgtgttagccagcctgtcccaagccagatgatttaccattttccacagtggtcccgttaaaaacattctatgagccaggagaagagattacgtattcctgcaagccgggctatgtgtcccgaggagggatgagaaagtttatctgccctctcacaggactgtggcccatcaacactctgaaatgtacacccagagtatgtccttttgctggaatcttagaaaatggagccgtacgctatacgacttttgaatatcccaacacgatcagtttttcttgtaacactgggttttatctgaatggcgctgattctgccaagtgcactgaggaaggaaaatggagcccggagcttcctgtctgtgctcccatcatctgccctccaccatccatacctacgtttgcaacacttcgtgtttataagccatcagctggaaacaattccctctatcgggacacagcagtttttgaatgtttgccacaacatgcgatgtttggaaatgatacaattacctgcacgacacatggaaattggactaaattaccagaatgcagggaagtaaaatgcccattcccatcaagaccagacaatggatttgtgaactatcctgcaaaaccaacactttattacaaggataaagccacatttggctgccatgatggatattctctggatggcccggaagaaatagaatgtaccaaactgggaaactggtctgccatgccaagttgta

SEQ ID NO: 108189 - DNA, 707 bp, Homo sapiens
  Payload ID: 1266
  Gene Symbol: APOH
  Gene Name: apolipoprotein H (beta-2-glycoprotein I)
  ENST ID: ENST00000577982
  CDS Start-End: 164-707
ggagtctcgctttgtcactcaggctggagtgaagtggcatgatcttggttcactgcaaccactgcctcccaggttcaagcaatcctcctgcctcagcctccggagtagctgggattacagcagacgaaaaccactttggtagtgccagtgtgactcatccacaatgatttctccagtgctcatcttgttctcgagttttctctgccatgttgctattgcaggacggacctgtcccaagccagatgatttaccattttccacagtggtcccgttaaaaacattctatgagccaggagaagagattacgtattcctgcaagccgggctatgtgtcccgaggagggatgagaaagtttatctgccctctcacaggactgtggcccatcaacactctgaaatgtacacccagagtatgtccttttgctggaatcttagaaaatggagccgtacgctatacgacttttgaatatcccaacacgatcagtttttcttgtaacactgggttttatctgaatggcgctgattctgccaagtgcactgaggaaggaaaatggagcccggagcttcctgtctgtgctcccatcatctgccctccaccatccatacctacgtttgcaacacttcgtgtttataagccatcagctggaaacaattccctctatcgggacacagcagtttttgaatgtttgccacaacatgcgatgtttg

SEQ ID NO: 108190 - DNA, 4724 bp, Homo sapiens
  Payload ID: 1267
  Gene Symbol: APOLD1
  Gene Name: apolipoprotein L domain containing 1
  Uniprot ID: Q96LR9
  ENST ID: ENST00000326765
  CDS Start-End: 71-910
cgggggtgcgcggggcggtcagcgatctgcagcttcgcggggacagagatgtaacccaactcgttcacggatgttccgcgcgccgtgtcaccggctgcgggccaggggtactcggaaggcgcgggcaggagcctggcgaggatgcaccttcccctgccttggaaagggaatggagaggccggcggcccgggagccgcatgggcccgacgcgctgcggcgcttccagggactgctgctggaccgccgaggccggctgcacggccaggtgctgcgcctgcgcgaggtggcccggcgcctggagcgcctgcgcaggcgctccctcgtagccaacgtggccggcagctcgctgagcgcaacgggcgccctcgccgccatcgtggggctctcgctcagcccggtcaccctggggacctcgctgctggtgtcggccgtggggctgggggtggccacagccggaggggccgtcaccatcacgtccgatctctcgctgatcttctgcaactcccgggagctgcggagggtgcaggagatcgcggccacctgccaggaccagatgcgagagatcctgagctgcctcgagtttttctgccgctggcagggctgcggggaccgccagctgctgcagtgcgggaggaacgcctccatcgccctgtacaattctgtctacttcatcgtcttctttggctcacgtggcttcctcatccccaggcgggcggagggggacaccaaggttagccaggccgtgctgaaggccaagattcagaaactggccgagagcctggagtcctgcaccggggctctggacgaactcagcgagcagctggagtctcgggttcagctctgcaccaagtccagtcgtggccacgacctcaagatctctgctgaccagcgtgcagggctgtttttctgagaacatcctttccccctaatgaccgaggccagcaaatcatcctcatgggatgctccagaatttgtagctcccttaggaaaacaccaagctgggttaggagccgaaggcaaaggatgagaaaaactgtttttgaagtgggcaggtccccaaagcccttcttttcccatcactgtgacatctgcctgggcttgagtgctacggacttttcagtcttcctagtggaaaaatgtgacccaaaaactctttttcctttatcaaaaactttctgtctaaacacagctgggcaggcactcctgttttaaagttatttcggggtccctgaccctgccctggtggcttggcctgagactggagagagtgccatcctctgggtcctctccaagtcctactagtctttgaagtcctcaaaatgtgcgtgaggaaggcgtttgcctctattccagaatttctgatacaaagaactccagaatccagagcaaatcagcccttctctgaacgttgtaggatggttcagaacccagagaggaccctggtgctgatatctcctcctcttccctttcccctcagcttacttactcccagatgcggcctgggtatgaagtaggcctttcctgagtggctcccaatccagtcctccaagtactcagaggggaagcccgtgaagccgtcatctaagtcctgctccctcacatgaagctgagggccagatagatggagcgactgccaacttcatttcccgacatcattgtgttcagaagagagtgatgggttttgagttagacagtcctgggcttgagacaggctttgtcactactgtgtgagtgtagccacctaatctctctgagactgtgtaaaacaaagatgataaaatctcaccctgttgtgagatattaaatgagccaaagtgcctagcatgatggtgctggctcatatagtgtagtccctggaatggcaaattaacatcacccaggaacttgttagaaaggcaaattcttggacacaaccctcctgatttatggaatcagaaactctggctgtggggcccagcaacctgagtttaaacaatttctctgggtggttctgcggcacactaaggtttgaaaatcactgcaacaaatgctaacttctaatccccttgatgagctttcacgaagtctcacggcttctctagggactccatggtcttcagagtcgttcacagatgaccaaggacagactgtgtcccagaagccaaaatgagagagagagagagagagcacgcgtacgtgcaccctggggcagtgtctcaccgtatgaacaagggatgtaacactaaaagcccattagggggcagtgtttcccgcctgttgtagaaactggtacagaaaggaatatgaagttcctgaaactgacctttgtctattattaccttctctgaaaagtgccagtccatgtattttttatttattttaagtttgtaatttaatttttaattattgtttagtgtttgcatttaattttatttaatcaccacatttagaaaataataagagcaagtttctaaatgggagactgctgaggctctttgcaagagatgagattaagtttgagtttctaaggcagggcatgagctggaaatagcattgctttccttgattgtctctctccttcagggagattctttttctctagtgttttaagtgatcctttgaagtaagtgtggagagtcttgaatggcaagaccaggagctgagtttaagcttgtaatggaagcttgcattgtgggatatataactgaggaagcatatttatcctgaaggtattttgccagaaggtatcacttgacctggaaaaggaatctatttagttcaggaaagataaaaagtttagaggtatgtgaaggaagcacttagaacttgcaagcctgatgtcctatcaagttatgtcttctgggtgacagacaaaatcgcttgtcttatggtggtgatgtgttgcattttcactttggggtctgtaagaaactgtcagtgaaaatatgtacaattccttcaatttccattcttaacaactgtaatgttgaaaaataagttgaaaagtctttgggaccatacatgcaaaaacggtgcctctgttacttaattatttaatattctataaatgtacccaatctgtccgcacccttcccagtgatggggcagtatgtctgaggaagtataatttcagtactggggtcggggagaggaggtgatgtttctacatttttattttttctataaattgcaattggtctgtatgctggtttattttgaaatttatattggtttcttttcaagctggtgtcatctcctagactgtttcacccagatgctagcattttttttttttttttgagacagagtctcactctgtcacctaggctggagttgcagtggtttgatctcggctcactgcaacctccgactcctgggttcaagcaattcttctgcctcagcctcctgagtagctgggattacagatgtgcaccagcacacccggctaattttttgtatttttagtagagacagggtttcgccatgttggccaggctggtcttgaactcctggccttatgtgatccgcccaccttggcttcccaaagtgctgggattacaggcatgagccacctcgcctggccagatgctagcattttagatcaaacaattcattttagatgaattgttttgtttcacaatcattttaaatcattttagaatgtacttcacattattagttgtgttatggcataaaggtacaaccattccctaactccatcttttattaatgcttaagtttaaattatattcttccaatgcctaagctattccctagaattaaactgggcacttttggaagcagcaacagtaacagcagcagcaaacttttcctctcatattttgggtgtatcaaaagttctagacttttgaagttatgatttcagtggcccactttatttctaaggaagagtgtctactttggaacgatactttgcacatagtaggaactcaagaaatacatttgaataattataattaactgtttagctatcttaatgagaatttgttgacaacaaaagatcatccatcgccttatgtgtgagtaagattggagcctctatcaagatttagtcaagttcagttagattgattctagaaacaaatatttatttctttcttttacggggatgtgaataaggcttttccttaaggccttcattctttaaacaaacaggttgaaatggtatgttgtaaaagagaagacgggagagaggtatttagatgataagtgtacttcacaaaaatgccaaagtttgaaaaataggtatgtttgttctaaatgtttaagtgcttctctgttaggttctggggcttgcaatcatttgaattgttctgtttcacaataaaggagattcactgggttctgcattttcaggattcaatagaactgctccattaaaaaaataatccttagcaagcattcgaatcctaactgctttgatgcacttgccctcgggcacctgtcatttccaatatggtaggtgtcaaagtcaaaagtatttactgggagaaaaaagagaggagtggttgtagaagtctccctaaatcagacatgtcaagcaatcagccaacgtggtgtatttctcattcaatattttagtgtgaattgagacactgagataaagacatcgtgcagagataaatggggatacagttaaatgtagcaactcttgagttcattttttcccactgtagcaaaattaatgctttctctttattgaaataaattgctcattcctcaaa

SEQ ID NO: 108191 - DNA, 4646 bp, Homo sapiens
  Payload ID: 1267
  Gene Symbol: APOLD1
  Gene Name: apolipoprotein L domain containing 1
  Uniprot ID: Q96LR9
  ENST ID: ENST00000356591
  CDS Start-End: 86-832
gcagccattggttctctggaactataaagcacactcatccagaaacagcctcagattttactttcctggaggcagacagaagtgaatgggaatggagaggccggcggcccgggagccgcatgggcccgacgcgctgcggcgcttccagggactgctgctggaccgccgaggccggctgcacggccaggtgctgcgcctgcgcgaggtggcccggcgcctggagcgcctgcgcaggcgctccctcgtagccaacgtggccggcagctcgctgagcgcaacgggcgccctcgccgccatcgtggggctctcgctcagcccggtcaccctggggacctcgctgctggtgtcggccgtggggctgggggtggccacagccggaggggccgtcaccatcacgtccgatctctcgctgatcttctgcaactcccgggagctgcggagggtgcaggagatcgcggccacctgccaggaccagatgcgagagatcctgagctgcctcgagtttttctgccgctggcagggctgcggggaccgccagctgctgcagtgcgggaggaacgcctccatcgccctgtacaattctgtctacttcatcgtcttctttggctcacgtggcttcctcatccccaggcgggcggagggggacaccaaggttagccaggccgtgctgaaggccaagattcagaaactggccgagagcctggagtcctgcaccggggctctggacgaactcagcgagcagctggagtctcgggttcagctctgcaccaagtccagtcgtggccacgacctcaagatctctgctgaccagcgtgcagggctgtttttctgagaacatcctttccccctaatgaccgaggccagcaaatcatcctcatgggatgctccagaatttgtagctcccttaggaaaacaccaagctgggttaggagccgaaggcaaaggatgagaaaaactgtttttgaagtgggcaggtccccaaagcccttcttttcccatcactgtgacatctgcctgggcttgagtgctacggacttttcagtcttcctagtggaaaaatgtgacccaaaaactctttttcctttatcaaaaactttctgtctaaacacagctgggcaggcactcctgttttaaagttatttcggggtccctgaccctgccctggtggcttggcctgagactggagagagtgccatcctctgggtcctctccaagtcctactagtctttgaagtcctcaaaatgtgcgtgaggaaggcgtttgcctctattccagaatttctgatacaaagaactccagaatccagagcaaatcagcccttctctgaacgttgtaggatggttcagaacccagagaggaccctggtgctgatatctcctcctcttccctttcccctcagcttacttactcccagatgcggcctgggtatgaagtaggcctttcctgagtggctcccaatccagtcctccaagtactcagaggggaagcccgtgaagccgtcatctaagtcctgctccctcacatgaagctgagggccagatagatggagcgactgccaacttcatttcccgacatcattgtgttcagaagagagtgatgggttttgagttagacagtcctgggcttgagacaggctttgtcactactgtgtgagtgtagccacctaatctctctgagactgtgtaaaacaaagatgataaaatctcaccctgttgtgagatattaaatgagccaaagtgcctagcatgatggtgctggctcatatagtgtagtccctggaatggcaaattaacatcacccaggaacttgttagaaaggcaaattcttggacacaaccctcctgatttatggaatcagaaactctggctgtggggcccagcaacctgagtttaaacaatttctctgggtggttctgcggcacactaaggtttgaaaatcactgcaacaaatgctaacttctaatccccttgatgagctttcacgaagtctcacggcttctctagggactccatggtcttcagagtcgttcacagatgaccaaggacagactgtgtcccagaagccaaaatgagagagagagagagagagcacgcgtacgtgcaccctggggcagtgtctcaccgtatgaacaagggatgtaacactaaaagcccattagggggcagtgtttcccgcctgttgtagaaactggtacagaaaggaatatgaagttcctgaaactgacctttgtctattattaccttctctgaaaagtgccagtccatgtattttttatttattttaagtttgtaatttaatttttaattattgtttagtgtttgcatttaattttatttaatcaccacatttagaaaataataagagcaagtttctaaatgggagactgctgaggctctttgcaagagatgagattaagtttgagtttctaaggcagggcatgagctggaaatagcattgctttccttgattgtctctctccttcagggagattctttttctctagtgttttaagtgatcctttgaagtaagtgtggagagtcttgaatggcaagaccaggagctgagtttaagcttgtaatggaagcttgcattgtgggatatataactgaggaagcatatttatcctgaaggtattttgccagaaggtatcacttgacctggaaaaggaatctatttagttcaggaaagataaaaagtttagaggtatgtgaaggaagcacttagaacttgcaagcctgatgtcctatcaagttatgtcttctgggtgacagacaaaatcgcttgtcttatggtggtgatgtgttgcattttcactttggggtctgtaagaaactgtcagtgaaaatatgtacaattccttcaatttccattcttaacaactgtaatgttgaaaaataagttgaaaagtctttgggaccatacatgcaaaaacggtgcctctgttacttaattatttaatattctataaatgtacccaatctgtccgcacccttcccagtgatggggcagtatgtctgaggaagtataatttcagtactggggtcggggagaggaggtgatgtttctacatttttattttttctataaattgcaattggtctgtatgctggtttattttgaaatttatattggtttcttttcaagctggtgtcatctcctagactgtttcacccagatgctagcattttttttttttttttgagacagagtctcactctgtcacctaggctggagttgcagtggtttgatctcggctcactgcaacctccgactcctgggttcaagcaattcttctgcctcagcctcctgagtagctgggattacagatgtgcaccagcacacccggctaattttttgtatttttagtagagacagggtttcgccatgttggccaggctggtcttgaactcctggccttatgtgatccgcccaccttggcttcccaaagtgctgggattacaggcatgagccacctcgcctggccagatgctagcattttagatcaaacaattcattttagatgaattgttttgtttcacaatcattttaaatcattttagaatgtacttcacattattagttgtgttatggcataaaggtacaaccattccctaactccatcttttattaatgcttaagtttaaattatattcttccaatgcctaagctattccctagaattaaactgggcacttttggaagcagcaacagtaacagcagcagcaaacttttcctctcatattttgggtgtatcaaaagttctagacttttgaagttatgatttcagtggcccactttatttctaaggaagagtgtctactttggaacgatactttgcacatagtaggaactcaagaaatacatttgaataattataattaactgtttagctatcttaatgagaatttgttgacaacaaaagatcatccatcgccttatgtgtgagtaagattggagcctctatcaagatttagtcaagttcagttagattgattctagaaacaaatatttatttctttcttttacggggatgtgaataaggcttttccttaaggccttcattctttaaacaaacaggttgaaatggtatgttgtaaaagagaagacgggagagaggtatttagatgataagtgtacttcacaaaaatgccaaagtttgaaaaataggtatgtttgttctaaatgtttaagtgcttctctgttaggttctggggcttgcaatcatttgaattgttctgtttcacaataaaggagattcactgggttctgcattttcaggattcaatagaactgctccattaaaaaaataatccttagcaagcattcgaatcctaactgctttgatgcacttgccctcgggcacctgtcatttccaatatggtaggtgtcaaagtcaaaagtatttactgggagaaaaaagagaggagtggttgtagaagtctccctaaatcagacatgtcaagcaatcagccaacgtggtgtatttctcattcaatattttagtgtgaattgagacactgagataaagacatcgtgcagagataaatggggatacagttaaatgtagcaactcttgagttcattttttcccactgtagcaaaattaatgctttctctttattgaaataaattgctcattcctcaaa

SEQ ID NO: 108192 - DNA, 574 bp, Homo sapiens
  Payload ID: 1267
  Gene Symbol: APOLD1
  Gene Name: apolipoprotein L domain containing 1
  ENST ID: ENST00000540583
  CDS Start-End: 85-207
agtgtgcaggcaggcgggggtgcgcggggcggtcagcgatctgcagcttcgcggggacagagatgtaacccaactcgttcacggatgttccgcgcgccgtgtcaccggctgcgggccaggggtactcggaaggcgcgggcaggagcctggcgaggatgcaccttcccctgccttggaaagagcgtttttgcgggaggaatatgttaaaacaaactcaagatacgaaatgagacttttgaagtgcctttgatttctggcctacgcgcccatattcactgggccccacctgcctagcggacgggtgcaatccccggcaagcccgcagggggcgcgcagagcacgtcgtccggggagaactaaaactacatttcccagcatcccgcgcgccgcagacccacttccggagacctcacacaagatggcggcacccgaggaacacgattctccgaccgaagcgtcccagccgattgtggaagaggaggaaactaaaacatttaaagacctgggtgtgacagatgtgttgtgtgaagcttgtgaccagttgggatggacaaaacccaccaagatccagatt

SEQ ID NO: 108193 - DNA, 2375 bp, Homo sapiens
  Payload ID: 1267
  Gene Symbol: APOLD1
  Gene Name: apolipoprotein L domain containing 1
  ENST ID: ENST00000534843
  CDS Start-End: 73-195
ggcgggggtgcgcggggcggtcagcgatctgcagcttcgcggggacagagatgtaacccaactcgttcacggatgttccgcgcgccgtgtcaccggctgcgggccaggggtactcggaaggcgcgggcaggagcctggcgaggatgcaccttcccctgccttggaaagagcgtttttgcgggaggaatatgttaaaacaaactcaagatacgaaatgagacttttgaagtgcctttgatttctggtgacggacaccagattgcccccaacttcccatcctcaggaataaaactgcaacgagcaccctgcgcagtgtgagacccaagtgacaggccacaggagggcactcgctggccatggggcatgcaacatacagctctgaatttgctgctttccagaatagccttagtagcttcacagtcttgcctacgcgcccatattcactgggccccacctgcctagcggacgggtgcaatccccggcaagcccgcagggggcgcgcagagcacgtcgtccggggagaactaaaactacatttcccagcatcccgcgcgccgcagacccacttccggagacctcacacaagatggcggcacccgaggaacacgattctccgaccgaagcgtcccagccgattgtggaagaggaggaaactaaaacatttaaagacctgggtgtgacagatgtgttgtgtgaagcttgtgaccagttgggatggacaaaacccaccaagatccagattgaagctattcctttggccttacaaggtcgtgatatcattgggcttgcagaaactggctctggaaagacaggcgcctttgctttgcccattctaaacgcactgctggagaccccgcagcgtttgtttgccctagttcttaccccgactcgggagctggcctttcagatctcagagcagtttgaagccctggggtcctctattggagtgcagagtgctgtgattgtaggtggaattgattcaatgtctcaatctttggcccttgcaaaaaaaccacatataataatagcaactcctggtcgactgattgaccacttggaaaatacgaaaggtttcaacttgagagctctcaaatacttggtcatggatgaagccgaccgaatactgaatatggattttgagacagaggttgacaagatcctcaaagtgattcctcgagatcggaaaacattcctcttctctgccaccatgaccaagaaggttcaaaaacttcagcgagcagctctgaagaatcctgtgaaatgtgccgtttcctctaaataccagacagttgaaaaattacagcaatattatatttttattccctctaaattcaaggatacctacctggtttatattctaaatgaattggctggaaactcctttatgatattctgcagcacctgtaataatacccagagaacagctttgctactgcgaaatcttggcttcactgccatccccctccatggacaaatgagtcagagtaagcgcctaggatcccttaataagtttaaggccaaggcccgttccattcttctagcaactgacgttgccagccgaggtttggacatacctcatgtagatgtggttgtcaactttgacattcctacccattccaaggattacatccatcgagtaggtcgaacagctagagctgggcgctccggaaaggctattacttttgtcacacagtatgatgtggaactcttccagcgcatagaacacttaattgggaagaaactaccaggttttccaacacaggatgatgaggttatgatgctgacagaacgcgtcgctgaagcccaaaggtttgcccgaatggagttaagggagcatggagaaaagaagaaacgctcgcgagaggatgctggagataatgatgacacagagggtgctattggtgtcaggaacaaggtggctggaggaaaaatgaagaagcggaaaggccgttaatcacttttatgaaggctcgagttctgctgttctgtaaaagagaattggagaatgaaacctgctccaacagagatcatgagactgaaattggtcagaattgtgtccagaatgtgctcagctaattcagtattcttccccattctgggttggagtttactgcagagtaattcttacagtgctgatgtcaagactgttactgttcttcgactttgattccttgctcatgacatgagtagggtgtgctcttctgtcacttcacacagaccttttgccttttttagctgcaagtcaaggactaggttgatgatgcccatgacctgtaattgtaaagaagcttggacatctgcaaatgatatttaaaccatcttggcttgtgctttattcaaactaatgtgaaacaataaatttaaatattattttt

SEQ ID NO: 108194 - DNA, 3000 bp, Homo sapiens
  Payload ID: 1268
  Gene Symbol: APOL1
  Gene Name: apolipoprotein L, 1
  Uniprot ID: O14791
  ENST ID: ENST00000319136
  CDS Start-End: 268-1512
actttccctttcgaattcctcggtatatcttggggactggaggacctgtctggttattatacagacgcataactggaggtgggatccacacagctcagaacagctggatcttgctcagtctctgccaggggaagattccttgacttctggggtgatggagaagaaacaggctgtgctgtgtccctaatgggaaacgtggctgagacaggggagtgagaagggtgcgttgcagaatggtgcctgtggcatgatgccagctttgcaatcatgagattcaaaagccacactgtggaattgaggaggccctgcagcgacatggagggagctgctttgctgagagtctctgtcctctgcatctggatgagtgcacttttccttggtgtgggagtgagggcagaggaagctggagcgagggtgcaacaaaacgttccaagtgggacagatactggagatcctcaaagtaagcccctcggtgactgggctgctggcaccatggacccagagagcagtatctttattgaggatgccattaagtatttcaaggaaaaagtgagcacacagaatctgctactcctgctgactgataatgaggcctggaacggattcgtggctgctgctgaactgcccaggaatgaggcagatgagctccgtaaagctctggacaaccttgcaagacaaatgatcatgaaagacaaaaactggcacgataaaggccagcagtacagaaactggtttctgaaagagtttcctcggttgaaaagtgagcttgaggataacataagaaggctccgtgcccttgcagatggggttcagaaggtccacaaaggcaccaccatcgccaatgtggtgtctggctctctcagcatttcctctggcatcctgaccctcgtcggcatgggtctggcacccttcacagagggaggcagccttgtactcttggaacctgggatggagttgggaatcacagccgctttgaccgggattaccagcagtaccatggactacggaaagaagtggtggacacaagcccaagcccacgacctggtcatcaaaagccttgacaaattgaaggaggtgagggagtttttgggtgagaacatatccaactttctttccttagctggcaatacttaccaactcacacgaggcattgggaaggacatccgtgccctcagacgagccagagccaatcttcagtcagtaccgcatgcctcagcctcacgcccccgggtcactgagccaatctcagctgaaagcggtgaacaggtggagagggttaatgaacccagcatcctggaaatgagcagaggagtcaagctcacggatgtggcccctgtaagcttctttcttgtgctggatgtagtctacctcgtgtacgaatcaaagcacttacatgagggggcaaagtcagagacagctgaggagctgaagaaggtggctcaggagctggaggagaagctaaacattctcaacaataattataagattctgcaggcggaccaagaactgtgaccacagggcagggcagccaccaggagagatatgcctggcaggggccaggacaaaatgcaaacttttttttttttctgagacagagtcttgctctgtcgccaagttggagtgcaatggtgcgatctcagctcactgcaagctctgcctcccgtgttcaagcgattctcctgccttggcctcccaagtagctgggactacaggcgcctaccaccatgcccagctaatttttgtatttttaatagagatggggtttcaccatgttggccaggatggtctcgatctcctgacctcttgatctgcccaccttggcctcccaaagtgctgggattacaggcgtgagccatcgcttttgacccaaatgcaaacattttattagggggataaagagggtgaggtaaagtttatggaactgagtgttagggactttggcatttccatagctgagcacagcaggggaggggttaatgcagatggcagtgcagcaaggagaaggcaggaacattggagcctgcaataagggaaaaatgggaactggagagtgtggggaatgggaagaagcagtttactttagactaaagaatatattggggggccgggtgtagtggctcatgcctgtaatccgagcactttgggaggccaaggcgggcggatcacgaggtcaggagatcgagaccatcctggctaacacagtgaaaccccgtctctactaaaaatacaaaaaattagccgggcatggtggcgggcgcctgtagttccagctaactgggcggctgaggcaggagaatggcgtgaacctgggaggtggagcttgcagtgagccgagatatcgccactgcactccagcctgggtgacagagcgagactccatctcaaaaaaaaaaaaaaaaagaatatattgacggaagaatagagaggaggcttgaaggaaccagcaatgagaaggccaggaaaagaaagagctgaaaatggagaaagcccaagagttagaacagttggatacaggagaagaaacagcggctccactacagacccagccccaggttcaatgtcctccgaagaatgaagtctttccctggtgatggtcccctgccctgtctttccagcatccactctcccttgtcctcctgggggcatatctcagtcaggcagcggcttcctgatgatggtcattggggtggttgtcatgtgatgggtcccctccaggttactaaagggtgcatgtcccctgcttgaacactgaagggcaggtggtgggccatggccatggtccccagctgaggagcaggtgtccctgagaacccaaacttcccagagagtatgtgagaaccaaccaatgaaaacagtcccatcgctcttacccggtaagtaaacagtcagaaaattagcatgaaagcagtttagcattgggaggaagctcagatctctagagctgtcttgtcgccgcccaggattgacctgtgtgtaagtcccaataaactcacctactca

SEQ ID NO: 108195 - DNA, 2918 bp, Homo sapiens
  Payload ID: 1268
  Gene Symbol: APOL1
  Gene Name: apolipoprotein L, 1
  Uniprot ID: O14791
  ENST ID: ENST00000397278
  CDS Start-End: 230-1426
tggactgaaggtggaggggagcgtgtttgctgtgcttggtcatgagctgctgggaagttgtgactttcactttccctttcgaattcctcggtatatcttggggactggaggacctgtctggttattatacagacgcataactggaggtgggatccacacagctcagaacagctggatcttgctcagtctctgccaggggaagattccttggaggaggccctgcagcgacatggagggagctgctttgctgagagtctctgtcctctgcatctggatgagtgcacttttccttggtgtgggagtgagggcagaggaagctggagcgagggtgcaacaaaacgttccaagtgggacagatactggagatcctcaaagtaagcccctcggtgactgggctgctggcaccatggacccagagagcagtatctttattgaggatgccattaagtatttcaaggaaaaagtgagcacacagaatctgctactcctgctgactgataatgaggcctggaacggattcgtggctgctgctgaactgcccaggaatgaggcagatgagctccgtaaagctctggacaaccttgcaagacaaatgatcatgaaagacaaaaactggcacgataaaggccagcagtacagaaactggtttctgaaagagtttcctcggttgaaaagtgagcttgaggataacataagaaggctccgtgcccttgcagatggggttcagaaggtccacaaaggcaccaccatcgccaatgtggtgtctggctctctcagcatttcctctggcatcctgaccctcgtcggcatgggtctggcacccttcacagagggaggcagccttgtactcttggaacctgggatggagttgggaatcacagccgctttgaccgggattaccagcagtaccatggactacggaaagaagtggtggacacaagcccaagcccacgacctggtcatcaaaagccttgacaaattgaaggaggtgagggagtttttgggtgagaacatatccaactttctttccttagctggcaatacttaccaactcacacgaggcattgggaaggacatccgtgccctcagacgagccagagccaatcttcagtcagtaccgcatgcctcagcctcacgcccccgggtcactgagccaatctcagctgaaagcggtgaacaggtggagagggttaatgaacccagcatcctggaaatgagcagaggagtcaagctcacggatgtggcccctgtaagcttctttcttgtgctggatgtagtctacctcgtgtacgaatcaaagcacttacatgagggggcaaagtcagagacagctgaggagctgaagaaggtggctcaggagctggaggagaagctaaacattctcaacaataattataagattctgcaggcggaccaagaactgtgaccacagggcagggcagccaccaggagagatatgcctggcaggggccaggacaaaatgcaaacttttttttttttctgagacagagtcttgctctgtcgccaagttggagtgcaatggtgcgatctcagctcactgcaagctctgcctcccgtgttcaagcgattctcctgccttggcctcccaagtagctgggactacaggcgcctaccaccatgcccagctaatttttgtatttttaatagagatggggtttcaccatgttggccaggatggtctcgatctcctgacctcttgatctgcccaccttggcctcccaaagtgctgggattacaggcgtgagccatcgcttttgacccaaatgcaaacattttattagggggataaagagggtgaggtaaagtttatggaactgagtgttagggactttggcatttccatagctgagcacagcaggggaggggttaatgcagatggcagtgcagcaaggagaaggcaggaacattggagcctgcaataagggaaaaatgggaactggagagtgtggggaatgggaagaagcagtttactttagactaaagaatatattggggggccgggtgtagtggctcatgcctgtaatccgagcactttgggaggccaaggcgggcggatcacgaggtcaggagatcgagaccatcctggctaacacagtgaaaccccgtctctactaaaaatacaaaaaattagccgggcatggtggcgggcgcctgtagttccagctaactgggcggctgaggcaggagaatggcgtgaacctgggaggtggagcttgcagtgagccgagatatcgccactgcactccagcctgggtgacagagcgagactccatctcaaaaaaaaaaaaaaaaagaatatattgacggaagaatagagaggaggcttgaaggaaccagcaatgagaaggccaggaaaagaaagagctgaaaatggagaaagcccaagagttagaacagttggatacaggagaagaaacagcggctccactacagacccagccccaggttcaatgtcctccgaagaatgaagtctttccctggtgatggtcccctgccctgtctttccagcatccactctcccttgtcctcctgggggcatatctcagtcaggcagcggcttcctgatgatggtcattggggtggttgtcatgtgatgggtcccctccaggttactaaagggtgcatgtcccctgcttgaacactgaagggcaggtggtgggccatggccatggtccccagctgaggagcaggtgtccctgagaacccaaacttcccagagagtatgtgagaaccaaccaatgaaaacagtcccatcgctcttacccggtaagtaaacagtcagaaaattagcatgaaagcagtttagcattgggaggaagctcagatctctagagctgtcttgtcgccgcccaggattgacctgtgtgtaagtcccaataaactcacctactcatcaa

SEQ ID NO: 108196 - DNA, 1564 bp, Homo sapiens
  Payload ID: 1268
  Gene Symbol: APOL1
  Gene Name: apolipoprotein L, 1
  Uniprot ID: O14791
  ENST ID: ENST00000397279
  CDS Start-End: 99-1295
gacgcataactggaggtgggatccacacagctcagaacagctggatcttgctcagtctctgccaggggaagattccttggaggaggccctgcagcgacatggagggagctgctttgctgagagtctctgtcctctgcatctggatgagtgcacttttccttggtgtgggagtgagggcagaggaagctggagcgagggtgcaacaaaacgttccaagtgggacagatactggagatcctcaaagtaagcccctcggtgactgggctgctggcaccatggacccagagagcagtatctttattgaggatgccattaagtatttcaaggaaaaagtgagcacacagaatctgctactcctgctgactgataatgaggcctggaacggattcgtggctgctgctgaactgcccaggaatgaggcagatgagctccgtaaagctctggacaaccttgcaagacaaatgatcatgaaagacaaaaactggcacgataaaggccagcagtacagaaactggtttctgaaagagtttcctcggttgaaaagtgagcttgaggataacataagaaggctccgtgcccttgcagatggggttcagaaggtccacaaaggcaccaccatcgccaatgtggtgtctggctctctcagcatttcctctggcatcctgaccctcgtcggcatgggtctggcacccttcacagagggaggcagccttgtactcttggaacctgggatggagttgggaatcacagccgctttgaccgggattaccagcagtaccatggactacggaaagaagtggtggacacaagcccaagcccacgacctggtcatcaaaagccttgacaaattgaaggaggtgagggagtttttgggtgagaacatatccaactttctttccttagctggcaatacttaccaactcacacgaggcattgggaaggacatccgtgccctcagacgagccagagccaatcttcagtcagtaccgcatgcctcagcctcacgcccccgggtcactgagccaatctcagctgaaagcggtgaacaggtggagagggttaatgaacccagcatcctggaaatgagcagaggagtcaagctcacggatgtggcccctgtaagcttctttcttgtgctggatgtagtctacctcgtgtacgaatcaaagcacttacatgagggggcaaagtcagagacagctgaggagctgaagaaggtggctcaggagctggaggagaagctaaacattctcaacaataattataagattctgcaggcggaccaagaactgtgaccacagggcagggcagccaccaggagagatatgcctggcaggggccaggacaaaatgcaaacttttttttttttagcgagactccatctcaaaaaaaaaaaaaaaaagaatatattgacggaagaatagagaggaggcttgaaggaaccagcaatgagaaggccaggaaaagaaagagctgaaaatggagaaagcccaagagttagaacagttggatacaggagaagaaacagcggctccactacagacccagccccaggttcaatgtc

SEQ ID NO: 108197 - DNA, 2808 bp, Homo sapiens
  Payload ID: 1268
  Gene Symbol: APOL1
  Gene Name: apolipoprotein L, 1
  Uniprot ID: O14791
  ENST ID: ENST00000426053
  CDS Start-End: 169-1311
gactttcactttccctttcgaattcctcggtatatcttggggactggaggacctgtctggttattatacagacgcataactggaggtgggatccacacagctcagaacagctggatcttgctcagtctctgccaggggaagattccttggaggaggccctgcagcgacatggagggagctgctttgctgagagtctctgtcctctgcatctgggtgcaacaaaacgttccaagtgggacagatactggagatcctcaaagtaagcccctcggtgactgggctgctggcaccatggacccagagagcagtatctttattgaggatgccattaagtatttcaaggaaaaagtgagcacacagaatctgctactcctgctgactgataatgaggcctggaacggattcgtggctgctgctgaactgcccaggaatgaggcagatgagctccgtaaagctctggacaaccttgcaagacaaatgatcatgaaagacaaaaactggcacgataaaggccagcagtacagaaactggtttctgaaagagtttcctcggttgaaaagtgagcttgaggataacataagaaggctccgtgcccttgcagatggggttcagaaggtccacaaaggcaccaccatcgccaatgtggtgtctggctctctcagcatttcctctggcatcctgaccctcgtcggcatgggtctggcacccttcacagagggaggcagccttgtactcttggaacctgggatggagttgggaatcacagccgctttgaccgggattaccagcagtaccatggactacggaaagaagtggtggacacaagcccaagcccacgacctggtcatcaaaagccttgacaaattgaaggaggtgagggagtttttgggtgagaacatatccaactttctttccttagctggcaatacttaccaactcacacgaggcattgggaaggacatccgtgccctcagacgagccagagccaatcttcagtcagtaccgcatgcctcagcctcacgcccccgggtcactgagccaatctcagctgaaagcggtgaacaggtggagagggttaatgaacccagcatcctggaaatgagcagaggagtcaagctcacggatgtggcccctgtaagcttctttcttgtgctggatgtagtctacctcgtgtacgaatcaaagcacttacatgagggggcaaagtcagagacagctgaggagctgaagaaggtggctcaggagctggaggagaagctaaacattctcaacaataattataagattctgcaggcggaccaagaactgtgaccacagggcagggcagccaccaggagagatatgcctggcaggggccaggacaaaatgcaaacttttttttttttctgagacagagtcttgctctgtcgccaagttggagtgcaatggtgcgatctcagctcactgcaagctctgcctcccgtgttcaagcgattctcctgccttggcctcccaagtagctgggactacaggcgcctaccaccatgcccagctaatttttgtatttttaatagagatggggtttcaccatgttggccaggatggtctcgatctcctgacctcttgatctgcccaccttggcctcccaaagtgctgggattacaggcgtgagccatcgcttttgacccaaatgcaaacattttattagggggataaagagggtgaggtaaagtttatggaactgagtgttagggactttggcatttccatagctgagcacagcaggggaggggttaatgcagatggcagtgcagcaaggagaaggcaggaacattggagcctgcaataagggaaaaatgggaactggagagtgtggggaatgggaagaagcagtttactttagactaaagaatatattggggggccgggtgtagtggctcatgcctgtaatccgagcactttgggaggccaaggcgggcggatcacgaggtcaggagatcgagaccatcctggctaacacagtgaaaccccgtctctactaaaaatacaaaaaattagccgggcatggtggcgggcgcctgtagttccagctaactgggcggctgaggcaggagaatggcgtgaacctgggaggtggagcttgcagtgagccgagatatcgccactgcactccagcctgggtgacagagcgagactccatctcaaaaaaaaaaaaaaaaagaatatattgacggaagaatagagaggaggcttgaaggaaccagcaatgagaaggccaggaaaagaaagagctgaaaatggagaaagcccaagagttagaacagttggatacaggagaagaaacagcggctccactacagacccagccccaggttcaatgtcctccgaagaatgaagtctttccctggtgatggtcccctgccctgtctttccagcatccactctcccttgtcctcctgggggcatatctcagtcaggcagcggcttcctgatgatggtcattggggtggttgtcatgtgatgggtcccctccaggttactaaagggtgcatgtcccctgcttgaacactgaagggcaggtggtgggccatggccatggtccccagctgaggagcaggtgtccctgagaacccaaacttcccagagagtatgtgagaaccaaccaatgaaaacagtcccatcgctcttacccggtaagtaaacagtcagaaaattagcatgaaagcagtttagcattgggaggaagctcagatctctagagctgtcttgtcgccgcccaggattgacctgtgtgtaagtcccaataaactcacctactcatcaagctgg

SEQ ID NO: 108198 - DNA, 561 bp, Homo sapiens
  Payload ID: 1268
  Gene Symbol: APOL1
  Gene Name: apolipoprotein L, 1
  ENST ID: ENST00000422471
  CDS Start-End: 109-534
ttattatacagacgcataactggaggtgggatccacacagctcagaacagctggatcttgctcagtctctgccaggggaagattccttggaggaggccctgcagcgacatggagggagctgctttgctgagagtctctgtcctctgcatctggatgagtgcacttttccttggtgtgggagtgagggcagaggaagctggagcgagggtgcaacaaaacgttccaagtgggacagatactggagatcctcaaagtaagcccctcggtgactgggctgctggcaccatggacccaggcccagctgggtccagaggtgacagtggagagccgtgtaccctgagaccagcctgcagaggacagaggcaacatggaggtgcctcaaggatcagtgctgagggtcccgcccccatgccccgtcgaagaaccccctccactgcccatctgagagtgcccaagaccagcaggaggaatctcctttgcatgagagcagtatctttattgaggatgccattaagtatttcaaggaaaaagtgagcacacagaatctgctactcctgctga

SEQ ID NO: 108199 - DNA, 624 bp, Homo sapiens
  Payload ID: 1268
  Gene Symbol: APOL1
  Gene Name: apolipoprotein L, 1
  ENST ID: ENST00000427990
  CDS Start-End: 146-624
attatacagacgcataactggaggtgggatccacacagctcagaacagctggatcttgctcagtctctgccaggggaagattccttggaggagcacactgtctcaacccctcttttcctgctcaaggaggaggccctgcagcgacatggagggagctgctttgctgagagtctctgtcctctgcatctggatgagtgcacttttccttggtgtgggagtgagggcagaggaagctggagcgagggtgcaacaaaacgttccaagtgggacagatactggagatcctcaaagtaagcccctcggtgactgggctgctggcaccatggacccagagagcagtatctttattgaggatgccattaagtatttcaaggaaaaagtgagcacacagaatctgctactcctgctgactgataatgaggcctggaacggattcgtggctgctgctgaactgcccaggaatgaggcagatgagctccgtaaagctctggacaaccttgcaagacaaatgatcatgaaagacaaaaactggcacgataaaggccagcagtacagaaactggtttctgaaagagtttcctcggttgaaaagtgagcttgaggataacataagaaggctccgtgc

SEQ ID NO: 108200 - DNA, 541 bp, Homo sapiens
  Payload ID: 1268
  Gene Symbol: APOL1
  Gene Name: apolipoprotein L, 1
  ENST ID: ENST00000433768
  CDS Start-End: 118-541
atccacacagctcagaacagctggatcttgctcagtctctgccaggggaagattccttggaggagcacactgtctcaacccctcttttcctgctcaaggaggaggccctgcagcgacatggagggagctgctttgctgagagtctctgtcctctgcatctggatgagtgcacttttccttggtgtgggagtgagggcagaggaagctggagcgagggtgcaacaaaacgttccaagtgggacagatactggagatcctcaaagtaagcccctcggtgactgggctgctggcaccatggacccaggcccagctgggtccagaggtgacagtggagagccgtgtaccctgagaccagcctgcagaggacagaggcaacatggaggtgcctcaaggatcagtgctgagggtcccgcccccatgccccgtcgaagaaccccctccactgcccatctgagagtgcccaagaccagcaggaggaatctcctttgcatgagagcagtatctttattgaggatgccattaagtatttcaaggaaaaagt

SEQ ID NO: 108201 - DNA, 550 bp, Homo sapiens
  Payload ID: 1268
  Gene Symbol: APOL1
  Gene Name: apolipoprotein L, 1
  ENST ID: ENST00000431184
  CDS Start-End: 76-504
cacacagctcagaacagctggatcttgctcagtctctgccaggggaagattccttggaggaggccctgcagcgacatggagggagctgctttgctgagagtctctgtcctctgcatctggatgagtgcacttttccttggtgtgggagtgagggcagaggaagctggagcgagggtgcaacaaaacgttccaagtgggacagatactggagatcctcaaagtaagcccctcggtgactgggctgctggcaccatggacccaggcccagctgggtccagaggtgacagtggagagccgtgtaccctgagaccagcctgcagaggacagaggcaacatggaggtgcctcaaggatcagtgctgagggtcccgcccccatgccccgtcgaagaaccccctccactgcccatctgagagtgcccaagaccagcaggaggaatctcctttgcatggtagttgtactcaatgctgtggagtttgagacattatttttaaactttaaatagccccacagagagcagtatctttattgaggatgccattaagtatttc

SEQ ID NO: 108202 - DNA, 531 bp, Homo sapiens
  Payload ID: 1268
  Gene Symbol: APOL1
  Gene Name: apolipoprotein L, 1
  ENST ID: ENST00000439680
  CDS Start-End: 107-478
attatacagacgcataactggaggtgggatccacacagctcagaacagctggatcttgctcagtctctgccaggggaagattccttggaggaggccctgcagcgacatggagggagctgctttgctgagagtctctgtcctctgcatctgggtgcaacaaaacgttccaagtgggacagatactggagatcctcaaagtaagcccctcggtgactgggctgctggcaccatggacccaggcccagctgggtccagaggtgacagtggagagccgtgtaccctgagaccagcctgcagaggacagaggcaacatggaggtgcctcaaggatcagtgctgagggtcccgcccccatgccccgtcgaagaaccccctccactgcccatctgagagtgcccaagaccagcaggaggaatctcctttgcatgagagcagtatctttattgaggatgccattaagtatttcaaggaaaaagtgagcacacagaatctgctactcctgctgactgataatgaggcctggaacggattc

SEQ ID NO: 108203 - DNA, 566 bp, Homo sapiens
  Payload ID: 1268
  Gene Symbol: APOL1
  Gene Name: apolipoprotein L, 1
  ENST ID: ENST00000438034
  CDS Start-End: 213-566
attatacagacgcataactggaggtgggatccacacagctcagaacagctggatcttgctcagtctctgccaggggaagattccttgacttctggggtgatggagaagaaacaggctgtgctgtgtccctaatgggaaacgtggctgagacaggggagtgagaagggtgcgttgcagaatggtgcctgtggcatgatgccagctttgcaatcatgagattcaaaagccacactgtggaattgaggagcacactgtctcaacccctcttttcctgctcaaggaggaggccctgcagcgacatggagggagctgctttgctgagagtctctgtcctctgcatctggatgagtgcacttttccttggtgtgggagtgagggcagaggaagctggagcgagggtgcaacaaaacgttccaagtgggacagatactggagatcctcaaagtaagcccctcggtgactgggctgctggcaccatggacccagagagcagtatctttattgaggatgccattaagtatttcaaggaaaaagtgagcacacagaatctgctactcctgctgact

SEQ ID NO: 108204 - DNA, 2901 bp, Homo sapiens
  Payload ID: 1268
  Gene Symbol: APOL1
  Gene Name: apolipoprotein L, 1
  Uniprot ID: O14791
  ENST ID: ENST00000422706
  CDS Start-End: 208-1404
gactttcactttccctttcgaattcctcggtatatcttggggactggaggacctgtctggttattatacagacgcataactggaggtgggatccacacagctcagaacagctggatcttgctcagtctctgccaggggaagattccttggaggagcacactgtctcaacccctcttttcctgctcaaggaggaggccctgcagcgacatggagggagctgctttgctgagagtctctgtcctctgcatctggatgagtgcacttttccttggtgtgggagtgagggcagaggaagctggagcgagggtgcaacaaaacgttccaagtgggacagatactggagatcctcaaagtaagcccctcggtgactgggctgctggcaccatggacccagagagcagtatctttattgaggatgccattaagtatttcaaggaaaaagtgagcacacagaatctgctactcctgctgactgataatgaggcctggaacggattcgtggctgctgctgaactgcccaggaatgaggcagatgagctccgtaaagctctggacaaccttgcaagacaaatgatcatgaaagacaaaaactggcacgataaaggccagcagtacagaaactggtttctgaaagagtttcctcggttgaaaagtgagcttgaggataacataagaaggctccgtgcccttgcagatggggttcagaaggtccacaaaggcaccaccatcgccaatgtggtgtctggctctctcagcatttcctctggcatcctgaccctcgtcggcatgggtctggcacccttcacagagggaggcagccttgtactcttggaacctgggatggagttgggaatcacagccgctttgaccgggattaccagcagtaccatggactacggaaagaagtggtggacacaagcccaagcccacgacctggtcatcaaaagccttgacaaattgaaggaggtgagggagtttttgggtgagaacatatccaactttctttccttagctggcaatacttaccaactcacacgaggcattgggaaggacatccgtgccctcagacgagccagagccaatcttcagtcagtaccgcatgcctcagcctcacgcccccgggtcactgagccaatctcagctgaaagcggtgaacaggtggagagggttaatgaacccagcatcctggaaatgagcagaggagtcaagctcacggatgtggcccctgtaagcttctttcttgtgctggatgtagtctacctcgtgtacgaatcaaagcacttacatgagggggcaaagtcagagacagctgaggagctgaagaaggtggctcaggagctggaggagaagctaaacattctcaacaataattataagattctgcaggcggaccaagaactgtgaccacagggcagggcagccaccaggagagatatgcctggcaggggccaggacaaaatgcaaacttttttttttttctgagacagagtcttgctctgtcgccaagttggagtgcaatggtgcgatctcagctcactgcaagctctgcctcccgtgttcaagcgattctcctgccttggcctcccaagtagctgggactacaggcgcctaccaccatgcccagctaatttttgtatttttaatagagatggggtttcaccatgttggccaggatggtctcgatctcctgacctcttgatctgcccaccttggcctcccaaagtgctgggattacaggcgtgagccatcgcttttgacccaaatgcaaacattttattagggggataaagagggtgaggtaaagtttatggaactgagtgttagggactttggcatttccatagctgagcacagcaggggaggggttaatgcagatggcagtgcagcaaggagaaggcaggaacattggagcctgcaataagggaaaaatgggaactggagagtgtggggaatgggaagaagcagtttactttagactaaagaatatattggggggccgggtgtagtggctcatgcctgtaatccgagcactttgggaggccaaggcgggcggatcacgaggtcaggagatcgagaccatcctggctaacacagtgaaaccccgtctctactaaaaatacaaaaaattagccgggcatggtggcgggcgcctgtagttccagctaactgggcggctgaggcaggagaatggcgtgaacctgggaggtggagcttgcagtgagccgagatatcgccactgcactccagcctgggtgacagagcgagactccatctcaaaaaaaaaaaaaaaaagaatatattgacggaagaatagagaggaggcttgaaggaaccagcaatgagaaggccaggaaaagaaagagctgaaaatggagaaagcccaagagttagaacagttggatacaggagaagaaacagcggctccactacagacccagccccaggttcaatgtcctccgaagaatgaagtctttccctggtgatggtcccctgccctgtctttccagcatccactctcccttgtcctcctgggggcatatctcagtcaggcagcggcttcctgatgatggtcattggggtggttgtcatgtgatgggtcccctccaggttactaaagggtgcatgtcccctgcttgaacactgaagggcaggtggtgggccatggccatggtccccagctgaggagcaggtgtccctgagaacccaaacttcccagagagtatgtgagaaccaaccaatgaaaacagtcccatcgctcttacccggtaagtaaacagtcagaaaattagcatgaaagcagtttagcattgggaggaagctcagatctctagagctgtcttgtcgccgcccaggattgacctgtgtgtaagtcccaataaactcacctactcatcaagctgg

SEQ ID NO: 108205 - DNA, 2685 bp, Homo sapiens
  Payload ID: 1269
  Gene Symbol: APOL2
  Gene Name: apolipoprotein L, 2
  Uniprot ID: Q9BQE5
  ENST ID: ENST00000249066
  CDS Start-End: 478-1491
atcagacagtaaaacaggggcagagcctggaattgcactgaggcttgagtctgacttctctcccccacctgctgtgcccttaaactgcagagatcggggcgggggttggggggcaagcggctcagatgggttcaaaaaactccccaggctcaactctggttctgactgcctgagacatgggcagctgacacagcagaccttgaatcctgaggatgtgaggcagggtatatctgggaggccggaggacgtgtctggttattacacagatgcacagctggacgtgggatccacacagctcagaacagttggatcttgctcagtctctgtcagaggaagatcccttggacaagaggaccctgccttggtgtgagagtgagggaagaggaagctggaacgagggttaaggaaaaccttccagtctggacagtgactggagagctccaaggaaagcccctcggtaacccagccgctggcaccatgaacccagagagcagtatctttattgaggattaccttaagtatttccaggaccaagtgagcagagagaatctgctacaactgctgactgatgatgaagcctggaatggattcgtggctgctgctgaactgcccagggatgaggcagatgagctccgtaaagctctgaacaagcttgcaagtcacatggtcatgaaggacaaaaaccgccacgataaagaccagcagcacaggcagtggtttttgaaagagtttcctcggttgaaaagggagcttgaggatcacataaggaagctccgtgcccttgcagaggaggttgagcaggtccacagaggcaccaccattgccaatgtggtgtccaactctgttggcactacctctggcatcctgaccctcctcggcctgggtctggcacccttcacagaaggaatcagttttgtgctcttggacactggcatgggtctgggagcagcagctgctgtggctgggattacctgcagtgtggtagaactagtaaacaaattgcgggcacgagcccaagcccgcaacttggaccaaagcggcaccaatgtagcaaaggtgatgaaggagtttgtgggtgggaacacacccaatgttcttaccttagttgacaattggtaccaagtcacacaagggattgggaggaacatccgtgccatcagacgagccagagccaaccctcagttaggagcgtatgccccacccccgcatgtcattgggcgaatctcagctgaaggcggtgaacaggttgagagggttgttgaaggccccgcccaggcaatgagcagaggaaccatgatcgtgggtgcagccactggaggcatcttgcttctgctggatgtggtcagccttgcatatgagtcaaagcacttgcttgagggggcaaagtcagagtcagctgaggagctgaagaagcgggctcaggagctggaggggaagctcaactttctcaccaagatccatgagatgctgcagccaggccaagaccaatgaccccagagcagtgcagccaccagggcagaaatgccgggcacaggccaggacaaaatgcagacttttttttttttttttttttttttttgagatggagtctcgctctatcgcccaggatggagtgcagtggctcaatctcggctcactgcaaactccgcctcccgggttcacaccattctccggcctcagtctcccgagtagctgggactacaggcacctgccaccacgcccggctaatttttttgtattttcactggagacggggtttcactgtgttagccacgatggtctccatctcctgacctcgtgatctgcccacctcggcctcccaaagtgctgggattacaggcgtgagccaccgcgcctggccaaaatgcagacattttattagggggataaggagggcaaggtaaagcttatggaactgagtgttagtgactttggcatttgtgtagctgagcacagcaagggaggggttaatgcagatggcaagtgcaccaaggagaaggcaggaacactggagcctgcaataagggaggagagaggactggagagtgtggggaatgggaagaagtagtttactttggactaaagaatatattgggcgaagaatagagggggagcttgcaggaaccagcaatgagaaggccaggaaaagaaagagctgaaaatggagaaaaccagagttagaactgttggatacaggagaagaaacagcagctccactaccgacccccccccaggtttgatgtccttccaagaataaagtctttccctggtgatggtctctcgctctgtctttccagcatccactctcccttgtccttctgggggtgtatcacagtcagccagtggcttcttcatgatggtggttggggtggttgtcatgtgacgggtcccctccaggttactaaagggtgcatgtcccctgcttgaaccctgagaggcaggtggtaggccatggccacaatccccagctgaggagcaggtgtccctgagaacccaaacttcccagagagtatctgagaaccaaccaatgaaaacagtcccatcgctcttagccggtaagtaaacagtcagaagattagcatgaaagcagtttagcattgggaggaagcacagatctctagagctgtcctgtcgctgcccaggattgacctgtgtgtaagtcccaataaactcacctactcacca

SEQ ID NO: 108206 - DNA, 2551 bp, Homo sapiens
  Payload ID: 1269
  Gene Symbol: APOL2
  Gene Name: apolipoprotein L, 2
  Uniprot ID: Q9BQE5
  ENST ID: ENST00000358502
  CDS Start-End: 337-1350
gtgctggggagcagcgtgtttactgtgcttggtcatgagctgctgggaagttgtgactttcactttccctttcgaattccagggtatatctgggaggccggaggacgtgtctggttattacacagatgcacagctggacgtgggatccacacagctcagaacagttggatcttgctcagtctctgtcagaggaagatcccttggacaagaggaccctgccttggtgtgagagtgagggaagaggaagctggaacgagggttaaggaaaaccttccagtctggacagtgactggagagctccaaggaaagcccctcggtaacccagccgctggcaccatgaacccagagagcagtatctttattgaggattaccttaagtatttccaggaccaagtgagcagagagaatctgctacaactgctgactgatgatgaagcctggaatggattcgtggctgctgctgaactgcccagggatgaggcagatgagctccgtaaagctctgaacaagcttgcaagtcacatggtcatgaaggacaaaaaccgccacgataaagaccagcagcacaggcagtggtttttgaaagagtttcctcggttgaaaagggagcttgaggatcacataaggaagctccgtgcccttgcagaggaggttgagcaggtccacagaggcaccaccattgccaatgtggtgtccaactctgttggcactacctctggcatcctgaccctcctcggcctgggtctggcacccttcacagaaggaatcagttttgtgctcttggacactggcatgggtctgggagcagcagctgctgtggctgggattacctgcagtgtggtagaactagtaaacaaattgcgggcacgagcccaagcccgcaacttggaccaaagcggcaccaatgtagcaaaggtgatgaaggagtttgtgggtgggaacacacccaatgttcttaccttagttgacaattggtaccaagtcacacaagggattgggaggaacatccgtgccatcagacgagccagagccaaccctcagttaggagcgtatgccccacccccgcatgtcattgggcgaatctcagctgaaggcggtgaacaggttgagagggttgttgaaggccccgcccaggcaatgagcagaggaaccatgatcgtgggtgcagccactggaggcatcttgcttctgctggatgtggtcagccttgcatatgagtcaaagcacttgcttgagggggcaaagtcagagtcagctgaggagctgaagaagcgggctcaggagctggaggggaagctcaactttctcaccaagatccatgagatgctgcagccaggccaagaccaatgaccccagagcagtgcagccaccagggcagaaatgccgggcacaggccaggacaaaatgcagacttttttttttttttttttttttttttgagatggagtctcgctctatcgcccaggatggagtgcagtggctcaatctcggctcactgcaaactccgcctcccgggttcacaccattctccggcctcagtctcccgagtagctgggactacaggcacctgccaccacgcccggctaatttttttgtattttcactggagacggggtttcactgtgttagccacgatggtctccatctcctgacctcgtgatctgcccacctcggcctcccaaagtgctgggattacaggcgtgagccaccgcgcctggccaaaatgcagacattttattagggggataaggagggcaaggtaaagcttatggaactgagtgttagtgactttggcatttgtgtagctgagcacagcaagggaggggttaatgcagatggcaagtgcaccaaggagaaggcaggaacactggagcctgcaataagggaggagagaggactggagagtgtggggaatgggaagaagtagtttactttggactaaagaatatattgggcgaagaatagagggggagcttgcaggaaccagcaatgagaaggccaggaaaagaaagagctgaaaatggagaaaaccagagttagaactgttggatacaggagaagaaacagcagctccactaccgacccccccccaggtttgatgtccttccaagaataaagtctttccctggtgatggtctctcgctctgtctttccagcatccactctcccttgtccttctgggggtgtatcacagtcagccagtggcttcttcatgatggtggttggggtggttgtcatgtgacgggtcccctccaggttactaaagggtgcatgtcccctgcttgaaccctgagaggcaggtggtaggccatggccacaatccccagctgaggagcaggtgtccctgagaacccaaacttcccagagagtatctgagaaccaaccaatgaaaacagtcccatcgctcttagccggtaagtaaacagtcagaagattagcatgaaagcagtttagcattgggaggaagcacagatctctagagctgtcctgtcgctgcccaggattgacctgtgtgtaagtcccaataaactcacctactcaccaagctgga

SEQ ID NO: 108207 - DNA, 577 bp, Homo sapiens
  Payload ID: 1269
  Gene Symbol: APOL2
  Gene Name: apolipoprotein L, 2
  ENST ID: ENST00000454728
  CDS Start-End: 355-577
ggtatatctgggaggccggaggacgtgtctggttattacacagatgcacagctggacgtgggatccacacagctcagaacagttggatcttgctcagtctctgtcagaggaagatcccttgaaaagactactgagagccagtaagactgaaagaatggacatcttcatatcctgttagtttgagtgtgaatttgtacagttttcatacagagtggctctaggacaagaggaccctgccttggtgtgagagtgagggaagaggaagctggaacgagggttaaggaaaaccttccagtctggacagtgactggagagctccaaggaaagcccctcggtaacccagccgctggcaccatgaacccagagagcagtatctttattgaggattaccttaagtatttccaggaccaagtgagcagagagaatctgctacaactgctgactgatgatgaagcctggaatggattcgtggctgctgctgaactgcccagggatgaggcagatgagctccgtaaagctctgaacaagcttgcaagtcacatggtcatgaaggacaaaaaccgccacgataaagacc

SEQ ID NO: 108208 - DNA, 1421 bp, Homo sapiens
  Payload ID: 1269
  Gene Symbol: APOL2
  Gene Name: apolipoprotein L, 2
  ENST ID: ENST00000451256
  CDS Start-End: 10-1359
attacacagatgcacagctggacgtgggatccacacagctcagaacagttggatcttgctcagtctctgtcagaggaagatcccttgtcaagcctgaggggcagtatccagcctcaacccccagcagaggctccagacaaaggtgggagccaggccaacaatgacccaggaggatgggatcctggatgcagctcctcacaagtattgggcaggacaagaggaccctgccttggtgtgagagtgagggaagaggaagctggaacgagggttaaggaaaaccttccagtctggacagtgactggagagctccaaggaaagcccctcggtaacccagccgctggcaccatgaacccagagagcagtatctttattgaggattaccttaagtatttccaggaccaagtgagcagagagaatctgctacaactgctgactgatgatgaagcctggaatggattcgtggctgctgctgaactgcccagggatgaggcagatgagctccgtaaagctctgaacaagcttgcaagtcacatggtcatgaaggacaaaaaccgccacgataaagaccagcagcacaggcagtggtttttgaaagagtttcctcggttgaaaagggagcttgaggatcacataaggaagctccgtgcccttgcagaggaggttgagcaggtccacagaggcaccaccattgccaatgtggtgtccaactctgttggcactacctctggcatcctgaccctcctcggcctgggtctggcacccttcacagaaggaatcagttttgtgctcttggacactggcatgggtctgggagcagcagctgctgtggctgggattacctgcagtgtggtagaactagtaaacaaattgcgggcacgagcccaagcccgcaacttggaccaaagcggcaccaatgtagcaaaggtgatgaaggagtttgtgggtgggaacacacccaatgttcttaccttagttgacaattggtaccaagtcacacaagggattgggaggaacatccgtgccatcagacgagccagagccaaccctcagttaggagcgtatgccccacccccgcatgtcattgggcgaatctcagctgaaggcggtgaacaggttgagagggttgttgaaggccccgcccaggcaatgagcagaggaaccatgatcgtgggtgcagccactggaggcatcttgcttctgctggatgtggtcagccttgcatatgagtcaaagcacttgcttgagggggcaaagtcagagtcagctgaggagctgaagaagcgggctcaggagctggaggggaagctcaactttctcaccaagatccatgagatgctgcagccaggccaagaccaatgaccccagagcagtgcagccaccagggcagaaatgccgggcacaggccaggacaaaatgcagac

SEQ ID NO: 108209 - DNA, 611 bp, Homo sapiens
  Payload ID: 1269
  Gene Symbol: APOL2
  Gene Name: apolipoprotein L, 2
  ENST ID: ENST00000529194
  CDS Start-End: 226-611
ggggaaaacagcttagatgggttcacaaagctccccgggctcagctctggttctgacaccctcagacacggccagctgaccccagaagaaaggacaagaggaccctgccttggtgtgagagtgagggaagaggaagctggaacgagggttaaggaaaaccttccagtctggacagtgactggagagctccaaggaaagcccctcggtaacccagccgctggcaccatgaacccagagagcagtatctttattgaggattaccttaagtatttccaggaccaagtgagcagagagaatctgctacaactgctgactgatgatgaagcctggaatggattcgtggctgctgctgaactgcccagggatgaggcagatgagctccgtaaagctctgaacaagcttgcaagtcacatggtcatgaaggacaaaaaccgccacgataaagaccagcagcacaggcagtggtttttgaaagagtttcctcggttgaaaagggagcttgaggatcacataaggaagctccgtgcccttgcagaggaggttgagcaggtccacagaggcaccaccattgccaatgtggtgtccaactctgttggcactacctctggcat

SEQ ID NO: 108210 - DNA, 2117 bp, Homo sapiens
  Payload ID: 1270
  Gene Symbol: APOL3
  Gene Name: apolipoprotein L, 3
  Uniprot ID: O95236
  ENST ID: ENST00000349314
  CDS Start-End: 39-1247
agcaggagggtgggaccaagggtgctgctggaccaaggatgggactgggccaagggtggggctgggaagcatcctgttttgcatgtttgatcaggagctgctgccaagttgtgactttcactttcccttttgggttccagggtatatctcagagcctggagaacgtgtctggttattatgcagatgcacggctggaggtgggatccacacagctcagaacagctggatcttgctcacactctttcaagagaagcttccttgaaaagaaacgctttactgaagaggccaccaaatacttccgggagagagtcagcccagtgcatctgcaaatcctgctgactaacaatgaagcctggaagagattcgtgactgcggctgaattgcccagggatgaggcagatgctctctacgaagctctgaagaagcttagaacatatgcagctattgaggacgaatatgtgcagcagaaagatgagcagtttagggaatggtttttgaaagagtttccccaagtcaagaggaagatccaggagtccatagaaaagcttcgtgcccttgcaaatggtattgaagaggtccacagaggctgcaccatctccaatgtggtgtccagctccactggcgctgcctctggcatcatgtcccttgctggtcttgttttggcaccatttacagcagggacgagtctggcccttactgcagctggggtagggctgggagcagcgtctgctgtgactgggatcaccaccagcatcgtggagcactcatacacatcatcagcagaagctgaagccagcaggctgactgcaaccagcattgaccgattgaaggtatttaaggaagttatgcgtgacatcacacccaacttactttcccttcttaataattattacgaagccacacaaaccattgggagtgaaatccgtgccatcaggcaagccagagccagggcccgactccctgtgaccacctggcgaatctcagctggaagtggtggtcaagcagagagaacgattgcaggcaccacccgggcagtgagcagaggagcccggatcctgagtgcgaccacttcaggcatcttccttgcactggatgtggtcaaccttgtatacgagtcaaagcacttgcatgagggggcaaagtctgcatctgctgaggagctgaggcggcaggctcaggagctggaggagaatctaatggagctcactcagatctatcagcgtctgaatccatgccatacccactgaccccagaccagtgcagccagcaggggaggtgagccatacacaggccacgacaaaatgcaggcattttattagggggataaagagggcaaggtaaagtttatggagctgagtgttagtgactttggcatttctgtagctgagcacagcaggggaggggttaatgcagatggcaagtgcaccaaggagaaggcaggaatgctggagcctggaataagggaggagaggggactggagagtgtggggaataggaagaagaaatttcctttagactaacgaatatattggggggaggaatagaggggaggtgtgcaggaaccagcaatgagaaggccaggaaaagaaagagctgaaaatgcagaaagccgaagagttagaacttttggatacagcagaagaaacagcggctccactaccgacctgcccccggttcgatgtccttccaagaatgaagtctttccctggtgatggtcccctgccctgtctttccagcatccactctgtcttgtcctcctggaagtgtatctcagtcagccagtggcttcttgatgatggcggtggaggtggtggttgtagtgtgatggatcccctttaggttatttaggggtatatgtcccctgcttgaaccctgaaggccaggtaatgagccatggccattgtccccagctgaggaccaggtgtctctaaaaacccaaacatcctggagagtatgcgagaacctaccaagaaaaacagtctcattactcatatacagcaggcaaagagacagaaaattaactgaaaagcagtttagagactgggggaggccggatctctagagccatcctgctgagtgccctgtgtgtaagtcctaataaactcacctactcacca

SEQ ID NO: 108211 - DNA, 3563 bp, Homo sapiens
  Payload ID: 1270
  Gene Symbol: APOL3
  Gene Name: apolipoprotein L, 3
  Uniprot ID: O95236
  ENST ID: ENST00000361710
  CDS Start-End: 2085-2693
actctggggaaaggagggtacaaccacatgtaaattttattataatgatggtataatgaacttggggtgacctgagggcatgtttttgtgttactgggcatgtgcccctttaggagacttccacctgtgccttactttctctttctttgggatgtgctggccacagactttaccaaaaactccatccattaggatggcattaggacggttctggggctaaacttaggtgggccaggggctgtttcactgtcagcctttctactctcttttcttacccactcctagctgctaatgtctatttaactacctaatatttccccctttagagaaaaaaagccaaatttttgggtagatcggtgacaattaatctggctacttcctgctgacaagaggcagtggtaataattgggttctcttttttgctctcttgtagctggtaggttgggcagagaaaagtggtggccatccaaggggcccacgtagatatcagacatggttgagacctcgcggtaaccttgtgtagaatcatttggagttttatggattctaggtgggaagaaacaaaacaaccttgtaaatcaaatgagcatcgtttgaaagctataagttgtataaagctgttttaggaccaagaaagggggctaaccaggaaaaccaggaccagttgttaaatttccaccagtcaaagcctcctgaaactctgttttccattaacttgttggccctgtctgtaatttttttaagttggtttgcactttacctgattggttgatgaaaacagcaatgtttatcaagtgttgcacaagctcccccttgattggctgtgagcaaattaaaagctcatcaatttcataagactatgcttgctaatgaagcaatttgttctgaaagggtattgacctggttagttagattaataatttgttgagtaatttttaagaagagtttctgggcagtaaaaatggagttaaggaggtcctccagttcccgtgccaataccagccagaacgccaattatagtcagtgctgttaaaactcctctttcagttttaccagattgagcgtgtatagggaggggaatgctatcgataagagtgagtttggggatgatgtaaactagggccaaatccccgtttaattagcagacaagcagagatatgccttgtttctatacaaaaatgtgatttgtcatgttaagacaaatatcaacagtgatactaaagtagggtttttccatgctgtgtaagtctgctttaataccctcagaagtggaagtcaaggctagttcatgtaatgggggaacacaggcagtacttgacagaatgaaagaggaatcaaaagcccaattagaggaaggagtgatgggatcccaaccaatattgtgaaattatggggagctgcagttttttgcaatgattttgcccgaagttgtgagactgaaaccagaagttgttatgtttaaaatgatattctggtgtgggtctggggaaaagggtagatccagaatagctggcttctttccacatagtggttctgttggggggcttgggaaatgaataaaacacaaagaagaattagaatatcagggtatatctcagagcctggagaacgtgtctggttattatgcagatgcacggctggaggtgggatccacacagctcagaacagctggatcttgctcacactctttcaagagaagcttccttgaaaagaaacgctttactgaagaggccaccaaatacttccgggagagagtcagcccagtgcatctgcaaatcctgctgactaacaatgaagcctggaagagattcgtgactgcggctgaattgcccagggatgaggcagatgctctctacgaagctctgaagaagcttagaacatatgcagctattgaggacgaatatgtgcagcagaaagatgagcagtttagggaatggtttttgaaagagtttccccaagtcaagaggaagatccaggagtccatagaaaagcttcgtgcccttgcaaatggtattgaagaggtccacagaggctgcaccatctccaatgtggtgtccagctccactggcgctgcctctggcatcatgtcccttgctggtcttgttttggcaccatttacagcagggacgagtctggcccttactgcagctggggtagggctgggagcagcgtctgctgtgactgggatcaccaccagcatcgtggagcactcatacacatcatcagcagaagctgaagccagcaggctgactgcaaccagcattgaccgattgaaggtatttaaggaagttatgcgtgacatcacacccaacttactttcccttcttaataattattacgaagccacacaaaccattgggagtgaaatccgtgccatcaggcaagccagagccagggcccgactccctgtgaccacctggcgaatctcagctggaagtggtggtcaagcagagagaacgattgcaggcaccacccgggcagtgagcagaggagcccggatcctgagtgcgaccacttcaggcatcttccttgcactggatgtggtcaaccttgtatacgagtcaaagcacttgcatgagggggcaaagtctgcatctgctgaggagctgaggcggcaggctcaggagctggaggagaatctaatggagctcactcagatctatcagcgtctgaatccatgccatacccactgaccccagaccagtgcagccagcaggggaggtgagccatacacaggccacgacaaaatgcaggcattttattagggggataaagagggcaaggtaaagtttatggagctgagtgttagtgactttggcatttctgtagctgagcacagcaggggaggggttaatgcagatggcaagtgcaccaaggagaaggcaggaatgctggagcctggaataagggaggagaggggactggagagtgtggggaataggaagaagaaatttcctttagactaacgaatatattggggggaggaatagaggggaggtgtgcaggaaccagcaatgagaaggccaggaaaagaaagagctgaaaatgcagaaagccgaagagttagaacttttggatacagcagaagaaacagcggctccactaccgacctgcccccggttcgatgtccttccaagaatgaagtctttccctggtgatggtcccctgccctgtctttccagcatccactctgtcttgtcctcctggaagtgtatctcagtcagccagtggcttcttgatgatggcggtggaggtggtggttgtagtgtgatggatcccctttaggttatttaggggtatatgtcccctgcttgaaccctgaaggccaggtaatgagccatggccattgtccccagctgaggaccaggtgtctctaaaaacccaaacatcctggagagtatgcgagaacctaccaagaaaaacagtctcattactcatatacagcaggcaaagagacagaaaattaactgaaaagcagtttagagactgggggaggccggatctctagagccatcctgctgagtgccctgtgtgtaagtcctaataaactcacctactcacca

SEQ ID NO: 108212 - DNA, 3626 bp, Homo sapiens
  Payload ID: 1270
  Gene Symbol: APOL3
  Gene Name: apolipoprotein L, 3
  Uniprot ID: O95236
  ENST ID: ENST00000397287
  CDS Start-End: 2148-2756
actctggggaaaggagggtacaaccacatgtaaattttattataatgatggtataatgaacttggggtgacctgagggcatgtttttgtgttactgggcatgtgcccctttaggagacttccacctgtgccttactttctctttctttgggatgtgctggccacagactttaccaaaaactccatccattaggatggcattaggacggttctggggctaaacttaggtgggccaggggctgtttcactgtcagcctttctactctcttttcttacccactcctagctgctaatgtctatttaactacctaatatttccccctttagagaaaaaaagccaaatttttgggtagatcggtgacaattaatctggctacttcctgctgacaagaggcagtggtaataattgggttctcttttttgctctcttgtagctggtaggttgggcagagaaaagtggtggccatccaaggggcccacgtagatatcagacatggttgagacctcgcggtaaccttgtgtagaatcatttggagttttatggattctaggtgggaagaaacaaaacaaccttgtaaatcaaatgagcatcgtttgaaagctataagttgtataaagctgttttaggaccaagaaagggggctaaccaggaaaaccaggaccagttgttaaatttccaccagtcaaagcctcctgaaactctgttttccattaacttgttggccctgtctgtaatttttttaagttggtttgcactttacctgattggttgatgaaaacagcaatgtttatcaagtgttgcacaagctcccccttgattggctgtgagcaaattaaaagctcatcaatttcataagactatgcttgctaatgaagcaatttgttctgaaagggtattgacctggttagttagattaataatttgttgagtaatttttaagaagagtttctgggcagtaaaaatggagttaaggaggtcctccagttcccgtgccaataccagccagaacgccaattatagtcagtgctgttaaaactcctctttcagttttaccagattgagcgtgtatagggaggggaatgctatcgataagagtgagtttggggatgatgtaaactagggccaaatccccgtttaattagcagacaagcagagatatgccttgtttctatacaaaaatgtgatttgtcatgttaagacaaatatcaacagtgatactaaagtagggtttttccatgctgtgtaagtctgctttaataccctcagaagtggaagtcaaggctagttcatgtaatgggggaacacaggcagtacttgacagaatgaaagaggaatcaaaagcccaattagaggaaggagtgatgggatcccaaccaatattgtgaaattatggggagctgcagttttttgcaatgattttgcccgaagttgtgagactgaaaccagaagttgttatgtttaaaatgatattctggtgtgggtctggggaaaagggtagatccagaatagctggcttctttccacatagtggttctgttggggggcttgggaaatgaataaaacacaaagaagaattagaatatcaggtgaaggtagcaggtgctcctggcagaagaacccacataaggaagtgtccagaagccacacagggtatatctcagagcctggagaacgtgtctggttattatgcagatgcacggctggaggtgggatccacacagctcagaacagctggatcttgctcacactctttcaagagaagcttccttgaaaagaaacgctttactgaagaggccaccaaatacttccgggagagagtcagcccagtgcatctgcaaatcctgctgactaacaatgaagcctggaagagattcgtgactgcggctgaattgcccagggatgaggcagatgctctctacgaagctctgaagaagcttagaacatatgcagctattgaggacgaatatgtgcagcagaaagatgagcagtttagggaatggtttttgaaagagtttccccaagtcaagaggaagatccaggagtccatagaaaagcttcgtgcccttgcaaatggtattgaagaggtccacagaggctgcaccatctccaatgtggtgtccagctccactggcgctgcctctggcatcatgtcccttgctggtcttgttttggcaccatttacagcagggacgagtctggcccttactgcagctggggtagggctgggagcagcgtctgctgtgactgggatcaccaccagcatcgtggagcactcatacacatcatcagcagaagctgaagccagcaggctgactgcaaccagcattgaccgattgaaggtatttaaggaagttatgcgtgacatcacacccaacttactttcccttcttaataattattacgaagccacacaaaccattgggagtgaaatccgtgccatcaggcaagccagagccagggcccgactccctgtgaccacctggcgaatctcagctggaagtggtggtcaagcagagagaacgattgcaggcaccacccgggcagtgagcagaggagcccggatcctgagtgcgaccacttcaggcatcttccttgcactggatgtggtcaaccttgtatacgagtcaaagcacttgcatgagggggcaaagtctgcatctgctgaggagctgaggcggcaggctcaggagctggaggagaatctaatggagctcactcagatctatcagcgtctgaatccatgccatacccactgaccccagaccagtgcagccagcaggggaggtgagccatacacaggccacgacaaaatgcaggcattttattagggggataaagagggcaaggtaaagtttatggagctgagtgttagtgactttggcatttctgtagctgagcacagcaggggaggggttaatgcagatggcaagtgcaccaaggagaaggcaggaatgctggagcctggaataagggaggagaggggactggagagtgtggggaataggaagaagaaatttcctttagactaacgaatatattggggggaggaatagaggggaggtgtgcaggaaccagcaatgagaaggccaggaaaagaaagagctgaaaatgcagaaagccgaagagttagaacttttggatacagcagaagaaacagcggctccactaccgacctgcccccggttcgatgtccttccaagaatgaagtctttccctggtgatggtcccctgccctgtctttccagcatccactctgtcttgtcctcctggaagtgtatctcagtcagccagtggcttcttgatgatggcggtggaggtggtggttgtagtgtgatggatcccctttaggttatttaggggtatatgtcccctgcttgaaccctgaaggccaggtaatgagccatggccattgtccccagctgaggaccaggtgtctctaaaaacccaaacatcctggagagtatgcgagaacctaccaagaaaaacagtctcattactcatatacagcaggcaaagagacagaaaattaactgaaaagcagtttagagactgggggaggccggatctctagagccatcctgctgagtgccctgtgtgtaagtcctaataaactcacctactcacca

SEQ ID NO: 108213 - DNA, 2214 bp, Homo sapiens
  Payload ID: 1270
  Gene Symbol: APOL3
  Gene Name: apolipoprotein L, 3
  ENST ID: ENST00000397289
  CDS Start-End: 39-332
agcaggagggtgggaccaagggtgctgctggaccaaggatgggactgggccaagggtggggctgggaagcatcctgttttgcatgtttgatcaggagctgctgccaagttgtgactttcactttcccttttgggttccagggtatatctcagagcctggagaacgtgtctggttattatgcagatgcacggctggaggtgggatccacacagctcagaacagctggatcttgctcacactctttcaagagaagcttccttgggttaagaaaaaaaacgaacccttccagtcaggtcagtgactggagagctccatggaaagtctctcagtgacctggctgctggcaccatggactcagaaaagaaacgctttactgaagaggccaccaaatacttccgggagagagtcagcccagtgcatctgcaaatcctgctgactaacaatgaagcctggaagagattcgtgactgcggctgaattgcccagggatgaggcagatgctctctacgaagctctgaagaagcttagaacatatgcagctattgaggacgaatatgtgcagcagaaagatgagcagtttagggaatggtttttgaaagagtttccccaagtcaagaggaagatccaggagtccatagaaaagcttcgtgcccttgcaaatggtattgaagaggtccacagaggctgcaccatctccaatgtggtgtccagctccactggcgctgcctctggcatcatgtcccttgctggtcttgttttggcaccatttacagcagggacgagtctggcccttactgcagctggggtagggctgggagcagcgtctgctgtgactgggatcaccaccagcatcgtggagcactcatacacatcatcagcagaagctgaagccagcaggctgactgcaaccagcattgaccgattgaaggtatttaaggaagttatgcgtgacatcacacccaacttactttcccttcttaataattattacgaagccacacaaaccattgggagtgaaatccgtgccatcaggcaagccagagccagggcccgactccctgtgaccacctggcgaatctcagctggaagtggtggtcaagcagagagaacgattgcaggcaccacccgggcagtgagcagaggagcccggatcctgagtgcgaccacttcaggcatcttccttgcactggatgtggtcaaccttgtatacgagtcaaagcacttgcatgagggggcaaagtctgcatctgctgaggagctgaggcggcaggctcaggagctggaggagaatctaatggagctcactcagatctatcagcgtctgaatccatgccatacccactgaccccagaccagtgcagccagcaggggaggtgagccatacacaggccacgacaaaatgcaggcattttattagggggataaagagggcaaggtaaagtttatggagctgagtgttagtgactttggcatttctgtagctgagcacagcaggggaggggttaatgcagatggcaagtgcaccaaggagaaggcaggaatgctggagcctggaataagggaggagaggggactggagagtgtggggaataggaagaagaaatttcctttagactaacgaatatattggggggaggaatagaggggaggtgtgcaggaaccagcaatgagaaggccaggaaaagaaagagctgaaaatgcagaaagccgaagagttagaacttttggatacagcagaagaaacagcggctccactaccgacctgcccccggttcgatgtccttccaagaatgaagtctttccctggtgatggtcccctgccctgtctttccagcatccactctgtcttgtcctcctggaagtgtatctcagtcagccagtggcttcttgatgatggcggtggaggtggtggttgtagtgtgatggatcccctttaggttatttaggggtatatgtcccctgcttgaaccctgaaggccaggtaatgagccatggccattgtccccagctgaggaccaggtgtctctaaaaacccaaacatcctggagagtatgcgagaacctaccaagaaaaacagtctcattactcatatacagcaggcaaagagacagaaaattaactgaaaagcagtttagagactgggggaggccggatctctagagccatcctgctgagtgccctgtgtgtaagtcctaataaactcacctactcacca

SEQ ID NO: 108214 - DNA, 2214 bp, Homo sapiens; identical to SEQ ID NO: 108213
  Payload ID: 1270
  Gene Symbol: APOL3
  Gene Name: apolipoprotein L, 3
  Uniprot ID: O95236
  ENST ID: ENST00000397293
  CDS Start-End: 736-1344

SEQ ID NO: 108215 - DNA, 576 bp, Homo sapiens
  Payload ID: 1270
  Gene Symbol: APOL3
  Gene Name: apolipoprotein L, 3
  ENST ID: ENST00000426939
  CDS Start-End: 1-157
ttatgcagatgcacggctggaggtgggatccacacagctcagaacagctggatcttgctcacactctttcaagagaagcttccttgggttaagaaaaaaaacgaacccttccagtcaggtcagtgactggagagctccatggaaagtctctcagtgacctggctgctggcaccatggactcagaaaagaaacgctttactgaagagattcgtgactgcggctgaattgcccagggatgaggcagatgctctctacgaagctctgaagaagcttagaacatatgcagctattgaggacgaatatgtgcagcagaaagatgagcagtttagggaatggtttttgaaagagtttccccaagtcaagaggaagatccaggagtccatagaaaagcttcgtgcccttgcaaatggtattgaagaggtccacagaggctgcaccatctccaatgtggtgtccagctccactggcgctgcctctggcatcatgtcccttgctggtcttgttttggcaccatttacagcagggacgagtctggcccttactgcagctggggtagggctgggagcagcgtctgct

SEQ ID NO: 108216 - DNA, 2327 bp, Homo sapiens
  Payload ID: 1270
  Gene Symbol: APOL3
  Gene Name: apolipoprotein L, 3
  ENST ID: ENST00000422426
  CDS Start-End: 39-287
agcaggagggtgggaccaagggtgctgctggaccaaggatgggactgggccaagggtggggctgggaagcatcctgttttgcatgtttgatcaggagctgctgccaagttgtgactttcactttcccttttgggttccagggtatatctcagagcctggagaacgtgtctggttattatgcagatgcacggctggaggtgggatccacacagctcagaacagctggatcttgctcacactctttcaagagaagcttccttggacaaaaggaccctgccttggtgtgagagtgagggcagagggagctggagcaagtagaatttctctaaataccagctggctggggcccaggagattaaaaaacaccgggctagggttaagaaaaaaaacgaacccttccagtcaggtcagtgactggagagctccatggaaagtctctcagtgacctggctgctggcaccatggactcagaaaagaaacgctttactgaagaggccaccaaatacttccgggagagagtcagcccagtgcatctgcaaatcctgctgactaacaatgaagcctggaagagattcgtgactgcggctgaattgcccagggatgaggcagatgctctctacgaagctctgaagaagcttagaacatatgcagctattgaggacgaatatgtgcagcagaaagatgagcagtttagggaatggtttttgaaagagtttccccaagtcaagaggaagatccaggagtccatagaaaagcttcgtgcccttgcaaatggtattgaagaggtccacagaggctgcaccatctccaatgtggtgtccagctccactggcgctgcctctggcatcatgtcccttgctggtcttgttttggcaccatttacagcagggacgagtctggcccttactgcagctggggtagggctgggagcagcgtctgctgtgactgggatcaccaccagcatcgtggagcactcatacacatcatcagcagaagctgaagccagcaggctgactgcaaccagcattgaccgattgaaggtatttaaggaagttatgcgtgacatcacacccaacttactttcccttcttaataattattacgaagccacacaaaccattgggagtgaaatccgtgccatcaggcaagccagagccagggcccgactccctgtgaccacctggcgaatctcagctggaagtggtggtcaagcagagagaacgattgcaggcaccacccgggcagtgagcagaggagcccggatcctgagtgcgaccacttcaggcatcttccttgcactggatgtggtcaaccttgtatacgagtcaaagcacttgcatgagggggcaaagtctgcatctgctgaggagctgaggcggcaggctcaggagctggaggagaatctaatggagctcactcagatctatcagcgtctgaatccatgccatacccactgaccccagaccagtgcagccagcaggggaggtgagccatacacaggccacgacaaaatgcaggcattttattagggggataaagagggcaaggtaaagtttatggagctgagtgttagtgactttggcatttctgtagctgagcacagcaggggaggggttaatgcagatggcaagtgcaccaaggagaaggcaggaatgctggagcctggaataagggaggagaggggactggagagtgtggggaataggaagaagaaatttcctttagactaacgaatatattggggggaggaatagaggggaggtgtgcaggaaccagcaatgagaaggccaggaaaagaaagagctgaaaatgcagaaagccgaagagttagaacttttggatacagcagaagaaacagcggctccactaccgacctgcccccggttcgatgtccttccaagaatgaagtctttccctggtgatggtcccctgccctgtctttccagcatccactctgtcttgtcctcctggaagtgtatctcagtcagccagtggcttcttgatgatggcggtggaggtggtggttgtagtgtgatggatcccctttaggttatttaggggtatatgtcccctgcttgaaccctgaaggccaggtaatgagccatggccattgtccccagctgaggaccaggtgtctctaaaaacccaaacatcctggagagtatgcgagaacctaccaagaaaaacagtctcattactcatatacagcaggcaaagagacagaaaattaactgaaaagcagtttagagactgggggaggccggatctctagagccatcctgctgagtgccctgtgtgtaagtcctaataaactcacctactcacca

SEQ ID NO: 108217 - DNA, 1240 bp, Homo sapiens
  Payload ID: 1270
  Gene Symbol: APOL3
  Gene Name: apolipoprotein L, 3
  Uniprot ID: O95236
  ENST ID: ENST00000424878
  CDS Start-End: 72-1067
gaacccttccagtcaggtcagtgactggagagctccatggaaagtctctcagtgacctggctgctggcaccatggactcagaaaagaaacgctttactgaagaggccaccaaatacttccgggagagagtcagcccagtgcatctgcaaatcctgctgactaacaatgaagcctggaagagattcgtgactgcggctgaattgcccagggatgaggcagatgctctctacgaagctctgaagaagcttagaacatatgcagctattgaggacgaatatgtgcagcagaaagatgagcagtttagggaatggtttttgaaagagtttccccaagtcaagaggaagatccaggagtccatagaaaagcttcgtgcccttgcaaatggtattgaagaggtccacagaggctgcaccatctccaatgtggtgtccagctccactggcgctgcctctggcatcatgtcccttgctggtcttgttttggcaccatttacagcagggacgagtctggcccttactgcagctggggtagggctgggagcagcgtctgctgtgactgggatcaccaccagcatcgtggagcactcatacacatcatcagcagaagctgaagccagcaggctgactgcaaccagcattgaccgattgaaggtatttaaggaagttatgcgtgacatcacacccaacttactttcccttcttaataattattacgaagccacacaaaccattgggagtgaaatccgtgccatcaggcaagccagagccagggcccgactccctgtgaccacctggcgaatctcagctggaagtggtggtcaagcagagagaacgattgcaggcaccacccgggcagtgagcagaggagcccggatcctgagtgcgaccacttcaggcatcttccttgcactggatgtggtcaaccttgtatacgagtcaaagcacttgcatgagggggcaaagtctgcatctgctgaggagctgaggcggcaggctcaggagctggaggagaatctaatggagctcactcagatctatcagcgtctgaatccatgccatacccactgaccccagaccagtgcagccagcaggggaggtgagccatacacaggccacgacaaaatgcaggcattttattagggggataaagagggcaaggtaaagtttatggagctgagtgttagtgactttggcatttctgtagctgagcacagcaggggaggggttaatgcagatggcaa

SEQ ID NO: 108218 - DNA, 2443 bp, Homo sapiens
  Payload ID: 1270
  Gene Symbol: APOL3
  Gene Name: apolipoprotein L, 3
  ENST ID: ENST00000432700
  CDS Start-End: 39-287
agcaggagggtgggaccaagggtgctgctggaccaaggatgggactgggccaagggtggggctgggaagcatcctgttttgcatgtttgatcaggagctgctgccaagttgtgactttcactttcccttttgggttccagggtatatctcagagcctggagaacgtgtctggttattatgcagatgcacggctggaggtgggatccacacagctcagaacagctggatcttgctcacactctttcaagagaagcttccttggacaaaaggaccctgccttggtgtgagagtgagggcagagggagctggagcaagtagaatttctctaaataccagctggctggggcccaggagattaaaaaacaccgggctaggttggtcttggcatttgctgacacgcaaagggattgcagagatccagcccctccaacctccctctgtccacaggtggctcacattcagtcccacaatttgctttctcctcctcaagggttaagaaaaaaaacgaacccttccagtcaggtcagtgactggagagctccatggaaagtctctcagtgacctggctgctggcaccatggactcagaaaagaaacgctttactgaagaggccaccaaatacttccgggagagagtcagcccagtgcatctgcaaatcctgctgactaacaatgaagcctggaagagattcgtgactgcggctgaattgcccagggatgaggcagatgctctctacgaagctctgaagaagcttagaacatatgcagctattgaggacgaatatgtgcagcagaaagatgagcagtttagggaatggtttttgaaagagtttccccaagtcaagaggaagatccaggagtccatagaaaagcttcgtgcccttgcaaatggtattgaagaggtccacagaggctgcaccatctccaatgtggtgtccagctccactggcgctgcctctggcatcatgtcccttgctggtcttgttttggcaccatttacagcagggacgagtctggcccttactgcagctggggtagggctgggagcagcgtctgctgtgactgggatcaccaccagcatcgtggagcactcatacacatcatcagcagaagctgaagccagcaggctgactgcaaccagcattgaccgattgaaggtatttaaggaagttatgcgtgacatcacacccaacttactttcccttcttaataattattacgaagccacacaaaccattgggagtgaaatccgtgccatcaggcaagccagagccagggcccgactccctgtgaccacctggcgaatctcagctggaagtggtggtcaagcagagagaacgattgcaggcaccacccgggcagtgagcagaggagcccggatcctgagtgcgaccacttcaggcatcttccttgcactggatgtggtcaaccttgtatacgagtcaaagcacttgcatgagggggcaaagtctgcatctgctgaggagctgaggcggcaggctcaggagctggaggagaatctaatggagctcactcagatctatcagcgtctgaatccatgccatacccactgaccccagaccagtgcagccagcaggggaggtgagccatacacaggccacgacaaaatgcaggcattttattagggggataaagagggcaaggtaaagtttatggagctgagtgttagtgactttggcatttctgtagctgagcacagcaggggaggggttaatgcagatggcaagtgcaccaaggagaaggcaggaatgctggagcctggaataagggaggagaggggactggagagtgtggggaataggaagaagaaatttcctttagactaacgaatatattggggggaggaatagaggggaggtgtgcaggaaccagcaatgagaaggccaggaaaagaaagagctgaaaatgcagaaagccgaagagttagaacttttggatacagcagaagaaacagcggctccactaccgacctgcccccggttcgatgtccttccaagaatgaagtctttccctggtgatggtcccctgccctgtctttccagcatccactctgtcttgtcctcctggaagtgtatctcagtcagccagtggcttcttgatgatggcggtggaggtggtggttgtagtgtgatggatcccctttaggttatttaggggtatatgtcccctgcttgaaccctgaaggccaggtaatgagccatggccattgtccccagctgaggaccaggtgtctctaaaaacccaaacatcctggagagtatgcgagaacctaccaagaaaaacagtctcattactcatatacagcaggcaaagagacagaaaattaactgaaaagcagtttagagactgggggaggccggatctctagagccatcctgctgagtgccctgtgtgtaagtcctaataaactcacctactcacca

SEQ ID NO: 108219 - DNA, 295 bp, Homo sapiens
  Payload ID: 1270
  Gene Symbol: APOL3
  Gene Name: apolipoprotein L, 3
  ENST ID: ENST00000531095
  CDS Start-End: 1-123
tctcagagcctggagaacgtgtctggttattatgcagatgcacggctggaggtgggatccacacagctcagaacagctggatcttgctcacactctttcaagagaagcttccttggagaataacacagcccttctgggagtccacgccagcttccaaatgtctgtggcagctcttccttcattctcaacacttacgaacaggaacataaataaatagaaggaaaaatatccatttatattaagatgctcttcttgttaaaaccaattaacaattaaacattctctgttacgataa

SEQ ID NO: 108220 - DNA, 462 bp, Homo sapiens
  Payload ID: 1270
  Gene Symbol: APOL3
  Gene Name: apolipoprotein L, 3
  ENST ID: ENST00000472303
  CDS Start-End: 1-260
attatgcagatgcacggctggaggtgggatccacacagctcagaacagctggatcttgctcacactctttcaagagaagcttccttgcgtggtggtatgtacctgtagggacaactacttgggaagttgaagcagaagcatcacttgcagccaggacatacaggcagaagcaagggggacaaagggtgtccagcacagcaccagtgaattcaccaagacagacacttgggcatagagtgcaagacacagatttggaatgaggagtcatttacaataagcatgacaaaaggaccctgccttggtgtgagagtgagggcagagggagctggagcaagtagaatttctctaaataccagctggctggggcccaggagattaaaaaacaccgggctagggttaagaaaaaaaacgaacccttccagtcaggtcagtgactggagagctccatggaaagtctctcag

SEQ ID NO: 108221 - DNA, 1005 bp, Homo sapiens
  Payload ID: 1270
  Gene Symbol: APOL3
  Gene Name: apolipoprotein L, 3
  ENST ID: ENST00000487355
  CDS Start-End: 1-101
attatgcagatgcacggctggaggtgggatccacacagctcagaacagctggatcttgctcacactctttcaagagaagcttccttgagatgagcatctagatagcaaggaaaaacattcaatccctcaactgaaagtgaaactgaagctgggccatgttgtccagaggctggttgcttttagtccaagtgctgcctcccacacctcggatttcagccaggctgtgccacggagggcagaggccacccagggttaagaaaaaaaacgaacccttccagtcaggtcagtgactggagagctccatggaaagtctctcagtgacctggctgctggcaccatggactcagaaaagaaacgctttactgaagaggccaccaaatacttccgggagagagtcagcccagtgcatctgcaaatcctgctgactaacaatgaagcctggaagagattcgtgactgcggctgaattgcccagggatgaggcagatgctctctacgaagctctgaagaagcttagaacatatgcagctattgaggacgaatatgtgcagcagaaagatgagcagtttagggaatggtttttgaaagagtttccccaagtcaagaggaagatccaggagtccatagaaaagcttcgtgcccttgcaaatggtattgaagaggtccacagaggctgcaccatctccaatgtggtgtccagctccactggcgctgcctctggcatcatgtcccttgctggtcttgttttggcaccatttacagcagggacgagtctggcccttactgcagctggggtagggctgggagcagcgtctgctgtgactgggatcaccaccagcatcgtggagcactcatacacatcatcagcagaagctgaagccagcaggctgactgcaaccagcattgaccgattgaaggtatttaaggaagttatgcgtgacatcacacccaacttactttcccttcttaataattattacgaagccacacaaaccattgggagtga

SEQ ID NO: 108222 - DNA, 569 bp, Homo sapiens
  Payload ID: 1270
  Gene Symbol: APOL3
  Gene Name: apolipoprotein L, 3
  ENST ID: ENST00000531195
  CDS Start-End: 1-157
ttatgcagatgcacggctggaggtgggatccacacagctcagaacagctggatcttgctcacactctttcaagagaagcttccttgggttaagaaaaaaaacgaacccttccagtcaggtcagtgactggagagctccatggaaagtctctcagtgacctggctgctggcaccatggactcagattttgaagacactggtgtaaagcgtttgacaataggcacatggcagaaggaagcgatcactggaatatttcccgtacatggggagaaagcatggtggaaagctcactttctggtgattctcagctgaaatagatcggttcctccacaaagcaccatggcacttccctggtgaatcactcttctcaggatgccttagtaaaacgccacaggctgggtggctccaacaactgatgtattttctcacagttctggaggcaaaaattccaagaaaagaaacgctttactgaagaggccaccaaatacttccgggagagagtcagcccagtgcatctgcaaatcctgctgactaacaatgaagcctggaagagattcgtgactgcggctg

SEQ ID NO: 108223 - DNA, 563 bp, Homo sapiens
  Payload ID: 1270
  Gene Symbol: APOL3
  Gene Name: apolipoprotein L, 3
  ENST ID: ENST00000530895
  CDS Start-End: 1-113
attatgcagatgcacggctggaggtgggatccacacagctcagaacagctggatcttgctcacactctttcaagagaagcttccttggacaaaaggaccctgccttggtgtgagagtgagggcagagggagctggagcaagtagaatttctctaaataccagctggctggggcccaggagattaaaaaacaccgggctaggttggtcttggcatttgctgacacgcaaagggattgcagagatccagcccctccaacctccctctgtccacaggtggctcacattcagtcccacaatttgctttctcctcctcaagggttaagaaaaaaaacgaacccttccagtcaggtcagtgactggagagctccatggaaagtctctcagtgacctggctgctggcaccatggactcagattttgaagacactggtgtaaagcgtttgacaataggcacatggcagaaggaagcgatcactggaatatttcccgtacatggggagaaagcatggtggaaagctcactttctggtgattctcagctgaaatagatcggttcctccacaaa

SEQ ID NO: 108224 - DNA, 547 bp, Homo sapiens
  Payload ID: 1270
  Gene Symbol: APOL3
  Gene Name: apolipoprotein L, 3
  ENST ID: ENST00000487783
  CDS Start-End: 1-119
attatgcagatgcacggctggaggtgggatccacacagctcagaacagctggatcttgctcacactctttcaagagaagcttccttgcttggttaccccagccaccgaggtttctctgaagctgacatttctcccatcaggaggcaggtgtatttctctttggcacttgctcacacttctccatcaactttaaggtggtggcaccacaatccaaaccattattgaggacaaaaggaccctgccttggtgtgagagtgagggcagagggagctggagcaagtagaatttctctaaataccagctggctggggcccaggagattaaaaaacaccgggctagggttaagaaaaaaaacgaacccttccagtcaggtcagtgactggagagctccatggaaagtctctcagtgacctggctgctggcaccatggactcagaaaagaaacgctttactgaagaggccaccaaatacttccgggagagagtcagcccagtgcatctgcaaatcctgctgactaacaatgaagcctggaagagattcgtgactg

SEQ ID NO: 108225 - DNA, 844 bp, Homo sapiens
  Payload ID: 1271
  Gene Symbol: APOL4
  Gene Name: apolipoprotein L, 4
  ENST ID: ENST00000328429
  CDS Start-End: 334-657
atcttgggggctggaggacgtgtctggttattatataggtgcacagctggaggtgagatccacacagctcagaccagctggatcttgctcagtctctgtcagaggaagatcccttggaggaggccccgcagcgacatggagggagctgctttgctgaaaatctttgtcgtctgcatctggaaccaaaatcacttcccggaattgaccaactggtagactcgcctagaggggacgcactgtgtcctagttgaggctaacagtcagtatccagcctcaacattcagcagaggccccagatcagcgtctgagccaggccaacaatgaccaaggaggatgggatcctgggtgcagctcatcacaagcgtcgggacaagcggacttttccttggtgtgagagtgagggaagagggagctggaatgaggtgcagcaaaaccatccaggctggacagtggctggacagttccaagggtcctctgggcccatcccctccccctgtccctacagctggttacagcagctccttctgtgtccattatgtgaacctgctgcctggagttcttgttctttctgtgacctcccagtatccacatctcagcatggccctctgtcagctggctgctcatgactggccgaggttaagctgtgtttgtgtctgacagaagcgcccatctgatatgaccccagttcagattcatagcttgcagtttcatggggggttacagctgttctgaaggtctggttggttttgtttgcccgggaatgtttcaggtctggtttttattttaattttgctttaatattcaccatccccaccccatcaataaaacacaaatttagtgctgg

SEQ ID NO: 108226 - DNA, 1825 bp, Homo sapiens
  Payload ID: 1271
  Gene Symbol: APOL4
  Gene Name: apolipoprotein L, 4
  Uniprot ID: Q9BPW4
  ENST ID: ENST00000332987
  CDS Start-End: 501-1547
gtgcttgattgtgagctgctgggaagttgtgactttcattttacctttcgaattcctgggtatatcttgggggctggaggacgtgtctggttattatataggtgcacagctggaggtgagatccacacagctcagaccagctggatcttgctcagtctctgtcagaggaagatcccttggaggaggccccgcagcgacatggagggagctgctttgctgaaaatctttgtcgtctgcatctggtgagcttggctcagagccctgaggtgggagggagggctccctgtctgggctgcacaattgggcagggcttgggctgggccaggagccatgtgggtttttctaggaaccaaaatcacttcccggaattgaccaactggtagactcgcctagaggggacgcactgtgtcctagttgaggctaacagtcagtatccagcctcaacattcagcagaggccccagatcagcgtctgagccaggccaacaatgaccaaggaggatgggatcctgggtgcagctcatcacaagcgtcggggtgcagcaaaaccatccaggctggacagtggctggacagttccaagaaaagaaacgcttcactgaagaagtcattgaatacttccagaagaaagttagcccagtgcatctgaaaatcctgctgactagcgatgaagcctggaagagatttgtgcgtgtggctgaattgcccagggaagaggcagatgctctctatgaagctctgaagaatcttacaccatatgtggctattgaggacaaagacatgcagcaaaaagaacagcagtttagggagtggtttttgaaagagtttcctcaaatcagatggaagattcaggagtccatagaaaggcttcgtgtcattgcaaatgagattgaaaaggtccacagaggctgcgtcatcgccaatgtggtgtctggctccactggcatcctgtctgtcattggcgttatgttggcaccatttacagcagggctgagcctgagcattactgcagctggggtagggctgggaatagcatctgccacggctgggatcgcctccagcatcgtggagaacacatacacaaggtcagcagaactcacagccagcaggctgactgcaaccagcactgaccaattggaggcattaagggacattctgcgtgacatcacacccaatgtgctttcttttgcacttgattttgacgaagccacaaaaatgattgcgaatgatgtccatacactcaggagatctaaagccactgttggacgccctttgattgcttggcgatatgtacctataaatgttgttgagacactgagaacacgtggggcccccacccggatagtgagaaaagtagcccggaacctgggcaaggccacttcaggtgtccttgttgtgctggatgtagtcaaccttgtgcaagactcactggacttgcacaagggggcaaaatccgagtctgctgagtcgctgaggcagtgggctcaggagctggaggagaatctcaatgagctcacccatatccatcagagtctaaaagcaggctaggcccaattgttgcgggaagtcagggaccccaaacggagggactggctgaagccatggcagaagaacgtggattgtgaagatttcatggacatttattagttccccaaattaatacttttataatttcctatgcctgtctttaccgcaatctctaaacacaaattgtgaagatttcatggacactgatcacttccccaatcaatacccttgtgatttcttatgcctgtctttactttaatctcctaatcctgtcagctgaggaggatgtatgtcacctc

SEQ ID NO: 108227 - DNA, 3227 bp, Homo sapiens
  Payload ID: 1271
  Gene Symbol: APOL4
  Gene Name: apolipoprotein L, 4
  Uniprot ID: Q9BPW4
  ENST ID: ENST00000352371
  CDS Start-End: 226-1281
gaggtgctggggagcagcgtgtttgctgtgcttgattgtgagctgctgggaagttgtgactttcattttacctttcgaattcctgggtatatcttgggggctggaggacgtgtctggttattatataggtgcacagctggaggtgagatccacacagctcagaccagctggatcttgctcagtctctgtcagaggaagatcccttggaggaggccccgcagcgacatggagggagctgctttgctgaaaatctttgtcgtctgcatctgggtgcagcaaaaccatccaggctggacagtggctggacagttccaagaaaagaaacgcttcactgaagaagtcattgaatacttccagaagaaagttagcccagtgcatctgaaaatcctgctgactagcgatgaagcctggaagagatttgtgcgtgtggctgaattgcccagggaagaggcagatgctctctatgaagctctgaagaatcttacaccatatgtggctattgaggacaaagacatgcagcaaaaagaacagcagtttagggagtggtttttgaaagagtttcctcaaatcagatggaagattcaggagtccatagaaaggcttcgtgtcattgcaaatgagattgaaaaggtccacagaggctgcgtcatcgccaatgtggtgtctggctccactggcatcctgtctgtcattggcgttatgttggcaccatttacagcagggctgagcctgagcattactgcagctggggtagggctgggaatagcatctgccacggctgggatcgcctccagcatcgtggagaacacatacacaaggtcagcagaactcacagccagcaggctgactgcaaccagcactgaccaattggaggcattaagggacattctgcgtgacatcacacccaatgtgctttcttttgcacttgattttgacgaagccacaaaaatgattgcgaatgatgtccatacactcaggagatctaaagccactgttggacgccctttgattgcttggcgatatgtacctataaatgttgttgagacactgagaacacgtggggcccccacccggatagtgagaaaagtagcccggaacctgggcaaggccacttcaggtgtccttgttgtgctggatgtagtcaaccttgtgcaagactcactggacttgcacaagggggcaaaatccgagtctgctgagtcgctgaggcagtgggctcaggagctggaggagaatctcaatgagctcacccatatccatcagagtctaaaagcaggctaggcccaattgttgcgggaagtcagggaccccaaacggagggactggctgaagccatggcagaagaacgtggattgtgaagatttcatggacatttattagttccccaaattaatacttttataatttcctatgcctgtctttaccgcaatctctaaacacaaattgtgaagatttcatggacactgatcacttccccaatcaatacccttgtgatttcttatgcctgtctttactttaatctcctaatcctgtcagctgaggaggatgtatgtcacctcaggaccatgtgataattgcgttaactgcacaaattgtagagcatgtgtgtttgaacaatatgaaatctgggcaccttgaaaaaagaacaggataacagcaattgttcagggaataagagagataaccttaaactctgaccaacagtgagcctggtggaacagagtcatatttctcttctttcaaaagcaaatgggagaaatatcgctgaattctttttctcagcaaggaacatccctgagaaagagaatgcacccctgagggtgggtctataaatggcctccttgggtgtggccatcttctatggtcgagactgtagggatgaaataaaccccagtctcccatagcgctcccaggcttattaggaagaggaaattcccgcctaataaattttggtcagaccggttgctctcaaaaccctgtctcctgataagatgttatcaatgacaatggtgcccgaaacctcattagcaattttaatttctccccggtcctgtgttcctgtgatctcgccctgcctccacttgccttgtgatattctattaccttgtgaagtaggtgatctttgtgacccacacccacaccctattcatacactccctccccttttgaaagtccctaataaaaacttgctggttttgcggcttgtgaggcatcacggaacctaccgatgtgtgatgtctcccctggacacctagctttaaaatttctctcttttgtactctgtgcctttatttctcaaaccggccaacacttagggaaaatagaaaagaacctacgtgaccatcggggcaggttccccgatacccaatgaccccagagcagtgcagccaccagggaaggtgagccagacacaggccgggacaaaacgcagacattttttaggggaataaagagggcgaggtaaagtttatggaactcagtgttaggaactttggcatctgtagctgagcacagcaggggaggggttactcaagatggcaagtgcgccaaggagaaggcagaaatgctggggcctggaataagggaggagaggggactggagagtgtggggaatggaaagaagcagtttactctagactaaagagtatattgggggaggaagagagggaggcacgtaggaacaagcaatgagaagaccaggaaaagaaagagctgaaaatggagaaagccacagttagaactgttggatacaggagaagaaacagcggctccactaaagacccgccccccggttggatgtccttccaagaatggaatccttccctggtgatggtctctcaccctgtcttaccagcatccactctcccttgtcctcccgggggtgtatctgagtcagccagtggcttcttgatgatggtggtggtggttgtagtgtgacaggtcccctttaggttatttaagggtgcatgtcccctgcttgaaccctgaaggccgggtaatgagccatttccatggtgcccagctgaggaccaggtgtctctgagaatccaaacatcctggagagtatctgagaaccaaccaagtaaaagtctcgttgctcatatatagtagacaaagagccagaaaattaactgaaaagcagtttagacattgggggaggctggatctctcgagctgtcttgctgagtgccctgtgtgtaagtcctaataaacttagctactcgcca

SEQ ID NO: 108228 - DNA, 845 bp, Homo sapiens
  Payload ID: 1271
  Gene Symbol: APOL4
  Gene Name: apolipoprotein L, 4
  ENST ID: ENST00000397275
  CDS Start-End: 334-657
atcttgggggctggaggacgtgtctggttattatataggtgcacagctggaggtgagatccacacagctcagaccagctggatcttgctcagtctctgtcagaggaagatcccttggaggaggccccgcagcgacatggagggagctgctttgctgaaaatctttgtcgtctgcatctggaaccaaaatcacttcccggaattgaccaactggtagactcgcctagaggggacgcactgtgtcctagttgaggctaacagtcagtatccagcctcaacattcagcagaggccccagatcagcgtctgagccaggccaacaatgaccaaggaggatgggatcctgggtgcagctcatcacaagcgtcgggacaagcggacttttccttggtgtgagagtgagggaagagggagctggaatgaggtgcagcaaaaccatccaggctggacagtggctggacagttccaagggtcctctgggcccatcccctccccctgtccctacagctggttacagcagctccttctgtgtccattatgtgaacctgctgcctggagttcttgttctttctgtgacctcccagtatccacatctcagcatggccctctgtcagctggctgctcatgactggccgaggttaagctgtgtttgtgtctgacagaagcgcccatctgatatgaccccagttcagattcatagcttgcagtttcatggggggttacagctgttctgaaggtctggttggttttgtttgcccgggaatgtttcaggtctggtttttattttaattttgctttaatattcaccatccccaccccatcaataaaacacaaatttagtgctgga

SEQ ID NO: 108229 - DNA, 512 bp, Homo sapiens
  Payload ID: 1271
  Gene Symbol: APOL4
  Gene Name: apolipoprotein L, 4
  ENST ID: ENST00000436763
  CDS Start-End: 436-512
gtgcttgattgtgagctgctgggaagttgtgactttcattttacctttcgaattcctgggtatatcttgggggctggaggacgtgtctggttattatataggtgcacagctggaggtgagatccacacagctcagaccagctggatcttgctcagtctctgtcagaggaagatcccttggaggagcacactgtctcaacccctcttttcctgcccaaggaggaggccccgcagcgacatggagggagctgctttgctgaaaatctttgtcgtctgcatctggaaccaaaatcacttcccggaattgaccaactggtagactcgcctagaggggacgcactgtgtcctagttgaggctaacagtcagtatccagcctcaacattcagcagaggccccagatcagcgtctgagccaggccaacaatgaccaaggaggatgggatcctgggtgcagctcatcacaagcgtcggggtgcagcaaaaccatccaggctggacagtggctggacagtt

SEQ ID NO: 108230 - DNA, 543 bp, Homo sapiens
  Payload ID: 1271
  Gene Symbol: APOL4
  Gene Name: apolipoprotein L, 4
  ENST ID: ENST00000419360
  CDS Start-End: 350-543
gtgcttgattgtgagctgctgggaagttgtgactttcattttacctttcgaattcctgggtatatcttgggggctggaggacgtgtctggttattatataggtgcacagctggaggtgagatccacacagctcagaccagctggatcttgctcagtctctgtcagaggaagatcccttggaggaggccccgcagcgacatggagggagctgctttgctgaaaatctttgtcgtctgcatctgaggggacgcactgtgtcctagttgaggctaacagtcagtatccagcctcaacattcagcagaggccccagatcagcgtctgagccaggccaacaatgaccaaggaggatgggatcctgggtgcagctcatcacaagcgtcggggtgcagcaaaaccatccaggctggacagtggctggacagttccaagaaaagaaacgcttcactgaagaagtcattgaatacttccagaagaaagttagcccagtgcatctgaaaatcctgctgactagcgatgaagcctggaagagatttgtgcgtgt

SEQ ID NO: 108231 - DNA, 520 bp, Homo sapiens
  Payload ID: 1271
  Gene Symbol: APOL4
  Gene Name: apolipoprotein L, 4
  ENST ID: ENST00000457630
  CDS Start-End: 305-520
gtgcttgattgtgagctgctgggaagttgtgactttcattttacctttcgaattcctgggtatatcttgggggctggaggacgtgtctggttattatataggtgcacagctggaggtgagatccacacagctcagaccagctggatcttgctcagtctctgtcagaggaagatcccttggaggaggccccgcagcgacatggagggagctgctttgctgaaaatctttgtcgtctgcatctgcctcaacattcagcagaggccccagatcagcgtctgagccaggccaacaatgaccaaggaggatgggatcctgggtgcagctcatcacaagcgtcggggtgcagcaaaaccatccaggctggacagtggctggacagttccaagaaaagaaacgcttcactgaagaagtcattgaatacttccagaagaaagttagcccagtgcatctgaaaatcctgctgactagcgatgaagcctggaagagatttgtgcgtgtggctgaattgcccagggaagag

SEQ ID NO: 108232 - DNA, 616 bp, Homo sapiens
  Payload ID: 1271
  Gene Symbol: APOL4
  Gene Name: apolipoprotein L, 4
  ENST ID: ENST00000493203
  CDS Start-End: 144-356
acttcccggaattgaccaactggtagactcgcctagaggggacgcactgtgtcctagttgaggctaacagtcagtatccagcctcaacattcagcagaggccccagatcagcgtctgagccaggccaacaatgaccaaggaggatgggatcctgggtgcagctcatcacaagcgtcggggtgcagcaaaaccatccaggctggacagtggctggacagttccaagaaaagaaacgcttcactgaagaagtcattgaatacttccagaagaaagttagcccagtgcatctgaaaatcctgctgactagcgatgaagcctggaagagatttgtgcgtgtggctgaattgcccaggtaacctccatggggttacctccttggggcaccccggtgatgccacccagatctccccgggctagttttctctggcaggcacacctcctccaggcagccccctctgctgggcttgaggatgtccctctcagcagtgcaggaagaatatttcctccaagtgcttcgctggcagtgagtgacctcaggctgaggggagaagaagcccacaagggcaggggaagaggcagatgctctctatgaagctctgaagaatcttacaccata

SEQ ID NO: 108233 - DNA, 3423 bp, Homo sapiens
  Payload ID: 1271
  Gene Symbol: APOL4
  Gene Name: apolipoprotein L, 4
  Uniprot ID: Q9BPW4
  ENST ID: ENST00000616056
  CDS Start-End: 431-1477
actgcaggaggtgctggggagcagcgtgtttgctgtgcttgattgtgagctgctgggaagttgtgactttcattttacctttcgaattcctgggtatatcttgggggctggaggacgtgtctggttattatataggtgcacagctggaggtgagatccacacagctcagaccagctggatcttgctcagtctctgtcagaggaagatcccttggaggaggccccgcagcgacatggagggagctgctttgctgaaaatctttgtcgtctgcatctggaaccaaaatcacttcccggaattgaccaactggtagactcgcctagaggggacgcactgtgtcctagttgaggctaacagtcagtatccagcctcaacattcagcagaggccccagatcagcgtctgagccaggccaacaatgaccaaggaggatgggatcctgggtgcagctcatcacaagcgtcggggtgcagcaaaaccatccaggctggacagtggctggacagttccaagaaaagaaacgcttcactgaagaagtcattgaatacttccagaagaaagttagcccagtgcatctgaaaatcctgctgactagcgatgaagcctggaagagatttgtgcgtgtggctgaattgcccagggaagaggcagatgctctctatgaagctctgaagaatcttacaccatatgtggctattgaggacaaagacatgcagcaaaaagaacagcagtttagggagtggtttttgaaagagtttcctcaaatcagatggaagattcaggagtccatagaaaggcttcgtgtcattgcaaatgagattgaaaaggtccacagaggctgcgtcatcgccaatgtggtgtctggctccactggcatcctgtctgtcattggcgttatgttggcaccatttacagcagggctgagcctgagcattactgcagctggggtagggctgggaatagcatctgccacggctgggatcgcctccagcatcgtggagaacacatacacaaggtcagcagaactcacagccagcaggctgactgcaaccagcactgaccaattggaggcattaagggacattctgcgtgacatcacacccaatgtgctttcttttgcacttgattttgacgaagccacaaaaatgattgcgaatgatgtccatacactcaggagatctaaagccactgttggacgccctttgattgcttggcgatatgtacctataaatgttgttgagacactgagaacacgtggggcccccacccggatagtgagaaaagtagcccggaacctgggcaaggccacttcaggtgtccttgttgtgctggatgtagtcaaccttgtgcaagactcactggacttgcacaagggggcaaaatccgagtctgctgagtcgctgaggcagtgggctcaggagctggaggagaatctcaatgagctcacccatatccatcagagtctaaaagcaggctaggcccaattgttgcgggaagtcagggaccccaaacggagggactggctgaagccatggcagaagaacgtggattgtgaagatttcatggacatttattagttccccaaattaatacttttataatttcctatgcctgtctttaccgcaatctctaaacacaaattgtgaagatttcatggacactgatcacttccccaatcaatacccttgtgatttcttatgcctgtctttactttaatctcctaatcctgtcagctgaggaggatgtatgtcacctcaggaccatgtgataattgcgttaactgcacaaattgtagagcatgtgtgtttgaacaatatgaaatctgggcaccttgaaaaaagaacaggataacagcaattgttcagggaataagagagataaccttaaactctgaccaacagtgagcctggtggaacagagtcatatttctcttctttcaaaagcaaatgggagaaatatcgctgaattctttttctcagcaaggaacatccctgagaaagagaatgcacccctgagggtgggtctataaatggcctccttgggtgtggccatcttctatggtcgagactgtagggatgaaataaaccccagtctcccatagcgctcccaggcttattaggaagaggaaattcccgcctaataaattttggtcagaccggttgctctcaaaaccctgtctcctgataagatgttatcaatgacaatggtgcccgaaacctcattagcaattttaatttctccccggtcctgtgttcctgtgatctcgccctgcctccacttgccttgtgatattctattaccttgtgaagtaggtgatctttgtgacccacacccacaccctattcatacactccctccccttttgaaagtccctaataaaaacttgctggttttgcggcttgtgaggcatcacggaacctaccgatgtgtgatgtctcccctggacacctagctttaaaatttctctcttttgtactctgtgcctttatttctcaaaccggccaacacttagggaaaatagaaaagaacctacgtgaccatcggggcaggttccccgatacccaatgaccccagagcagtgcagccaccagggaaggtgagccagacacaggccgggacaaaacgcagacattttttaggggaataaagagggcgaggtaaagtttatggaactcagtgttaggaactttggcatctgtagctgagcacagcaggggaggggttactcaagatggcaagtgcgccaaggagaaggcagaaatgctggggcctggaataagggaggagaggggactggagagtgtggggaatggaaagaagcagtttactctagactaaagagtatattgggggaggaagagagggaggcacgtaggaacaagcaatgagaagaccaggaaaagaaagagctgaaaatggagaaagccacagttagaactgttggatacaggagaagaaacagcggctccactaaagacccgccccccggttggatgtccttccaagaatggaatccttccctggtgatggtctctcaccctgtcttaccagcatccactctcccttgtcctcccgggggtgtatctgagtcagccagtggcttcttgatgatggtggtggtggttgtagtgtgacaggtcccctttaggttatttaagggtgcatgtcccctgcttgaaccctgaaggccgggtaatgagccatttccatggtgcccagctgaggaccaggtgtctctgagaatccaaacatcctggagagtatctgagaaccaaccaagtaaaagtctcgttgctcatatatagtagacaaagagccagaaaattaactgaaaagcagtttagacattgggggaggctggatctctcgagctgtcttgctgagtgccctgtgtgtaagtcctaataaacttagctactcgcca

SEQ ID NO: 108234 - DNA, 1438 bp, Homo sapiens
  Payload ID: 1272
  Gene Symbol: APOL5
  Gene Name: apolipoprotein L, 5
  Uniprot ID: Q9BWW9
  ENST ID: ENST00000249044
  CDS Start-End: 1-1302
atgccatgtggcaaacaaggaaatttgcaagttcccggttccaaggtgttacctggcttgggagaaggttgtaaagaaatgtggcttcgaaaggtaatctacggaggtgaggtctgggggaagtccccagaacctgagttcccctcactcgtgaacctgtgccagagttggaaaattaacaatttgatgtcaactgtccacagtgatgaggctggtatgctgtcctactttctgtttgaagagctgatgcgatgtgacaaagattccatgccagatggaaatctgtcagaggaggaaaaattgtttctctcatattttcctttgcacaagtttgagctagaacagaacatcaaagaacttaacacccttgcggaccaagttgacaccactcacgagttgcttaccaagaccagcctggtggccagctcttccggggctgtttctggggtcatgaacatcctgggtttggccctagcacctgtgacagcaggaggcagtctcatgctctcagcaactgggacagggttgggggcagcagctgccatcaccaacatagtaacaaatgtcttagaaaatagaagcaattcagcagcaagagacaaagccagccgactggggcctctgacaacatcacatgaggctttcggaggaataaattggtctgaaatcgaggctgctggcttttgtgttaataagtgtgtaaaagctatccagggcatcaaggatcttcatgcctaccagatggccaaatccaactctggcttcatggctatggtcaagaattttgtggccaagagacacatccctttctggacggctagaggggtgcagagagcctttgagggcacaactctggccatgaccaatggtgcctgggtgatgggtgctgctggggctggcttcttacttatgaaagacatgagcagcttcctgcagagctggaagcacctggaggatggggcaaggacggagacagcagaggaactgagagcacttgctaagaagctggagcaggagctggaccggctcacccagcaccaccggcacctgccgcagaaggcgagccagacctgttccagctcccggggcagggctgttcgaggatcccgtgtggttaaaccagaagggtctcgctcacctctcccctggcctgttgtggagcaccagcctaggctgggccctggcgtggcactgaggacaccaaagaggacagtctctgccccaaggatgcttggccaccagccagccccaccagcaccagcaagaaaggggagacaggccccgggaagacaccgacaatgagaagagttggtcaccctgtcaccactgaaccttgatttaacagaggcaaaatgcaagtcttccctgaagaatactgggggtagggaaacttctagtggcaatgataaaaccagcagcaatgataatagaaggcaaa

SEQ ID NO: 108235 - DNA, 1438 bp, Homo sapiens
  Payload ID: 1272
  Gene Symbol: APOL5
  Gene Name: apolipoprotein L, 5
  ENST ID: ENST00000617827
  CDS Start-End: 1-1302
atgccatgtggcaaacaaggaaatttgcaagttcccggttccaaggtgttacctggcttgggagaaggttgtaaagaaatgtggcttcgaaaggtaatctacggaggtgaggtctgggggaagtccccagaacctgagttcccctcactcgtgaacctgtgccagagttggaaaattaacaatttgatgtcaactgtccacagtgatgaggctggtatgctgtcctactttctgtttgaagagctgatgcgatgtgacaaagattccatgccagatggaaatctgtcagaggaggaaaaattgtttctctcatattttcctttgcacaagtttgagctagaacagaacatcaaagaacttaacacccttgcggaccaagttgacaccactcacgagttgcttaccaagaccagcctggtggccagctcttccggggctgtttctggggtcatgaacatcctgggtttggccctagcacctgtgacagcaggaggcagtctcatgctctcagcaactgggacagggttgggggcagcagctgccatcaccaacatagtaacaaatgtcttagaaaatagaagcaattcagcagcaagagacaaagccagccgactggggcctctgacaacatcacatgaggctttcggaggaataaattggtctgaaatcgaggctgctggcttttgtgttaataagtgtgtaaaagctatccagggcatcaaggatcttcatgcctaccagatggccaaatccaactctggcttcatggctatggtcaagaattttgtggccaagagacacatccctttctggatggctagaggggtgcagagagcctttgagggcacaactctggccatgaccaatggtgcctgggtgatgggtgctgctggggctggcttcttacttatgaaagacatgagcagcttcctgcagagctggaagcacctggaggatggggcaaggacggagacagcagaggaactgagagcacttgctaagaagctggagcaggagctggaccggctcacccagcaccaccggcacctgccgcagaaggcgagccagacctgttccagctcccggggcagggctgttcgaggatcccgtgtggttaaaccagaagggtctcgctcacctctcccctggcctgttgtggagcaccagcctaggctgggccctggcgtggcactgaggacaccaaagaggacagtctgtgccccaaggatgcttggccaccagccagccccaccagcaccagcaagaaaggggagacaggccccgggaagacaccgacaatgagaagagttggtcaccctgtcaccactgaaccttgatttaacagaggcaaaatgcaagtcttccctgaagaatactgggggtagggaaacttctagtggcaatgataaaaccagcagcaatgataatagaaggcaaa

SEQ ID NO: 108236 - DNA, 10121 bp, Homo sapiens
  Payload ID: 1273
  Gene Symbol: APOL6
  Gene Name: apolipoprotein L, 6
  Uniprot ID: Q9BWW8
  ENST ID: ENST00000409652
  CDS Start-End: 277-1308
gaagagccctagagctttgctttttctctcctgcagcacttaaccgaaaccagttttgcaatcaattcctgttcaaaggccaccctactcttcctatccgtctttctccagcccagacactcacagccccctgccagaccaggggacctcggagaggcaaggacagaggttcaggatcttcctctccctcgggacccaaggccacaaaggagagctccgtggagagaagaaaatcatttgactcctggggacacagatttgctgccacagaggctgatggacaaccaggcggagagagaaagtgaggctggtgttggtttgcaaagggatgaggatgacgctcctctgtgtgaagacgtggagctacaagacggagatctgtcccccgaagaaaaaatatttttgagagaatttcccagattgaaagaagatctgaaagggaacattgacaagctccgtgccctcgcagacgatattgacaaaacccacaagaaattcaccaaggctaacatggtggccacctctactgctgtcatctctggagtgatgagcctcctgggtttagcccttgccccagcaacaggaggaggaagcctgctgctctccaccgctggtcaaggtttggcaacagcagctggggtcaccagcatcgtgagtggtacgttggaacgctccaaaaataaagaagcccaagcacgggcggaagacatactgcccacctacgaccaagaggacagggaggatgaggaagagaaggcagactatgtcacagctgctggaaagattatctataatcttagaaacaccttgaagtatgccaagaaaaacgtccgtgcattttggaaactcagagccaacccacgcttggccaatgctaccaagcgtcttctgaccactggccaagtctcctcccggagccgcgtgcaggtgcaaaaggcctttgcgggaacaacactggcgatgaccaaaaatgctcgcgtgctgggaggtgtgatgtccgccttctcccttggctatgacttggccactctctcaaaggaatggaagcacctgaaggaaggagcaaggacaaagtttgcggaagagttgagagccaaggccttggagctggagaggaaactcacagaactcacccagctctacaagagcttgcagcagaaagtgaggtcaagggccagaggggtggggaaggatttaactgggacctgcgaaaccgaggcttactggaaggagttaagggagcatgtgtggatgtggctgtggctgtgtgtgtgtctgtgtgtctgtgtgtatgtacagtttacatgaatgttcctcaggacatggcatacaatggccttggaggtccaaataatatcaagtacatcttggagatgagggtgcctgtcctggacagacctcggcatgccttctgtttctccttcaatgctccttaaggcctatgtgctgggaaaagggtcttccctgtttgtttgtttgtttgtttgtttgtttgttttgagacagggtctctgttgcccaggctggagtgcagtggcgtaatctcggctcactgcaacctctgcctcctgagtgcaagcaagtctcctgcctcagcctcccaagtagctgggattacaggcacgcaccaccacgcccagctaattttggtatttttttgtagagacagggtttcaccattttggccaggctggtctcgaattcctgacctcaagtgatccacccaccttggcctcccaaaatgctgggattacaagcgtgagctaccctgcccagccgggtcttcccagttttaacaaagaggtcacagagccacaggcggagttaggaactaaattgtctcctcctcccaattcatatgttgaagtcctaaaccaaaatgtggctgtatttagagatggaccctttgggaggtaattagggttgactgaggccatagggtgaggtcctaacccgatggaattgacttctttataagaggaggaggaaatacaagagggcctccccacccctgctgcacacctacactgaaggaaggctatttgcagatgcagcaagaaggcagccatctgcaaggcagaagaagagagccctcaccaggaactgaataagtcagtcagtctgggacttccagcctctagaactgtgaaacaataaatttctgtggtgtaagcaactcaatctatagtagtttgttactattttgttatagcaaccaaagatgactaagccagacaggttatgtcactcgccaagtgtcttagtctgtttgtgctgctataacaaaataccttagactgggtaatttacaaacaacagagatgtatccagagatccacagttctggaggctgagaagtctaaaatcaaggcaccagcagattccacatctcgtgaaggctcactctctgcttcacagatggcactgtcttgctgtgttctcacatggcagaaggggcaaacaagcccccctgggcctcttttataaaggcactaactctatgcctaaaggcagggccctcatgactctatcacctaccaaaaggctccacttctttatactattggaggggtagaaggaacttcctttctagaccttgaaggtttaagaatttgaatctataaaacaagctgacaatagacagattaacaggagaaaaagcatatacattttttaatgtgggccagatggcagaagcttaaataacaccccaagctacaggaagtgaggcctctgatggggaggtagtgacacaggctgtgggagggggtagggggaggaagtctgtggtgagcaaagtttgccttattacactgataaagtgtaattacactaataaagctggatcacctgaggttaggagtttgagaacagcctggccaacatggcaaaaccctgtctctactataaatacaaaaattagccaggtgtagtggcagggcacttgtaatcctatctactcgggaggctgaggcaggagaatcgcttgaacccaggctgtaaaggttgcagtgagccaagatcatgccactgcactccagtctgggtgtcagaatgagaccccatctcaaaaaaaaaaaaaaaaaaaaaaaagaagaagaatacagtcatgtatctcttggtgacagggacgcattctgataaatgtgtcattaggcaattgcattgtagtgtgattatcacagattgtacttatacaaaacttagatggcatagcctactgcatacctaggctatatgggagagcctattgctcccaggctacgcacctgtacagcatgtgactactgaatactataggcaattgcagcacaatgggaaatatttgtgtatctaaacatatgtaaacagagaaaaaggaaagtaaaaatatggcataaaagataagaattggctctcctgtacagggcacttactacgaatggagcttgcagggctgagagttgctccagatgagtcagtgagtggtgaatgaatgtgaaggcctagggcattactgtatactactgtaggctttataaacacagcacacttagggtacacaaaatgcatattaaaacattttcttccttcagtatattaggcaataggaatttttcaagtccactataaatcttatcaaaccatggttgtatatgcagttgaccgaaacattgttattggacacataactatagttgaaagaataagcaaaaagtctatctaggtgtgctgtcttgagcaacttttaattattctcctgtcctgcaatatgagttaatcttctctgatcgatgtagattccaggaaggggtgtccaggacaattaccttccttctggagaaacttcccttaatcaaataagagaacttcaaagaaaatccctccctgtgctttggaagggaagggaggtgggcagcagtgggtcagagatagacctttgttctcttatttctgaggcccttcagtctcctttattcaaagcactcagcatgccaaagcaccctattttagggtatctttttctgagccctaaacactgtgttggggatgtcaactgtgacaggaaaatatcttggggccccagaatcactaaggaaaactcaagcttagggaaacttcttagggcaaacccacctcccactctattcaaagttatctctctgctcactgagatagatacatatctgattgcctcctttggaaaggctaatcagaaactcaaaagaatgcaactgtttgtgtctcacctatctgtgacctggaagctccctccccactgaaccaatgttcttcttacatatattgattaatgtcttatgtctccctaaaatgtataaaaccaaggtatgccccaaccatcttggccacatgtcatcaggacttcctgagtctgtgtcacagtgtgtcctcaaccttggcaaaataaactttctaaattaactgagacctgtctcggattttctgggttcacattttggaaaccatgaatggattctgggtggagatgcccctgacccttgacaaatctatcggtgcttggtaccagcatgagctaactttatggctcaaaccaataggacaatttgctgaggtctgagaggactccctccagaaaatccctgatctcttaaaatttggtagagatcggaagtttattttgctgtacaacacctctttttttggagttttacttgctcccaacaaggaaggcaagttttcctgctttcatgatgatggaaggcaggtgatgtttttatggagtttcagctttcttccaatgcacttagagcactcagaaattgtataatttgtgtgaccattgttagttttgcttaactgttttgttgtttgtttctgtcttagtcaaatctgaaggggaaccctaaattacggggtcaaggactctgaagtggtaggaaaacagccagcttaaaaaactttttttaaattttaattactataggggctttatttacataacacagccagctttttgctagccagaccaaactcaaagagcaatggctgtacttctgaaatagcaacactttgtcctagctgagatttggtaataagattttttttttaagtttttaaagaagctcagtggttgaaagtctgcttaactgaaacagtaacatccatgatgtgtgttttgtgcatgtttgtatttgaaaggccttcatgtttttgtttcttgtttgtttttctctcctaagaccttgtcttttttttgtagcaaaagttttttttttttttttccttttacttctcagttgactgaattctgttttcaccggattttttgactaaaatagctattgcaacagaggctactcttgggttaaggaagaatgtagtttcgttttatgtttaatatcgctcaaagaaaaataaaagcatctccctctaacaccaccagacttttcctctctgtaccttatcatgtaaattttgctatttgattttcacctgggttgtttcctttaatgtgcaaaaatttaaggctatttagctgacaactgcctagggttgtaaaacaggttatcaagaatctgaaagtctaagataggaaaaaaaagtgggggggcattataaatctataaaatgtacttctattggcatgcctaatacgtctttatatgtatgtatgtgttgtgtacacgatgttttagtgctaaaaatatgtaaaagagctctacttggcttaaagaaaaataaaagtgcttaaatcagatactaaaaaagaaaaggctagtcaaatgctttttcaaatttatgtaacttaagtaaaatctttaataaataaagtagctttaaaattattggtaaagtagtattagaaatgtcttaagaattgccagcatacatttttgtttgcattatattaatcaaacagttttatacttatccctgccaaataccagaaggtgtcaaaatttggcataggggttataaaactataaacccagcccaaaacagaatgatctttgcttgtgtaatttttaataaataagacattgatatgggtttaatgaaaacagctgcatcttgaatttagtaagattaccataacttctaatcctgtggctttaggcagtttagtccacagacaataaggaggtttgttttgggaaaggactgttattgtcattgtttcgaagctgaacttaaactaggttcctcccaaagttcattcggcctatgcccaggaatgaacaaggacagcttggaagttaagagcaaggtggagtcagttaggtcaaatcgtttttcactgtctcagttgtaattttgcaatggaagtttcataactttaaatcatgactatcacagtttttataaataatctaggtaaacaattaataaaataactaggtaaatgtaatgggataaatacttatagaccaactggacataatttagaatataaagtcatattaaattaaataatagataatttattatttgggtattttccaataaatatatcttgtaggaaaacattgttgcttaaaaaaaagtgtgtccttttttaaaaaaatggtgaacaagttttgtctaattcaaagcttattaaaaggttatatataaaacaaggtaaaaggaaccagaaaagaaaaaaaatgtaaataaagttataaaaataaagaattttttcaaggttaaaaagctgaaaaagaaataattttatataagaaagaattttatatggtaaatttagtcctaaaataaaataactggttgtttaacaaggagggatgttcaggacaaaccagaaagtccaagcatgtcatgaacattggtgtaagtcatgataagattttatatatatatatacacacacacacacacaccccaaaagcttttatataatcaagttgtcatattattattaagttttggtttgcttagggaagaaagagctaatttttaaaaaatcaaggttattacatccatgtatcttcctgtgtatgcttttaaagtccttgtaacattgagttacagggctttaactcctgtgtctgaaaaatcacaaacactgatgacaatcaaagcctcatcttaaggccccgtagaagatgccaatcaaaataaactgcattcctgaggcactaggcaagaaattaaagctattcaactcctcaaggcccagggactattgcggaagaggtgggcgcgtaagattgtaagggccgattttgaaagatccagtaagttcagtttctctatgaactaatcattcaagtcaaaggcacactgatgcaaaatcagtatatggacccctgtgtctgattagcaaggttttcttgaagcattaaccaactccttcataaaggttataaaaggcttatggaagttatattttataatcaagattaaatcttatagtttgtttacaaaattttgaaaatcaaatgtgattggcttcaggctgtttttattagggcttcttgtttagaaagttaagtcacctctctcaaagaatgaaggtttttgctttttttgaaatccttgaattatcacttggattaaataaatgactttacgatgacctgtaattttattttgtaatgtcaagtgttttaaaccttttgtatttgacaagctttccaaaatcaaattataaattatgtatttttctaacctaattaatcctttaagatcttagtttccctaaagtcctaaaatgacataatttggcttatttggtataaaaattatataggaagcattgtcaaatgtgaaatggtgtttggttttctttgggctgtatttgtataaatatgttattggtgtatgttccaaaattatgtgaaactcctataattctaatataacttagtgtacattatcagtaataatcataattgttatattaaaattattgtgtgccacagaggtaaaaaatttccttgtcagttttgtcttttgactatggctgccttaaaacttttttcttccatgcacaattgttgttttggtcctcttttttaaatatatttttattattatttttgagatggggactcactctgttgcccaggctggagtgcagcggcacgatcttggctcactgcaactgccacctcccaggttcaagcggttctcctgcctcagcctcccgagtagctgggattacaggcatacaccaccatgcccagctaatttttttgtattttcagtagagatggggtttcaccatgttggccaggctggtcttgaactcctgacctcaggtgatcagcccaccttggcctctcaaagtgctgaaattacagatgtgagccacacacctggcctattttggtcctctttagaaggtggttttataatcagctgtaaaactccaacaggtgctcttacatgcaggtttctgataactttggagattgtgacatcagaatagagggaaaagtttcaggactcatggagagctaaaatgttcatgagtatcaagcagaacaggaattaactgcatagactgaaccaatctttttgactttttgcttaaaatgtttgctgatcctttgttttgtgtttcagtcttaaaacttttcttttgagctattgacagcttttaacaatttagtatactcctatgacaaaatttggagcatatttgtttctctctacctgatttctccagaattcagaaactatttgtaagtattcttaacttatggtgatacagttatttgcataagtgcaataagaatctgttctaatttgtaacaggacacgattggagaaattggttgttttactaagactttgactggaatggtgtgcttttctttaaggaatcaaacttgacttatggaaccaataaagtccttggaaaaactggccccatattttgtgtacacagtctccgtacaagatttctgacctgtagtaagtaaagaatgtcactttctgacaggcacataagccccaggtttacctcagaacctcaagaggagaggaaattcacccaatttataagtatttgatggcacaaatccatggctgggcatggctttaagaaagtcttatctgagattcctcctgtggaacaaagttaattggttccagagattcaaagccagagttgctgtcagttcattggtagagatgccatcactgggcaagtgttctgaaaacatcttatctgaataacagcagtcctggagaacatctagggatctagcaaagcgagagatacatgaaggacataaaaacgtttttagaaagtccttggaaacagttctcatttcagacatgtaagcatgagctaggatgaaaagtgatttcatcctggtatctgcaattttcacattcattaggtttcaacatataaactttcaggggacacagacattcagactatagcaccaagctgtagaagctacatagttgtagaccagggtcagcaacccaagaagcctgacttccaagctgtgcttttaacttccccaccatgttgcacctaaagctttggagttttcctgtgattagtgtttttggtgttgttttattttttttcttacaggaactcttgcaagaagaaaggactatgagttcaactttagagggagccatggggactaaacaaaattctgaggccccctcaaccatctaaatggacttccttctgggccaggacactcgaaaattaaacctgaaagactggttcaggccatgatgggaagtgggagtcgaacatgcctcatcataccctccagcattaacatcaacacagaccttaaggctgataagaagcatttacaatctattctctctgaagtcttctacctggaggcttcatctgcatgataaaactttggtctccacaacctcttacaacccaggcattcctttctatcgataattactctttcaaccaattgccaatcagaaaattgttatatctacctataatctagaagcccccacatcaagttgttttgcctttctggacaggaccaatgtatatcttaaatgtatttgattgatctctcatgtctccctaaaatgtataaaaccacgctgttccccgaccacctggagcacatgttctcagggtctcctgagggctgtgtcacaggccatgttcacttacatttggctcagaataaatctcttcaaatatttta

SEQ ID NO: 108237 - DNA, 1184 bp, Homo sapiens
  Payload ID: 1274
  Gene Symbol: APOM
  Gene Name: apolipoprotein M
  Uniprot ID: O95445
  ENST ID: ENST00000375916
  CDS Start-End: 497-1063
cacagctagttttccctctaacgacttcttcaagatcaggggctatgtcttattcgtttttttatgtccccggggattagctagttcttgggaaacaactgggacttgggattcaaaacagtttgctaagtgaatgaatgagaggcccagtcaagctacttcccttcagtgctgcacagtgcaacaaataaccagctcagatacaggttcaaagaccacaggcttctccctggacagctcagctctcctcataactcctgagaaaccctggacatgccagggtgtactatggagtggttgcatccggaagagggggaggaagtcccaaacactaagtaatccaggtttgggttggaaaacaaggttgaagttactcattagcaggtgaaagggtcaagggtcgaacgcaagggagctgaaagcagagtggactgagcagccagtaggggagagagcagttaaggcacacagagcaccagctccctcctgcctgaagatgttccaccaaatttgggcagctctgctctacttctatggtattatccttaactccatctaccagtgccctgagcacagtcaactgacaactctgggcgtggatgggaaggagttcccagaggtccacttgggccagtggtactttatcgcaggggcagctcccaccaaggaggagttggcaacttttgaccctgtggacaacattgtcttcaatatggctgctggctctgccccgatgcagctccaccttcgtgctaccatccgcatgaaagatgggctctgtgtgccccggaaatggatctaccacctgactgaagggagcacagatctcagaactgaaggccgccctgacatgaagactgagctcttttccagctcatgcccaggtggaatcatgctgaatgagacaggccagggttaccagcgctttctcctctacaatcgctcaccacatcctcccgaaaagtgtgtggaggaattcaagtccctgacttcctgcctggactccaaagccttcttattgactcctaggaatcaagaggcctgtgagctgtccaataactgacctgtaacttcatctaagtccccagatgggtacaatgggagctgagttgttggagggagaagctggagacttccagctccagctcccactcaagataataaagataatttttcaatcctca

SEQ ID NO: 108238 - DNA, 922 bp, Homo sapiens
  Payload ID: 1274
  Gene Symbol: APOM
  Gene Name: apolipoprotein M
  ENST ID: ENST00000375918
  CDS Start-End: 239-628
ccccaaacctgccaccgacggccacttccgtttccccgatagtatttggggatctcgaagcgatacttccggctccccccaggtccccaagctttacttttgtggggcacgacgagaaagtccgcagccccaaacattcccagaggtccacttgggccagtggtactttatcgcaggggcagctcccaccaaggaggagttggcaacttttgaccctgtggacaacattgtcttcaatatggctgctggctctgccccgatgcagctccaccttcgtgctaccatccgcatgaaagatgggctctgtgtgccccggaaatggatctaccacctgactgaagggagcacagatctcagaactgaaggccgccctgacatgaagactgagctcttttccagctcatgcccaggtggaatcatgctgaatgagacaggccagggttaccagcgctttctcctctacaatcgctcaccacatcctcccgaaaagtgtgtggaggaattcaagtccctgacttcctgcctggactccaaagccttcttattgactcctaggaatcaaggtaaggggttaaaatctcataaaacaggattaggactcaccaagtcttctggtgttacagggtgaaagaggctcgtgtgatgtcaccagagggatgtggctaagagctgtgatgtcacctgagggaggcaggatgggttctgggctactcaaaagagaggtttctgagtttgcactggataaagggggcagagggtcatacgtggagggaaaagagccttagagactcccctttgacacagggaatgaaagaacacgttctcccccaccccattactatcaactttgcttttctccctggacttcccttctgtccttctttttccctccccccatcacagaggcctgtgagctgtccaa

SEQ ID NO: 108239 - DNA, 709 bp, Homo sapiens
  Payload ID: 1274
  Gene Symbol: APOM
  Gene Name: apolipoprotein M
  Uniprot ID: O95445
  ENST ID: ENST00000375920
  CDS Start-End: 238-588
cccaaacctgccaccgacggccacttccgtttccccgatagtatttggggatctcgaagcgatacttccggctccccccaggtccccaagctttacttttgtggggcacgacgagaaagtccgcagccccaaacattcccagaggtccacttgggccagtggtactttatcgcaggggcagctcccaccaaggaggagttggcaacttttgaccctgtggacaacattgtcttcaatatggctgctggctctgccccgatgcagctccaccttcgtgctaccatccgcatgaaagatgggctctgtgtgccccggaaatggatctaccacctgactgaagggagcacagatctcagaactgaaggccgccctgacatgaagactgagctcttttccagctcatgcccaggtggaatcatgctgaatgagacaggccagggttaccagcgctttctcctctacaatcgctcaccacatcctcccgaaaagtgtgtggaggaattcaagtccctgacttcctgcctggactccaaagccttcttattgactcctaggaatcaagaggcctgtgagctgtccaataactgacctgtaacttcatctaagtccccagatgggtacaatgggagctgagttgttggagggagaagctggagacttccagctccagctcccactcaagataataaagataatttttcaatcctca

SEQ ID NO: 108240 - DNA, 761 bp, Homo sapiens
  Payload ID: 1274
  Gene Symbol: APOM
  Gene Name: apolipoprotein M
  Uniprot ID: O95445
  ENST ID: ENST00000383438
  CDS Start-End: 74-640
agagtggactgagcagccagtaggggagagagcagttaaggcacacagagcaccagctccctcctgcctgaagatgttccaccaaatttgggcagctctgctctacttctatggtattatccttaactccatctaccagtgccctgagcacagtcaactgacaactctgggcgtggatgggaaggagttcccagaggtccacttgggccagtggtactttatcgcaggggcagctcccaccaaggaggagttggcaacttttgaccctgtggacaacattgtcttcaatatggctgctggctctgccccgatgcagctccaccttcgtgctaccatccgcatgaaagatgggctctgtgtgccccggaaatggatctaccacctgactgaagggagcacagatctcagaactgaaggccgccctgacatgaagactgagctcttttccagctcatgcccaggtggaatcatgctgaatgagacaggccagggttaccagcgctttctcctctacaatcgctcaccacatcctcccgaaaagtgtgtggaggaattcaagtccctgacttcctgcctggactccaaagccttcttattgactcctaggaatcaagaggcctgtgagctgtccaataactgacctgtaacttcatctaagtccccagatgggtacaatgggagctgagttgttggagggagaagctggagacttccagctccagctcccactcaagataataaagataatttttcaatcctca

SEQ ID NO: 108241 - DNA, 709 bp, Homo sapiens; identical to SEQ ID NO: 108239
  Payload ID: 1274
  Gene Symbol: APOM
  Gene Name: apolipoprotein M
  Uniprot ID: O95445
  ENST ID: ENST00000400157
  CDS Start-End: 238-588

SEQ ID NO: 108242 - DNA, 761 bp, Homo sapiens; identical to SEQ ID NO: 108240
  Payload ID: 1274
  Gene Symbol: APOM
  Gene Name: apolipoprotein M
  Uniprot ID: O95445
  ENST ID: ENST00000432598
  CDS Start-End: 74-640

SEQ ID NO: 108243 - DNA, 709 bp, Homo sapiens; identical to SEQ ID NO: 108239
  Payload ID: 1274
  Gene Symbol: APOM
  Gene Name: apolipoprotein M
  Uniprot ID: O95445
  ENST ID: ENST00000422771
  CDS Start-End: 238-588

SEQ ID NO: 108244 - DNA, 922 bp, Homo sapiens; identical to SEQ ID NO: 108238
  Payload ID: 1274
  Gene Symbol: APOM
  Gene Name: apolipoprotein M
  ENST ID: ENST00000452949
  CDS Start-End: 239-628

SEQ ID NO: 108245 - DNA, 709 bp, Homo sapiens; identical to SEQ ID NO: 108239
  Payload ID: 1274
  Gene Symbol: APOM
  Gene Name: apolipoprotein M
  Uniprot ID: O95445
  ENST ID: ENST00000416324
  CDS Start-End: 238-588

SEQ ID NO: 108246 - DNA, 761 bp, Homo sapiens; identical to SEQ ID NO: 108240
  Payload ID: 1274
  Gene Symbol: APOM
  Gene Name: apolipoprotein M
  Uniprot ID: O95445
  ENST ID: ENST00000436931
  CDS Start-End: 74-640

SEQ ID NO: 108247 - DNA, 922 bp, Homo sapiens; identical to SEQ ID NO: 108238
  Payload ID: 1274
  Gene Symbol: APOM
  Gene Name: apolipoprotein M
  ENST ID: ENST00000419996
  CDS Start-End: 239-628

SEQ ID NO: 108248 - DNA, 911 bp, Homo sapiens
  Payload ID: 1274
  Gene Symbol: APOM
  Gene Name: apolipoprotein M
  ENST ID: ENST00000430238
  CDS Start-End: 239-628
ccccaaacctgccaccgacggccacttccgtttccccgatagtatttggggatctcgaagcgatacttccggctccccccaggtccccaagctttacttttgtggggcacgacgagaaagtccgcagccccaaacattcccagaggtccacttgggccagtggtactttatcgcaggggcagctcccaccaaggaggagttggcaacttttgaccctgtggacaacattgtcttcaatatggctgctggctctgccccgatgcagctccaccttcgtgctaccatccgcatgaaagatgggctctgtgtgccccggaaatggatctaccacctgactgaagggagcacagatctcagaactgaaggccgccctgacatgaagactgagctcttttccagctcatgcccaggtggaatcatgctgaatgagacaggccagggttaccagcgctttctcctctacaatcgctcaccacatcctcccgaaaagtgtgtggaggaattcaagtccctgacttcctgcctggactccaaagccttcttattgactcctaggaatcaaggtaaggggttaaaatctcataaaacaggattaggactcaccaagtcttctggtgttacagggtgaaagaggctcgtgtgatgtcaccagagggatgtggctaagagctgtgatgtcacctgagggaggcaggatgggttctgggctactcaaaagagaggtttctgagtttgcactggataaagggggcagagggtcatacgtggagggaaaagagccttagagactcccctttgacacagggaatgaaagaacacgttctcccccaccccattactatcaactttgcttttctccctggacttcccttctgtccttctttttccctccccccatcacagaggcctgt

SEQ ID NO: 108249 - DNA, 761 bp, Homo sapiens; identical to SEQ ID NO: 108240
  Payload ID: 1274
  Gene Symbol: APOM
  Gene Name: apolipoprotein M
  Uniprot ID: O95445
  ENST ID: ENST00000441436
  CDS Start-End: 74-640

SEQ ID NO: 108250 - DNA, 761 bp, Homo sapiens; identical to SEQ ID NO: 108240
  Payload ID: 1274
  Gene Symbol: APOM
  Gene Name: apolipoprotein M
  Uniprot ID: O95445
  ENST ID: ENST00000430282
  CDS Start-End: 74-640

SEQ ID NO: 108251 - DNA, 710 bp, Homo sapiens
  Payload ID: 1274
  Gene Symbol: APOM
  Gene Name: apolipoprotein M
  Uniprot ID: O95445
  ENST ID: ENST00000425177
  CDS Start-End: 239-589
ccccaaacctgccaccgacggccacttccgtttccccgatagtatttggggatctcgaagcgatacttccggctccccccaggtccccaagctttacttttgtggggcacgacgagaaagtccgcagccccaaacattcccagaggtccacttgggccagtggtactttatcgcaggggcagctcccaccaaggaggagttggcaacttttgaccctgtggacaacattgtcttcaatatggctgctggctctgccccgatgcagctccaccttcgtgctaccatccgcatgaaagatgggctctgtgtgccccggaaatggatctaccacctgactgaagggagcacagatctcagaactgaaggccgccctgacatgaagactgagctcttttccagctcatgcccaggtggaatcatgctgaatgagacaggccagggttaccagcgctttctcctctacaatcgctcaccacatcctcccgaaaagtgtgtggaggaattcaagtccctgacttcctgcctggactccaaagccttcttattgactcctaggaatcaagaggcctgtgagctgtccaataactgacctgtaacttcatctaagtccccagatgggtacaatgggagctgagttgttggagggagaagctggagacttccagctccagctcccactcaagataataaagataatttttcaatcctca

SEQ ID NO: 108252 - DNA, 761 bp, Homo sapiens; identical to SEQ ID NO: 108240
  Payload ID: 1274
  Gene Symbol: APOM
  Gene Name: apolipoprotein M
  Uniprot ID: O95445
  ENST ID: ENST00000426800
  CDS Start-End: 74-640

SEQ ID NO: 108253 - DNA, 922 bp, Homo sapiens; identical to SEQ ID NO: 108238
  Payload ID: 1274
  Gene Symbol: APOM
  Gene Name: apolipoprotein M
  ENST ID: ENST00000426401
  CDS Start-End: 239-628

SEQ ID NO: 108254 - DNA, 922 bp, Homo sapiens; identical to SEQ ID NO: 108238
  Payload ID: 1274
  Gene Symbol: APOM
  Gene Name: apolipoprotein M
  ENST ID: ENST00000440956
  CDS Start-End: 239-628

SEQ ID NO: 108255 - DNA, 709 bp, Homo sapiens; identical to SEQ ID NO: 108239
  Payload ID: 1274
  Gene Symbol: APOM
  Gene Name: apolipoprotein M
  Uniprot ID: O95445
  ENST ID: ENST00000439902
  CDS Start-End: 238-588

SEQ ID NO: 108256 - DNA, 922 bp, Homo sapiens; identical to SEQ ID NO: 108238
  Payload ID: 1274
  Gene Symbol: APOM
  Gene Name: apolipoprotein M
  ENST ID: ENST00000425856
  CDS Start-End: 239-628

SEQ ID NO: 108257 - DNA, 709 bp, Homo sapiens; identical to SEQ ID NO: 108239
  Payload ID: 1274
  Gene Symbol: APOM
  Gene Name: apolipoprotein M
  Uniprot ID: O95445
  ENST ID: ENST00000443975
  CDS Start-End: 238-588

SEQ ID NO: 108258 - DNA, 1118 bp, Homo sapiens
  Payload ID: 1275
  Gene Symbol: APOO
  Gene Name: apolipoprotein O
  Uniprot ID: Q9BUR5
  ENST ID: ENST00000379226
  CDS Start-End: 233-829
gcgttcacccgctgcccgggcgcgacgcgctgcggctcagcgacgcggcttctagaaccgggtgattgaactaaaccttcgccgcaccgagtttgcagtacggccgtcacccgcaccgctgcctgcttgcggttggagaaatcaaggccctaccgggcctccgtagtcacctctctatagtgggcgtggccgaggccggggtgaccctgccggagcctccgctgccagcgacatgttcaaggtaattcagaggtccgtggggccagccagcctgagcttgctcaccttcaaagtctatgcagcaccaaaaaaggactcacctcccaaaaattccgtgaaggttgatgagctttcactctactcagttcctgagggtcaatcgaagtatgtggaggaggcaaggagccagcttgaagaaagcatctcacagctccgacactattgcgagccatacacaacctggtgtcaggaaacgtactcccaaactaagcccaagatgcaaagtttggttcaatgggggttagacagctatgactatctccaaaatgcacctcctggattttttccgagacttggtgttattggttttgctggccttattggactccttttggctagaggttcaaaaataaagaagctagtgtatccgcctggtttcatgggattagctgcctccctctattatccacaacaagccatcgtgtttgcccaggtcagtggggagagattatatgactggggtttacgaggatatatagtcatagaagatttgtggaaggagaactttcaaaagccaggaaatgtgaagaattcacctggaactaagtagaaaactccatgctctgccatcttaatcagttataggtaaacattggaaactccatagaataaatcagtatttctacagaaaaatggcatagaagtcagtattgaatgtattaaattggctttcttcttcaggaaaaactagaccagacctctgttatcttctgtgaaatcatcctacaagcaaactaacctggaatcccttcacctagagataatgtacaagccttagaactcctcattctcatgttgctatttatgtacctaattaaaacccaagttaaaaaaaaaaa

SEQ ID NO: 108259 - DNA, 714 bp, Homo sapiens
  Payload ID: 1275
  Gene Symbol: APOO
  Gene Name: apolipoprotein O
  ENST ID: ENST00000439528
  CDS Start-End: 1-537
gtctatgcagcaccaaaaaaggactcacctcccaaaaattccgtgaaggttgatgagctttcactctactcagttcctgagggtcaatcgaagtatgtggaggaggcaaggagccagcttgaagaaagcatctcacagctccgacactattgcgagccatacacaacctggtgtcaggaaacgtactcccaaactaagcccaagatgcaaagtttggttcaatgggggttagacagctatgactatctccaaaatgcacctcctggattttttccgagacttggtgttattggttttgctggccttattggactccttttggctagaggttcaaaaataaagaagctagtgtatccgcctggtttcatgggattagctgcctccctctattatccacaacaagccatcgtgtttgcccaggtcagtggggagagattatatgactggggtttacgaggatatatagtcatagaagatttgtggaaggagaactttcaaaagccaggaaatgtgaagaattcacctggaactaagtagaaaactccatgctctgccatcttaatcaggaaaaactagaccagacctctgttatcttctgtgaaatcatcctacaagcaaactaacctggaatcccttcacctagagataatgtacaagccttagaactcctcattctcatgttgctatttatgtacctaattaaaacccaagtta

SEQ ID NO: 108260 - DNA, 916 bp, Homo sapiens
  Payload ID: 1275
  Gene Symbol: APOO
  Gene Name: apolipoprotein O
  ENST ID: ENST00000490078
  CDS Start-End: 202-546
gcggctcagcgacgcggcttctagaaccgggtgattgaactaaaccttcgccgcaccgagtttgcagtacggccgtcacccgcaccgctgcctgcttgcggttggagaaatcaaggccctaccgggcctccgtagtcacctctctatagtgggcgtggccgaggccggggtgaccctgccggagcctccgctgccagcgacatgttcaaggtaattcagaggtccgtggggccagccagcctgagcttgctcaccttcaaagtctatgcagcaccaaaaaaggactcacctcccaaaaattccgtgaaggttgatgagctttcactctactcagttcctgagggtcaatcgaagtatgtggaggaggcaaggagccagcttgaagaaagcatctcacagctccgacactattgcgagccatacacaacctggtgtcagacagctatgactatctccaaaatgcacctcctggattttttccgagacttggtgttattggttttgctggccttattggactccttttggctagaggttcaaaaataaagaagctagtgtatccgcctggtttcatgggattagctgcctccctctattatccacaacaagccatcgtgtttgcccaggtcagtggggagagattatatgactggggtttacgaggatatatagtcatagaagatttgtggaaggagaactttcaaaagccaggaaatgtgaagaattcacctggaactaagtagaaaactccatgctctgccatcttaatcaggaaaaactagaccagacctctgttatcttctgtgaaatcatcctacaagcaaactaacctggaatcccttcacctagagataatgtacaagccttagaactcctcattctcatgttgctatttatgtacctaattaaaacccaa

SEQ ID NO: 108261 - DNA, 461 bp, Homo sapiens
  Payload ID: 1275
  Gene Symbol: APOO
  Gene Name: apolipoprotein O
  ENST ID: ENST00000634086
  CDS Start-End: 1-272
gattttttccgagacttggtgttattggttttgctggccttattggactccttttggctagaggttcaaaaataaagaagctagtgtatccgcctggtttcatgggattagctgcctccctctattatccacaacaagccatcgtgtttgcccaggtcagtggggagagattatatgactggggtttacgaggatatatagtcatagaagatttgtggaaggagaactttcaaaagccaggaaatgtgaagaattcacctggaactaagtagaaaactccatgctctgccatcttaatcagttataggaaaaactagaccagacctctgttatcttctgtgaaatcatcctacaagcaaactaacctggaatcccttcacctagagataatgtacaagccttagaactcctcattctcatgttgctatttatgtacctaattaaaacccaagttaaaaaaa

SEQ ID NO: 108262 - DNA, 1159 bp, Homo sapiens
  Payload ID: 1275
  Gene Symbol: APOO
  Gene Name: apolipoprotein O
  ENST ID: ENST00000633372
  CDS Start-End: 917-1159
agcttcgtggcttcacacatgctgattcctctgtctataatgtcctatacttgttttgtctttctgtagaactgcctaagagccgggagaattcatgcttttgaaacaaggggaatttcccttgtccctcttacagggcatgtgatgggagtgtggcccacttcttaggtgccccactgctcaaaacccctagggaaagcaggcagatgggcaggtcgtggggagtgtgggctccaaccccatggcagcgtctaggggtggatgtttacagcttctgcagccccagtgggcgtgtgttacgtgtgctcttttagttttgctgtcagtaggcagcttgtgttcatcagctcagttagaccctctgccttattgcaaggacagagggctttctgtatcctagggttcttgcctgagtataccagaaaaaccggatcacacgtgggcttggaggatgagtgcaaggttttattgaatggtggaagtagcactcagcagatggaaacggagccagaaggggtatggagtgggaaggtggttttcccctggagtcaggccgcttagcagccaggctctcctctgaccgccctcagccaaactccgcgttgtcctgccgttctgctgttggtggcctgccggagtctgtcactgtgttcttctgctggtaattcagaggtccgtggggccagccagcctgagcttgctcaccttcaaagtctatgcagcaccaaaaaaggactcacctcccaaaaattccgtgaaggttgatgagctttcactctactcagttcctgagggtcaatcgaagtatgtggaggaggcaaggagccagcttgaagaaagcatctcacagctccgacactattgcgagccatacacaacctggtgtcaggaaacgtactcccaaactaagcccaagatgcaaagtttggttcaatgggggttagacagctatgactatctccaaaatgcacctcctggattttttccgagacttggtgttattggttttgctggccttattggactccttttggctagaggttcaaaaataaagaagctagtgtatccgcctggtttcatgggattagctgcctccctctattatccacaacaagccatcgtgtttgcccaggtcagtggggagagattatatgactgg

SEQ ID NO: 108263 - DNA, 437 bp, Homo sapiens
  Payload ID: 1275
  Gene Symbol: APOO
  Gene Name: apolipoprotein O
  ENST ID: ENST00000633432
  CDS Start-End: 1-148
tggactccttttggctagaggttcaaaaataaagaagctagtgtatccgcctggtttcatgggattagctgcctccctctattatccacaacaagccatcgtgtttgcccagccaggaaatgtgaagaattcacctggaactaagtagaaaactccatgctctgccatcttaatcagttataggtaaacattggaaactccatagaataaatcagtatttctacagaaaaatggcatagaagtcagtattgaatgtattaaattggctttcttcttcaggaaaaactagaccagacctctgttatcttctgtgaaatcatcctacaagcaaactaacctggaatcccttcacctagagataatgtacaagccttagaactcctcattctcatgttgctatttatgtacctaattaaaacccaagttaaaaaaaaaaa

SEQ ID NO: 108264 - DNA, 1279 bp, Homo sapiens
  Payload ID: 1276
  Gene Symbol: APOOL
  Gene Name: apolipoprotein O-like
  Uniprot ID: Q6UXV4
  ENST ID: ENST00000373173
  CDS Start-End: 88-894
gtggggctgtcctaagggaagcctagtcgaactgatttgtccctctctgctctccgtctgaaaaccttggccgaaagggttgtagacatggcggccatcaggatgggaaaactgacaaccatgcctgcaggtctgatatatgcatctgtaagtgtacatgcagccaaacaagaggaatccaaaaagcagctagtgaaaccagagcagctccccatatatactgcaccaccgctccagtctaaatatgttgaagagcagcctggtcatttacaaatgggctttgcttccatccgcactgcaactggttgttacattggctggtgcaagggtgtttatgtctttgtgaaaaatgggataatggatacagtacaatttggaaaagatgcttatgtctatctgaagaatcctcctcgagattttcttccgaaaatgggagttattacagtttcaggattggcgggcttggtttcagcgagaaaaggttccaagtttaagaaaattacttatcctctgggactggccactttaggagcaactgtttgctacccagttcagtccgtaataattgctaaggtaacagcaaaaaaggtatatgctacaagccagcaaatttttggagcagttaaatcattgtggacaaaaagcagcaaagaagagtcactccctaaacctaaagaaaaaactaagctaggatcctcttccgaaatagaagtacctgcaaaaacaactcacgtcttgaaacactcagtgcccttgccaacagaactcagctctgaagcaaagaccaaatcagaatccacttcaggtgcaacccagtttatgcctgaccccaagctcatggatcacgggcagtcccacccagaagatatagatatgtacagcactagaagctgaagtagactgcatgcagagactacacagaaaactacaagatgtgtggcgttgcaaataatgatgaaaataaatcatgtaatgggtaactgatacatagagtattacctaaaccaagtttctcccttacatttccaaatatgccatttgataaattacataagtggttaacacacaaactgtgaatgcagtgtaaacaatattaaatgattgatgaggagacttaggtagaagtattagcttgcatttgatgacctttaagggcacttaaaaaaaaatgaagacatgaattctagtgagattaaaatctaaaaatacatatatatatatgtatgtataaatacatacatatttatacatgtataaatacgtatttatacatatatgt

SEQ ID NO: 108265 - DNA, 6466 bp, Homo sapiens
  Payload ID: 1276
  Gene Symbol: APOOL
  Gene Name: apolipoprotein O-like
  ENST ID: ENST00000622540
  CDS Start-End: 37-828
ttggccgaaagggttgtagacatggcggccatcaggatgggaaaactgacaaccatgcctgcaggtctgatatatgcatctgtaagtgtacatgcagccaaacaagaggaatccaaaaagcagctagtgaaaccagagcagctccccatatatactgcaccaccgctccagtctaaatatgttgaagagcagcctggtcatttacaaatgggctttgcttccatccgcactgcaactggttgttacattggctggtgcaagggtgtttatgtctttgtgaaaaatgggataatggatacagtacaatttggaaaagatgcttatgtctatctgaagaatcctcctcgagattttcttccgaaaatgggagttattacagtttcaggattggcgggcttggtttcagcgagaaaaggttccaagtttaagaaaattacttatcctctgggactggccactttaggagcaactgtttgctacccagttcagtccgtaataattgctaaggtaacagcaaaaaggtatatgctacaagccagcaaatttttggagcagttaaatcattgtggacaaaaagcagcaaagaagagtcactccctaaacctaaagaaaaaactaaggctaggatcctcttccgaaatagaagtacctgcaaaaacaactcacgtcttgaaacactcagtgcccttgccaacagaactcagctctgaagcaaagaccaaatcagaatccacttcaggtgcaacccagtttatgcctgaccccaagctcatggatcacgggcagtcccacccagaagatatagatatgtacagcactagaagctgaagtagactgcatgcagagactacacagaaaactacaagatgtgtggcgttgcaaataatgatgaaaataaatcatgtaatgggtaactgatacatagagtattacctaaaccaagtttctcccttacatttccaaatatgccatttgataaattacataagtggttaacacacaaactgtgaatgcagtgtaaacaatattaaatgattgatgaggagacttaggtagaagtattagcttgcatttgatgacctttaagggcacttaaaaaaaaatgaagacatgaattctagtgagattaaaatctaaaaatacatatatatatatgtatgtataaatacatacatatttatacatgtataaatacgtatttatacatatatgtataaatacatatacatatatgtataaatacatatacatatttatacatatatgtataaatacatacatatttatacatatatgtataaatacatacatatttatacatatatgtataaatacatacatatttatacatatatatgtataaatacatacatatttatacatataaacatatatttctgctctagctttcccagattaatgctagttaaattagaatggtgtatggaaaggtgtgtttccctctgtttttttttttttttttttttttttttttcccatttcctagagctggaataaaatatccatgttttatgggacttgagcttggctttgtcccttggttttgttaatgttaattcctcttaaatatctaaaaacatctctacctatttgagagggccatatgctacacaggcttcctaatactgcttagcaatccttctactggttcctaagtggtttactattgtgttccctggaagaggtattacaaacgttttattcttctcaagcctcttagaactgtcaaagttgactgtgcctcctatttcatagagaaaaaactaaattattagatatgaccattcccaaaacttcttcccatctaccttcaagacttacctcttttcagccatgcatcccccttttctaagacatgcttctctttgtgttcttgacctcattccttcccatctaagaccatattccaccctgtttaatttctagtcttcggtttctctttttacagtgagcaaattagaagaataggttagaagaatagggtagtagatactgtagtttctttcctccacctctacatagctgcaggtcttctctgtcttaaatcaacaataacaaaacaagacaaaaacctttccttaacttggcctcttcccttgaactattttttctctctccttcctataattgttatacttctttaaaaagtaattgttactttttgacaaaagtaaatattgtcccttttttccctactttcaagtcctctctgtcttgtgacattctggcctccatacctgcttaattttttttgagatggggtcttgctctgttgcccaggctggagtgcagtggcacaaacacagctcactgcaacctccacctcccaggatcaagcaatcctcccatctcaccctcccaagtagctgggactataggcacccgccaccatgcctaattttttgtatttttggtagtgacagggtttcaccatgttgtccaggctggtctcgaactcctgagctcaagcatctgtccgactcagcctaccacagtgttgggattacaggcgtgagccaccgcacccagcccctacttgaatttttatgtcattattgactcttcaccactctctccttgagactcacttatccctttgctctctatttttcctgcttttgttattcttcatttttcttctcttgctctgaatcccttaaatgctgaggctgctcaagtttcatccctagtcctattttctcattctatatgcacactcatttttcatttaacagacttcactggcttcaggcaccatttgttttattattcatattttcaacccccatatctctctagtgctgtagacctttatttctacttactagttatattcacctaacatcccatagatatgccaatgtcaatgtgcctaaaacaaaattgtctctacctcccgctccttcaaatctattctgtcttctctaatcctataattactctccctcaagtcatcatcatcacttttctgggttactgtaatagccttcaggctaatttgctcactgtcaatcttgctgtctctcatttcagaatatgttctgcttgcaggtgacagtaaactagttaaacaaatatttaatattagcttaagcaaaaaaaaaaaaaaaggcctatcctatttatagcctagaattaggcagtatagggttgggacagtggctcattggtgctatcaaggacgtagactttttctctttccactctgtcctctacagcatgctggtttgtcacctcatggtcacaagatgtctgctgtacctccagggagcagatacacattcaaagtaggaaatagcagataaaaatgtacacaagatgcgtctgactcccttttaccagaaaagtaaatgctttcttagaatctcctcagaagacctctgtgtatatctcaaccagtacttgtcatatagccacacacttagctcaaggaagatagggaatagggaaatcatgtttcttttcccctgtggtgaggaaggcaaggggtaaggggttgggaacaggtgctgaattaaagctaacatacagtatctactaccctattcttctaacccatttgtctattatgatatagttgtcttgacaactataatgaatagctgtctttctgaaatctttagtggctcatcattgcctgcagaatcaaaactccttagtctgatatacaaggcccttcatatctgattccagcttaccttctaatcctatcttccctctccttacccaccctactgctaatgtgtattatattgtctttatgacataccatttgtttcttgaacatgctttgctcattattgcctctttctctgcctgtgctagtgtgtcctcttagaatgttcttccatcttatcctgctctacattctaacttctacccatcctacaagtccaattccagtgtcatgttccctttctcaatcctccagggtagaatttagatgttctgtcttttagagataggtattgctatgttgcccaggctggtctcaaactcatggcctcaagcgatcctcccacctcagccaaccagacatgagtgactgtgctcagccttttttaaaaaaatgaaggtatttggtatggccgggtatggtggctcacacctataatcccagcactttgggaggccaaggtgggtgaatcacctgaggtcaggagtttgagaccagcctgaccaacatagtgaaaccctgtctctactaaaaacacgcaaaaagtgcaaaattagctaggcgtggtggctcatgcctgtaattccagctacttgggaggctgaggcaggagaatcacttgaatccgggaggtggaggctgcagtgagccgagatcgtgccattgcacttcagcctgggcacaagaacaaaactcagtctcaaaaaataaataataaaaaataaaggtatataatatgtcttagatttgatgaaatatgagtgtgtttgagatctgatccaaggttttaaaaaattcatttcaaatcctggagataaattctgaggagcttacttatgaaaaactagcaagtgatagctggtatttacagatatggtactttacacaatttatgtaattaatattttctcacagacaaggttccttgtggatatcactgaataatttttgtgtagtttctatgcccatgaagtgcctggtaggtagtaggaactcacacgttctgctatgctggttgcagcacaggacacaaaagttagaattatttcaaaggacttatactctactaggaaagagagaaacatagaaatatagtgttgtatgtggtatcttccctaagataagtacaaccaaagagctatggatgttcagagatagaatgtagtactgggatgatgtcaaggaggcagtggtacttaagctgctcaaggtagggaagcagtttacttgctagtttttcataagtaagctcttcagaatttatctccagtatttgaaatgaatttttttaaacctcagatctgaatatattcaaacacccatatttcatcaaatctaaggcatatcatatacctttaatttaaaaaaaaatgctgagcagagttgcttatgtctgggaggctgaagtgggaggattgcttgaggccaaaagtttgagaccagcctgagcaacatagcaagatcctgcctctaaaaacaaacaaacaaaaaatgctgccagttgatcattacatttatcccgacatcagatatgtcaaattgtgaaaagcaccttaattttgatgaaatatgataggtaaaaaatagcgcaaagctaagtataagtgacttttaaattatctgctcttttggattatcactactgctactagccgttagaatattggtttggataatggaaagttgactagagctacaaaatctgtttcaaaataaaagatctgctcaaacaagaatgtgatgatcacttgctgtattgtacaacaaagtcaaactgctgttagactcaggtgacagtcaaatgttggaggctgtgttgggatgagttgttacaaagcctctttcattcttcccatgccatgtccaggagttcttctctgttaaacctgaagagatgccagccctcctcagaggaaaggtctaaagcccctcgactagtatagtagttgatagaagcctggttccaaatgacgacaagaaagtgcatgcagttacattgagttgtgatggctatctgtttaaaaacaaacaagcaaatattactttcatttgaaagtataatcttcgttaacacatatattttattgaaggtctactctatgcaagacactatgtgtgaataatacttccaaatatagtagttaccttttgaacttttctatagctgtaaaaagaaaaaagtctcactgttctgagctttaaagccctctttaaaatctcaaaactgatttgcaaagcctttatcatacagaaaaggtgtacctaaaagaacacatgttctcatatgtttccaaaatacaagaagatcttgcttttatagtcttgtaatattcatactgtgagcctgtgtttttgaataaaaatgctttctaatctccctccttcttactttcccttgatagcaaaaagggtgtatagtgtggttgtggattatatataaatcaattttaattgactataattcatatactgtatatgatcatctgatttgaaaatccagtttaatttgggtagaaatttgaagtatatgttggggttatgttcaaatggtgagattaatgatttaatttatgccctgtgaatatttattaagaaaaggttaatgtatagaatatcaatactaattgtaatacatacctgacttagcctcttcagcatttcagctccaatacctaggccttttaaatagacaatgcaaagtgaaaactgcaaatttcacttaacttgttatttgctttagtttaaaataaataatatctaaaactctgt

SEQ ID NO: 108266 - DNA, 6445 bp, Homo sapiens
  Payload ID: 1276
  Gene Symbol: APOOL
  Gene Name: apolipoprotein O-like
  ENST ID: ENST00000613473
  CDS Start-End: 1-807
atgtctgagattaaaatgggaaaactgacaaccatgcctgcaggtctgatatatgcatctgtaagtgtacatgcagccaaacaagaggaatccaaaaagcagctagtgaaaccagagcagctccccatatatactgcaccaccgctccagtctaaatatgttgaagagcagcctggtcatttacaaatgggctttgcttccatccgcactgcaactggttgttacattggctggtgcaagggtgtttatgtctttgtgaaaaatgggataatggatacagtacaatttggaaaagatgcttatgtctatctgaagaatcctcctcgagattttcttccgaaaatgggagttattacagtttcaggattggcgggcttggtttcagcgagaaaaggttccaagtttaagaaaattacttatcctctgggactggccactttaggagcaactgtttgctacccagttcagtccgtaataattgctaaggtaacagcaaaaaaggtatatgctacaagccagcaaatttttggagcagttaaatcattgtggacaaaaagcagcaaagaagagtcactccctaaacctaaagaaaaaactaagctaggatcctcttccgaaatagaagtacctgcaaaaacaactcacgtcttgaaacactcagtgcccttgccaacagaactcagctctgaagcaaagaccaaatcagaatccacttcaggtgcaacccagtttatgcctgaccccaagctcatggatcacgggcagtcccacccagaagatatagatatgtacagcactagaagctgaagtagactgcatgcagagactacacagaaaactacaagatgtgtggcgttgcaaataatgatgaaaataaatcatgtaatgggtaactgatacatagagtattacctaaaccaagtttctcccttacatttccaaatatgccatttgataaattacataagtggttaacacacaaactgtgaatgcagtgtaaacaatattaaatgattgatgaggagacttaggtagaagtattagcttgcatttgatgacctttaagggcacttaaaaaaaaatgaagacatgaattctagtgagattaaaatctaaaaatacatatatatatatgtatgtataaatacatacatatttatacatgtataaatacgtatttatacatatatgtataaatacatatacatatatgtataaatacatatacatatttatacatatatgtataaatacatacatatttatacatatatgtataaatacatacatatttatacatatatgtataaatacatacatatttatacatatatatgtataaatacatacatatttatacatataaacatatatttctgctctagctttcccagattaatgctagttaaattagaatggtgtatggaaaggtgtgtttccctctgtttttttttttttttttttttttttttttcccatttcctagagctggaataaaatatccatgttttatgggacttgagcttggctttgtcccttggttttgttaatgttaattcctcttaaatatctaaaaacatctctacctatttgagagggccatatgctacacaggcttcctaatactgcttagcaatccttctactggttcctaagtggtttactattgtgttccctggaagaggtattacaaacgttttattcttctcaagcctcttagaactgtcaaagttgactgtgcctcctatttcatagagaaaaaactaaattattagatatgaccattcccaaaacttcttcccatctaccttcaagacttacctcttttcagccatgcatcccccttttctaagacatgcttctctttgtgttcttgacctcattccttcccatctaagaccatattccaccctgtttaatttctagtcttcggtttctctttttacagtgagcaaattagaagaataggttagaagaatagggtagtagatactgtagtttctttcctccacctctacatagctgcaggtcttctctgtcttaaatcaacaataacaaaacaagacaaaaacctttccttaacttggcctcttcccttgaactattttttctctctccttcctataattgttatacttctttaaaaagtaattgttactttttgacaaaagtaaatattgtcccttttttccctactttcaagtcctctctgtcttgtgacattctggcctccatacctgcttaattttttttgagatggggtcttgctctgttgcccaggctggagtgcagtggcacaaacacagctcactgcaacctccacctcccaggatcaagcaatcctcccatctcaccctcccaagtagctgggactataggcacccgccaccatgcctaattttttgtatttttggtagtgacagggtttcaccatgttgtccaggctggtctcgaactcctgagctcaagcatctgtccgactcagcctaccacagtgttgggattacaggcgtgagccaccgcacccagcccctacttgaatttttatgtcattattgactcttcaccactctctccttgagactcacttatccctttgctctctatttttcctgcttttgttattcttcatttttcttctcttgctctgaatcccttaaatgctgaggctgctcaagtttcatccctagtcctattttctcattctatatgcacactcatttttcatttaacagacttcactggcttcaggcaccatttgttttattattcatattttcaacccccatatctctctagtgctgtagacctttatttctacttactagttatattcacctaacatcccatagatatgccaatgtcaatgtgcctaaaacaaaattgtctctacctcccgctccttcaaatctattctgtcttctctaatcctataattactctccctcaagtcatcatcatcacttttctgggttactgtaatagccttcaggctaatttgctcactgtcaatcttgctgtctctcatttcagaatatgttctgcttgcaggtgacagtaaactagttaaacaaatatttaatattagcttaagcaaaaaaaaaaaaaaaggcctatcctatttatagcctagaattaggcagtatagggttgggacagtggctcattggtgctatcaaggacgtagactttttctctttccactctgtcctctacagcatgctggtttgtcacctcatggtcacaagatgtctgctgtacctccagggagcagatacacattcaaagtaggaaatagcagataaaaatgtacacaagatgcgtctgactcccttttaccagaaaagtaaatgctttcttagaatctcctcagaagacctctgtgtatatctcaaccagtacttgtcatatagccacacacttagctcaaggaagatagggaatagggaaatcatgtttcttttcccctgtggtgaggaaggcaaggggtaaggggttgggaacaggtgctgaattaaagctaacatacagtatctactaccctattcttctaacccatttgtctattatgatatagttgtcttgacaactataatgaatagctgtctttctgaaatctttagtggctcatcattgcctgcagaatcaaaactccttagtctgatatacaaggcccttcatatctgattccagcttaccttctaatcctatcttccctctccttacccaccctactgctaatgtgtattatattgtctttatgacataccatttgtttcttgaacatgctttgctcattattgcctctttctctgcctgtgctagtgtgtcctcttagaatgttcttccatcttatcctgctctacattctaacttctacccatcctacaagtccaattccagtgtcatgttccctttctcaatcctccagggtagaatttagatgttctgtcttttagagataggtattgctatgttgcccaggctggtctcaaactcatggcctcaagcgatcctcccacctcagccaaccagacatgagtgactgtgctcagccttttttaaaaaaatgaaggtatttggtatggccgggtatggtggctcacacctataatcccagcactttgggaggccaaggtgggtgaatcacctgaggtcaggagtttgagaccagcctgaccaacatagtgaaaccctgtctctactaaaaacacgcaaaaagtgcaaaattagctaggcgtggtggctcatgcctgtaattccagctacttgggaggctgaggcaggagaatcacttgaatccgggaggtggaggctgcagtgagccgagatcgtgccattgcacttcagcctgggcacaagaacaaaactcagtctcaaaaaataaataataaaaaataaaggtatataatatgtcttagatttgatgaaatatgagtgtgtttgagatctgatccaaggttttaaaaaattcatttcaaatcctggagataaattctgaggagcttacttatgaaaaactagcaagtgatagctggtatttacagatatggtactttacacaatttatgtaattaatattttctcacagacaaggttccttgtggatatcactgaataatttttgtgtagtttctatgcccatgaagtgcctggtaggtagtaggaactcacacgttctgctatgctggttgcagcacaggacacaaaagttagaattatttcaaaggacttatactctactaggaaagagagaaacatagaaatatagtgttgtatgtggtatcttccctaagataagtacaaccaaagagctatggatgttcagagatagaatgtagtactgggatgatgtcaaggaggcagtggtacttaagctgctcaaggtagggaagcagtttacttgctagtttttcataagtaagctcttcagaatttatctccagtatttgaaatgaatttttttaaacctcagatctgaatatattcaaacacccatatttcatcaaatctaaggcatatcatatacctttaatttaaaaaaaaatgctgagcagagttgcttatgtctgggaggctgaagtgggaggattgcttgaggccaaaagtttgagaccagcctgagcaacatagcaagatcctgcctctaaaaacaaacaaacaaaaaatgctgccagttgatcattacatttatcccgacatcagatatgtcaaattgtgaaaagcaccttaattttgatgaaatatgataggtaaaaaatagcgcaaagctaagtataagtgacttttaaattatctgctcttttggattatcactactgctactagccgttagaatattggtttggataatggaaagttgactagagctacaaaatctgtttcaaaataaaagatctgctcaaacaagaatgtgatgatcacttgctgtattgtacaacaaagtcaaactgctgttagactcaggtgacagtcaaatgttggaggctgtgttgggatgagttgttacaaagcctctttcattcttcccatgccatgtccaggagttcttctctgttaaacctgaagagatgccagccctcctcagaggaaaggtctaaagcccctcgactagtatagtagttgatagaagcctggttccaaatgacgacaagaaagtgcatgcagttacattgagttgtgatggctatctgtttaaaaacaaacaagcaaatattactttcatttgaaagtataatcttcgttaacacatatattttattgaaggtctactctatgcaagacactatgtgtgaataatacttccaaatatagtagttaccttttgaacttttctatagctgtaaaaagaaaaaagtctcactgttctgagctttaaagccctctttaaaatctcaaaactgatttgcaaagcctttatcatacagaaaaggtgtacctaaaagaacacatgttctcatatgtttccaaaatacaagaagatcttgcttttatagtcttgtaatattcatactgtgagcctgtgtttttgaataaaaatgctttctaatctccctccttcttactttcccttgatagcaaaaagggtgtatagtgtggttgtggattatatataaatcaattttaattgactataattcatatactgtatatgatcatctgatttgaaaatccagtttaatttgggtagaaatttgaagtatatgttggggttatgttcaaatggtgagattaatgatttaatttatgccctgtgaatatttattaagaaaaggttaatgtatagaatatcaatactaattgtaatacatacctgacttagcctcttcagcatttcagctccaatacctaggccttttaaatagacaatgcaaagtgaaaactgcaaatttcacttaacttgttatttgctttagtttaaaataaataatatctaaaactctgt

SEQ ID NO: 108267 - DNA, 2523 bp, Homo sapiens
  Payload ID: 1277
  Gene Symbol: APOPT1
  Gene Name: apoptogenic 1, mitochondrial
  Uniprot ID: Q96IL0
  ENST ID: ENST00000409074
  CDS Start-End: 2-622
aatgctgccgtgcgccgcgggagccagggggcgtggggccatggtggtcttgcgggcggggaagaagacctttctcccccctctctgccgcgccttcgcctgccgcggctgtcaactcgctccggagcgcggcgccgagcgcagggatacggcgcccagcggggtctcaagattctgccctccaagaaagtcttgccatgattggataggacccccagataaatattcaaaccttcgacctgttcacttttacatacctgaaaatgaatctccattggaacaaaagcttagaaaattaagacaagaaacacaagaatggaatcaacagttctgggcaaaccagaatttgacttttagtaaggaaaaagaagaatttattcactcaagactaaaaactaaaggcctgggcctgagaactgaatcaggtcagaaagcaacattgaatgcagaagaaatggcggacttctacaaggaatttttaagtaaaaattttcagaagcacatgtattataacagagattggtacaagcgcaattttgccatcaccttcttcatgggaaaagtggccctggaaaggatttggaacaagcttaaacagaaacaaaagaagaggagcaactaggagtccactctgacccagccagagtccaggtttccacaggaagcagatggagctcctttcacaggggctctgagaaaaactggagctgatctcaagaagccccacatcttcctaaggggccccatggcctgtttgggggcagggtaggtcctggggcactgtgggccgcctgcctgctgatgtgggctctaggccagcttgttgtcacgtacgtggtgtgaaataaagcccaagcactgggtgcccgtttcctgtgtttcgaattataccaattcaaaacagaactatttaaaaatattggccaggcacggtggctcacacctgtaatcccagcactttgggaggccgaggcgggtggatcacttgagatcaggagttcaagatcagtctggacaacatggcaaaaccctgtctctacaaaaaattagctgggtgtggtggcacgcacctgtaatcccagctgctctggaggctgaggcatgcgacgcttgaacccaggaggcggaggttgcagtgatccaagatcgcaccactgcactccagcctggaagaccaaacgagactctgtatcaaaaaataataataattaataaagttttactggaaaaaagaagtctgctgacgggaatgatgtggaagctgactgccaagcgatcggtgtgctggccgtggagtcagcaccaccctcactgtgagtcgtcagctggtgggtcctcacaggctgcgtcctgaatgcagtgcggtgtgaggacatgaaagcaaatgcaattttattgcatgccaaaaagtttaacttgattcttggtgttaactatgttagtagattcttcaatgctataagcaaattaacaagaaacagcagcactattttcctcttttcttaaacacgaaggttaaatggccaggcatggtgactcatacctgtaatcccaacaatttgggaggccaaggcaagcaaatcacttgagctcaggagttcgaaccagtttgggcaacatggcgaaaccctgcctctacaaaacatgcaaaaattagctgggcatggtagcatgcgcctgtagtcccagctactcgggaggctgagcttcgaggattgattgagccagtgaggtccaggctgcactaagccaagatcctaccactaggcaacagagccagaccctgtctcaaataaaaatttaaaaaaataataaaaaaggccgggcgcactggctcacgcctgtaatctcagcactttgggtggccaaggtgggcggatcacctgaggtcagttcaagaccagcctggccaaacatggtgaaaccctgtctacaaaaattagccaggcatgatggagggtgcctttagtcccagctctttgggaagctgaggcgggagaatagcatgaaccagggaggtggagggtgcctgtaatcccagctccttgggaggctaaggcaggagaatagcatgaacccggtaggtggaggttgcagtgagccgagatcgcgccactgcactccagcctgggcgacagagcaatactcccgtctcaaaaaaaaaaaaattaaatgattgtgatatgtgttacttttggtcacaaataaattgtaattaagattattctggccaggtgcggtggctcacgcctataatcccagcactttgggaggccgaggtgggcagatcatgaggtcaggagatcgagaccatcctgcccaacatggtgaaaccccgtttctactaaaaatgcaaaaattagctgggtgtggtggcgtgtgcctgtaatgccagctactcgggaggctgaggcacgagaatcacttgaacccagcaggcagaggttgcagtgagccaagattgcgccactgcactccagcctgacgacaaagcgagactccgtctcaaaaaaaaaaaaaaaa

SEQ ID NO: 108268 - DNA, 575 bp, Homo sapiens
  Payload ID: 1277
  Gene Symbol: APOPT1
  Gene Name: apoptogenic 1, mitochondrial
  ENST ID: ENST00000440963
  CDS Start-End: 1-357
gctgccgtgcgccgcgggagccagggggcgtggggccatggtggtcttgcgggcggggaagaagacctttctcccccctctctgccgcgccttcgcctgccgcggctgtcaactcgctccggagcgcggcgccgagcgcagggatacggcgcccagcggggtcagaaagcaacattgaatgcagaagaaatggcggacttctacaaggaatttttaagtaaaaattttcagaagcacatgtattataacagagattggtacaagcgcaattttgccatcaccttcttcatgggaaaagtggccctggaaaggatttggaacaagcttaaacagaaacaaaagaagaggagcaactaggagtccactctgacccagccagagtccaggtttccacaggaagcagatggagctcctttcacaggggctctgagaaaaactggagctgatctcaagaagccccacatcttcctaaggggccccatggcctgtttgggggcagggtaggtcctggggcactgtgggccgcctgcctgctgatgtgggctctaggccagcttgttgtcacgtacgtggtg

SEQ ID NO: 108269 - DNA, 782 bp, Homo sapiens
  Payload ID: 1277
  Gene Symbol: APOPT1
  Gene Name: apoptogenic 1, mitochondrial
  ENST ID: ENST00000458117
  CDS Start-End: 1-362
cgggagccagggggcgtggggccatggtggtcttgcgggcggggaagaagacctttctcccccctctctgccgcgccttcgcctgccgcggctgtcaactcgctccggagcgcggcgccgagcgcagggatacggcgcccagcggggtctcaagattctgccctccaagaaagtcttgccatgattggataggacccccagataaatattcaaaccttcgacctgttcacttttacatacctgaaaatgaatctccattggaacaaaagcttagaaaattaagacaagaaacacaagaatggaatcaacagttctgggcaaaccagaatttgacttttagtaaggtcagaaagcaacattgaatgcagaagaaatggcggacttctacaaggaatttttaagtaaaaattttcagaagcacatgtattataacagagattggtacaagcgcaattttgccatcaccttcttcatgggaaaagtggccctggaaaggatttggaacaagcttaaacagaaacaaaagaagaggagcaactaggagtccactctgacccagccagagtccaggtttccacaggaagcagatggagctcctttcacaggggctctgagaaaaactggagctgatctcaagaagccccacatcttcctaaggggccccatggcctgtttgggggcagggtaggtcctggggcactgtgggccgcctgcctgctgatgtgggctctaggccagcttgttgtcacgtacgtggtgtgaaataaagcccaagcactggg

SEQ ID NO: 108270 - DNA, 333 bp, Homo sapiens
  Payload ID: 1277
  Gene Symbol: APOPT1
  Gene Name: apoptogenic 1, mitochondrial
  ENST ID: ENST00000555660
  CDS Start-End: 1-172
attaagacaagaaacacaagaatggaatcaacagttctgggcaaaccagaatttgacttttagtaagatggagtctcactctgtcacccaggctggagtgcagtggcacgatctcggctcactgcaaactctgcctcctggttcaagcgattctcctgcctcagccttctgagtagctgggactacaggtcagaaagcaacattgaatgcagaagaaatggcggacttctacaaggaatttttaagtaaaaattttcagaagcacatgtattataacagagattggtacaagcgcaattttgccatcaccttcttcatgggaaaagtggccct

SEQ ID NO: 108271 - DNA, 653 bp, Homo sapiens
  Payload ID: 1277
  Gene Symbol: APOPT1
  Gene Name: apoptogenic 1, mitochondrial
  ENST ID: ENST00000495778
  CDS Start-End: 1-327
ctcgctccggagcgcggcgccgagcgcagggatacggcgcccagcggggtctcaagattctgccctccaagaaagtcttgccatgattggataggacccccagataaatattcaaaccttcgacctgttcacttttacatacctgaaaatgaatctccattggaacaaaagcttagaaaattaagacaagaaacacaagaatggaatcaacagttctgggcaaaccagaatttgacttttagtaaggaaaaagaagaatttattcactcaagactaaaaactaaaggcctgggcctgagaactgaatcaggtggttatgatggatgaccaacctctgacctttgactttcgtactgaggtctcagcctttgcagcttctccctccaaagcagcttttcttctgattcctgatctcagttcagtgctcaaaatagcctctccttattttctcctggtgtcagtgttaggcctgaataacatctcatgctgttcgttaaacagatgtctgctgccaaaaagttgttctgatagaaaatccaaaatcatcgaccccaaaagccaagtctgtcattgggctaaagtgccattcctactaatcctttgcctcacctgattcatttggaataaagggccaggagcttgagtcaccccca

SEQ ID NO: 108272 - DNA, 770 bp, Homo sapiens
  Payload ID: 1277
  Gene Symbol: APOPT1
  Gene Name: apoptogenic 1, mitochondrial
  ENST ID: ENST00000489117
  CDS Start-End: 1-219
gccttcgcctgccgcggctgtcaactcgctccggagcgcggcgccgagcgcagggatacggcgcccagcgggccgcctcaggcctttgtccaggtgctctcgcgtcctatcccgaacagtcccgcagccccgaggctcccgcatcaacgccctcagtcggatgggactgagggtgccgccgccaccacgccggggactgttgacagccagaacctttaagcgtaacagagtcacctggtctcaagattctgccctccaagaaagtcttgccatgattggataggacccccagataaatattcaaaccttcgacctgttcacttttacatacctgaaaatgaatctccattggaacaaaagcttagaaaattaagacaagaaacacaagaatggaatcaacagttctgggcaaaccagaatttgacttttagtaaggaaaaagaagaatttattcactcaagactaaaaactaaaggcctgggcctgagaactgaatcaggtcagaaagcaacattgaatgcagaagaaatggcggacttctacaaggaatttttaagtaaaaattttcagaagcacatgtattataacagagattggtacaagcgcaattttgccatcaccttcttcatgggaaaagtggccctggaaaggatttggaacaagcttaaacagaaacaaaagaagaggagcaactaggagtccactctgacccagccagagtccaggtttccacaggaagcagatggagctcctttcacaggggctctgag

SEQ ID NO: 108273 - DNA, 783 bp, Homo sapiens
  Payload ID: 1277
  Gene Symbol: APOPT1
  Gene Name: apoptogenic 1, mitochondrial
  ENST ID: ENST00000556253
  CDS Start-End: 16-549
agggggcgtggggccatggtggtcttgcgggcggggaagaagacctttctcccccctctctgccgcgccttcgcctgccgcggctgtcaactcgctccggagcgcggcgccgagcgcagggatacggcgcccagcggggtctcaagattctgccctccaagaaagtcttgccatgattggataggacccccagataaatattcaaaccttcgacctgttcacttttacatacctgaaaatgaatctccattggaacaaaagcttagaaaattaagacaagaaacacaagaatggaatcaacagttctgggcaaaccagaatttgacttttagtaaggaaaaagaagaatttattcactcaagactaaaaactaaaggcctgggcctgagaactgaatcagaccccactttacctcgggtaactgaaaccatggaaagaaaaaccatggatggaggggacagctgtgctgccgccatctcccttacacagtcagaaagcaacattgaatgcagaagaaatggcggacttctacaaggaatttttaagtaaaaattttcagaagcacatgtattataacagagattggtacaagcgcaattttgccatcaccttcttcatgggaaaagtggccctggaaaggatttggaacaagcttaaacagaaacaaaagaagaggagcaactaggagtccactctgacccagccagagtccaggtttccacaggaagcagatggagctcctttcacaggggctctgagaaaaactggagctgatctcaagaa

SEQ ID NO: 108274 - DNA, 757 bp, Homo sapiens
  Payload ID: 1277
  Gene Symbol: APOPT1
  Gene Name: apoptogenic 1, mitochondrial
  ENST ID: ENST00000476323
  CDS Start-End: 301-531
gactgagggtgccgccgccaccacgccggggactgttgacagccagaacctttaagcgtaacagagtcacctggtctcaagattctgccctccaagaaagtcttgccatgattggataggacccccagataaatattcaaaccttcgacctgttcacttttacatacctgaaaatgaatctccattggaacaaaagcttagaaaattaagacaagaaacacaagaatggaatcaacagttctgggcaaaccagaatttgacttttagtaaggtcagaaagcaacattgaatgcagaagaaatggcggacttctacaaggaatttttaagtaaaaattttcagaagcacatgtattataacaggctggatacggtggctcgcacctggaatcccatgactttgggaggccaagagattggtacaagcgcaattttgccatcaccttcttcatgggaaaagtggccctggaaaggatttggaacaagcttaaacagaaacaaaagaagaggagcaactaggagtccactctgacccagccagagtccaggtttccacaggaagcagatggagctcctttcacaggggctctgagaaaaactggagctgatctcaagaagccccacatcttcctaaggggccccatggcctgtttgggggcagggtaggtcctggggcactgtgggccgcctgcctgctgatgtgggctctaggccagcttgttgtcacgtacgtggtgtgaaataaagcccaagcactg

SEQ ID NO: 108275 - DNA, 906 bp, Homo sapiens
  Payload ID: 1277
  Gene Symbol: APOPT1
  Gene Name: apoptogenic 1, mitochondrial
  ENST ID: ENST00000477116
  CDS Start-End: 499-666
aagacaaacccgggcctcggggccactccctgttctgcacagccgcctcaggcctttgtccaggtgctctcgcgtcctatcccgaacagtcccgcagccccgaggctcccgcatcaacgccctcagtcggatgggactgagggtgccgccgccaccacgccggggactgttgacagccagaacctttaagcgtaacagagtcacctggtctcaagattctgccctccaagaaagtcttgccatgattggataggacccccagataaatattcaaaccttcgacctgttcacttttacatacctgaaaatgaatctccattggaacaaaagcttagaaaattaagacaagaaacacaagaatggaatcaacagttctgggcaaaccagaatttgacttttagtaaggaaaaagaagaatttattcactcaagactaaaaactaaaggcctgggcctgagaactgaatcaggtcagaaagcaacattgaatgcagaagaaatggcggacttctacaaggaatttttaagtaaaaattttcagaagcacatgtattataacagagattggtacaagcgcaattttgccatcaccttcttcatgggaaaagtggccctggaaaggatttggaacaagcttaaacagaaacaaaagaagaggagcaactaggagtccactctgacccagccagagtccaggtttccacaggaagcagatggagctcctttcacaggggctctgagaaaaactggagctgatctcaagaagccccacatcttcctaaggggccccatggcctgtttgggggcagggtaggtcctggggcactgtgggccgcctgcctgctgatgtgggctctaggccagcttgttgtcacgtacgtggtgtgaaataaagcccaagcactgg

SEQ ID NO: 108276 - DNA, 429 bp, Homo sapiens
  Payload ID: 1277
  Gene Symbol: APOPT1
  Gene Name: apoptogenic 1, mitochondrial
  ENST ID: ENST00000554876
  CDS Start-End: 1-399
ggacccccagataaatattcaaaccttcgacctgttcacttttacatacctgaaaatgaatctccattggaacaaaagcttagaaaattaagacaagaaacacaagaatggaatcaacagttctgggcaaaccagaatttgacttttagtaaggaaaaagaagaatttattcactcaagactaaaaactaaaggcctgggcctgagaactgaatcagatggagtctcactctgtcacccaggctggagtgcagtggcacgatctcggctcactgcaaactctgcctcctggttcaagcgattctcctgcctcagccttctgagtagctgggactacaggtcagaaagcaacattgaatgcagaagaaatggcggacttctacaaggaatttttaagtaaaaattttcagaagcacatgtattataacag

SEQ ID NO: 108277 - DNA, 739 bp, Homo sapiens
  Payload ID: 1277
  Gene Symbol: APOPT1
  Gene Name: apoptogenic 1, mitochondrial
  ENST ID: ENST00000473127
  CDS Start-End: 418-585
cggggccactccctgttctgcacagccgcctcaggcctttgtccaggtgctctcgcgtcctatcccgaacagtcccgcagccccgaggctcccgcatcaacgccctcagtcggatgggactgagggtgccgccgccaccacgccggggactgttgacagccagaacctttaagcgtaacagagtcacctggtctcaagattctgccctccaagaaagtcttgccatgattggataggacccccagataaatattcaaaccttcgacctgttcacttttacatacctgaaaatgaatctccattggaacaaaagcttagaaaattaagacaagaaacacaagaatggaatcaacagttctgggcaaaccagaatttgacttttagtaaggtcagaaagcaacattgaatgcagaagaaatggcggacttctacaaggaatttttaagtaaaaattttcagaagcacatgtattataacagagattggtacaagcgcaattttgccatcaccttcttcatgggaaaagtggccctggaaaggatttggaacaagcttaaacagaaacaaaagaagaggagcaactaggagtccactctgacccagccagagtccaggtttccacaggaagcagatggagctcctttcacaggggctctgagaaaaactggagctgatctcaagaagccccacatcttcctaaggggccccatggcctgtttgggggcagggtaggtcctgg

SEQ ID NO: 108278 - DNA, 513 bp, Homo sapiens
  Payload ID: 1277
  Gene Symbol: APOPT1
  Gene Name: apoptogenic 1, mitochondrial
  ENST ID: ENST00000492189
  CDS Start-End: 243-410
ggaagacaaacccgggcctcggggccactccctgttctgcacagccgcctcaggcctttgtccaggtgctctcgcgtcctatcccgaacagtcccgcagccccgaggctcccgcatcaacgccctcagtcggatgggactgagggtgccgccgccaccacgccggggactgttgacagccagaacctttaagcgtaacagagtcacctggcaagtcagaaagcaacattgaatgcagaagaaatggcggacttctacaaggaatttttaagtaaaaattttcagaagcacatgtattataacagagattggtacaagcgcaattttgccatcaccttcttcatgggaaaagtggccctggaaaggatttggaacaagcttaaacagaaacaaaagaagaggagcaactaggagtccactctgacccagccagagtccaggtttccacaggaagcagatggagctcctttcacaggggctctgagaaaaactggagctgatctcaagaagcccc

SEQ ID NO: 108279 - DNA, 2141 bp, Homo sapiens
  Payload ID: 1278
  Gene Symbol: AATF
  Gene Name: apoptosis antagonizing transcription factor
  Uniprot ID: Q9NY61
  ENST ID: ENST00000619387
  CDS Start-End: 252-1934
aatcccttcaaccttctgcgcgcttccgccttcatgctagcaacgcccgcagtgacgcgcaggccccgccccctcccgcgcgcctcccggaagtggccggtccagagctgtggggtggcctccgcgcggtctctggcggagtcggggaatcggatcaaggcgagaggatccggcagggaaggagcttcggggccgggggttgggccgcacatttacgtgcgcgaagcggagtggaccgggagctggtgacgatggcggggccgcagcccctggcgctgcaactggaacagttgttgaacccgcgaccaagcgaggcggaccctgaagcggaccccgaggaagccactgctgccagggtgattgacaggtttgatgaaggggaagatggggaaggtgatttcctagtagtgggtagcattagaaaactggcatcagcctccctcttggacacggacaaaaggtattgcggcaaaaccacctctagaaaagcatggaatgaagaccattgggagcagactctgccaggatcgtctgatgaggaaatatctgatgaggaagggtctggagatgaagattcagagggactgggtctggaggaatatgatgaggacgacctgggtgctgctgaggaacaggagtgtggtgatcacagggagagcaagaagagcagaagccactctgcaaaaacaccgggcttcagtgtccagagtatcagtgactttgagaaatttaccaagggaatggatgaccttgggagcagtgaggaggaggaagacgaagagagtggcatggaagaaggggatgacgcggaagactcccaaggcgagagtgaggaagacagggctggagatagaaacagtgaggatgatggtgtggtgatgaccttctctagtgtcaaagtttctgaggaagtggagaaaggaagagccgtgaagaaccagatagcactgtgggaccagctcttggaaggaaggatcaaactacaaaaagctctgttgaccaccaaccagcttcctcaaccagatgttttcccattgttcaaggacaaaggtggcccagaattttccagtgccctgaaaaatagtcacaaggcacttaaagcattgttgaggtcattggtaggtcttcaggaagagttgcttttccagtacccagacactagatatctagtagatgggacaaagcccaatgcgggaagtgaggagatttctagtgaagatgatgagctggtagaagagaagaagcagcaacgaagaagggtccctgcaaagaggaagctggagatggaggactatcccagcttcatggcaaagcgctttgccgactttacagtctacaggaaccgcacacttcagaaatggcacgataagaccaaactggcttctggaaaactggggaagggttttggtgcctttgaacgctcaatcttgactcagatcgaccatattctgatggacaaagagagattacttcgaaggacacagaccaagcgctctgtctatcgagttcttggcaaacctgagccagcagctcagcctgtcccagagagtttgccaggggaaccggagatccttcctcaagcccctgctaatgctcatctgaaggacttggatgaagaaatctttgatgatgatgacttttaccaccagctccttcgagaactcatagaacggaagaccagctccttggatcccaacgatcaggtggccatgggaaggcagtggcttgcaatccagaagttacgaagcaaaatccacaaaaaagtagataggaaagccagcaaaggcaggaaacttcggtttcatgtccttagcaagctactgagtttcatggcacctattgaccatactacaatgaatgatgatgccaggacagaactgtaccgctctctttttggccagctccaccctcccgacgaaggccacggggattgacatcgcccacctccgacacccagtgggcgccttggctggtgcggctgctggtccagatggaggaaaccagtgactttatggggctgagctagtagggaagcccctggaaagatgctgcgttccgaacctgtgcctaatacacgcaagggcgctgtcccgcccaaccccgcctttaaacgccacaaataaagagcattgttaccgcca

SEQ ID NO: 108280 - DNA, 502 bp, Homo sapiens
  Payload ID: 1278
  Gene Symbol: AATF
  Gene Name: apoptosis antagonizing transcription factor
  ENST ID: ENST00000616434
  CDS Start-End: 1-296
agatccttcctcaagcccctgctaatgctcatctgaaggacttggatgaagaaatctttgatgatgatgacttttaccaccagctccttcgagaactcatagaacggaagaccagctccttggatcccaacgatcaggtggccatgggaaggcagtggcttgcaatccagaagttacgaagcaaaatccacaaaaaagtagataggaaagccagcaaaggcaggaaacttcggacagaactgtaccgctctctttttggccagctccaccctcccgacgaaggccacggggattgacatcgcccacctccgacacccagtgggcgccttggctggtgcggctgctggtccagatggaggaaaccagtgactttatggggctgagctagtagggaagcccctggaaagatgctgcgttccgaacctgtgcctaatacacgcaagggcgctgtcccgcccaaccccgcctttaaacgccacaaataaagagcattgttaccgcc

SEQ ID NO: 108281 - DNA, 648 bp, Homo sapiens
  Payload ID: 1278
  Gene Symbol: AATF
  Gene Name: apoptosis antagonizing transcription factor
  ENST ID: ENST00000613840
  CDS Start-End: 108-275
gggaatcggatcaaggcgagaggatccggcagggaaggagcttcggggccgggggttgggccgcacatttacgtgcgcgaagcggagtggaccgggagctggtgacgatggcggggccgcagcccctggcgctgcaactggaacagttgttgaacccgcgaccaagcgaggcggaccctgaagcggaccccgaggaagccactgctgccagggtgattgacaggtttgatgaaggggaagatggggaaggatcaaactacaaaaagctctgttgaccaccaaccagcttcctcaaccagatgttttcccattgttcaaggacaaaggtggcccagaattttccagtgccctgaaaaatagtcacaaggcacttaaagcattgttgaggtcattggtaggtcttcaggaagagttgcttttccagtacccagacactagatatctagtagatgggacaaagcccaatgcgggaagtgaggagatttctagtgaagatgatgagctggtagaagagaagaagcagcaacgaagaagggtccctgcaaagaggaagctggagatggaggactatcccagcttcatggcaaagcgctttgccgactttacagtctacaggaaccgcacacttcagaaatggcacgataagac

SEQ ID NO: 108282 - DNA, 601 bp, Homo sapiens
  Payload ID: 1278
  Gene Symbol: AATF
  Gene Name: apoptosis antagonizing transcription factor
  ENST ID: ENST00000610798
  CDS Start-End: 1-465
aggaaccgcacacttcagaaatggcacgataagaccaaactggcttctggaaaactggggaagggttttggtgcctttgaacgctcaatcttgactcagatcgaccatattctgatggacaaagagagattacttcgaaggacacagaccaagcgctctgtctatcgagttcttggcaaacctgagccagcagctcagcctgtcccagagagtttgccaggggaaccggagatccttcctcaagcccctgctaatgctcatctgaaggacttggatgaagaaatctttgatgatgatgacttttaccaccagctccttcgagaactcatagaacggaagaccagctccttggatcccaacgatcaggtggccatgggaaggcagtggcttgcaatccagaagttacgaagcaaaatccacaaaaaagtagataggaaagccagcaaaggcaggaaacttcggtgagttacttttcggaaaaaatgtcaacatatattgtatatgtatctcgtctcttacattctggctgttatgtcatttttctttttcttctgatgattctgtttttaaggatcagaaaaataaacaatatttgaaggtt

SEQ ID NO: 108283 - DNA, 2141 bp, Homo sapiens; identical to SEQ ID NO: 108279
  Payload ID: 1278
  Gene Symbol: AATF
  Gene Name: apoptosis antagonizing transcription factor
  Uniprot ID: Q9NY61
  ENST ID: ENST00000620004
  CDS Start-End: 252-1934

SEQ ID NO: 108284 - DNA, 502 bp, Homo sapiens; identical to SEQ ID NO: 108280
  Payload ID: 1278
  Gene Symbol: AATF
  Gene Name: apoptosis antagonizing transcription factor
  ENST ID: ENST00000632435
  CDS Start-End: 1-296

SEQ ID NO: 108285 - DNA, 601 bp, Homo sapiens; identical to SEQ ID NO: 108282
  Payload ID: 1278
  Gene Symbol: AATF
  Gene Name: apoptosis antagonizing transcription factor
  ENST ID: ENST00000633401
  CDS Start-End: 1-465

SEQ ID NO: 108286 - DNA, 648 bp, Homo sapiens; identical to SEQ ID NO: 108281
  Payload ID: 1278
  Gene Symbol: AATF
  Gene Name: apoptosis antagonizing transcription factor
  ENST ID: ENST00000632039
  CDS Start-End: 108-275

SEQ ID NO: 108287 - DNA, 3117 bp, Homo sapiens
  Payload ID: 1279
  Gene Symbol: AEN
  Gene Name: apoptosis enhancing nuclease
  Uniprot ID: Q8WTP8
  ENST ID: ENST00000332810
  CDS Start-End: 152-1129
agtcggagccgggcttgcccgggcatgtgggagctgccggctttccggacgccacgtgcagaccggaagagacacgcggggcttcaggctgctgccccattggaagattactccccaggcttcccttgccccaagcagtgagctgactggaatggtaccccgggaggcccctgagtctgctcagtgcctgtgcccttccctcaccatcccaaatgccaaggatgtgcttcggaagaggcacaagagaaggagccgacagcaccagcggttcatggcccggaaggccttgctgcaggagcaggggctgctgagcatgcctccagaaccagggtcctccccactgcccacccctttcggggcagcgacagcaactgaagctgccagcagtgggaagcagtgtctgagggctggatctggcagtgccccatgcagcagaaggcctgctcccgggaaagcctcagggcccttgcccagcaagtgtgtggctatcgactgtgagatggtgggcacgggaccccgagggcgggtaagcgagctggcccgctgttccattgtgagctaccatggcaatgtcctctatgacaagtacatcaggcctgagatgcccatcgctgactaccgtacccgctggagtggcatcactcggcagcacatgcgcaaggctgtccccttccaggtggcccagaaagagatccttaagctcctgaagggcaaggtggtggtggggcacgcgctgcacaacgacttccaggcgctcaagtatgtccaccctcggagccagacccgggatacgacctatgtcccaaacttcctcagcgagcccggcctccacacccgggcccgggtctctctaaaggacctggccctgcagctgctgcacaagaagatccaggtgggccagcacgggcactcatcagtagaagatgccacgacagccatggagctctaccggctggtggaggtgcagtgggaacagcaggaggcccgcagcctctggacctgccccgaggacagagaacctgacagcagcacagacatggaacagtacatggaggaccagtactggcccgatgacctggcccacggcagcagaggaggagccagggaggcacaggacagaaggaattgagaagggggcggggctccctggctgggcttccggtgtggccggtaggaagtgggggccaggagagcagcgggcactccttcctgggcagggtggggcaggatgcagtgagccagccccagggccagaggagtaggggtcatctgttaccttgacaccctctgcacacagcatagccctctctctctccagggctgttggttctttcttctgactcctgtggttttgctaatggcactttacagactccatggagatgtcaggtggaccatcttctagggcccagcaggagtagggaatgtgccaacagactgcccaggttgccgtggccttccccaccccccagatctcctgagtcatcatgctgtgctaatgaaagggatcatatcatcctctctggggatggtgggtgggggtgtcaatatcctggagctcccttaccccaactcaatgacttgggggtaaagttctcttccttttgttgcctacctcttcctccactcatttgggttcagaataaacatgtcctgaagttaaagaggagttaagtcctaaaggaggcatttcttccccacctccctgacctggaactctggctacagccattgtaggaactccgtgcctggcctgtcagctccctgctaggctacagtggaatagcagagcccacaggcttctcgtggggagttggctccttaacatttcttggcaacagaaagccccaggcacagctcagggaggagggaaggcaggtaagctttggacgagaactggcatatttattttgacccaaatcagggatttccccagtccacccagtactgggctcttaagcaaaagtctgagaaacaagacagtggtttgaattctggggcctttgtgtaggattgtgcctgacctttatttatttattaacagcagggccactcgtctagggcagtggagtctgcgtgtctcctggggctggggcagggcattggcagttacgcagtggccctgaacctggtctggtgcccccgaacctggtctgatgccccctcagctctttgacaatcactgtggctgttgggttttctcctatttctaaaaatgttctcttctttcctaagtgacagttttgaagtattggataaccaagagctcaggtcacacagaccttggagccccatctttgcttgcagcttagctttgagatactaagcaagcgagggacttcactcttgaggctgttttttcctcatctgtaaagtggggatagtggtacggcctacctcatagggttgtaatgagcactaaatgtgaagtgcttggcacagtgcctggcacatggtgagccacagctactgtgagtttctgtttatcccccttttttttttttaagcccattgtttattctttgagaatttgttgtaacttcttcaggataacacctgagtccacaggctgagcagctgtggcccagacagaactgctccggcttggctgttccagcaggtggggcgctggcctcggtgagggcacagcagcaaggttcacggatatccgtgtgtcttgtctgtggccaccaggcacaggtttggcttccggtcagtgtcccgacactgtgcgggaggtgacaacagagcaaagcagcgcaggggtcagggaggtacagacactgctgaaatcacactaccccaccctcagctgaagccccacgttccacaaacttggggtcatagattgtccagtcactggctccctccctgtcagcacagcacagaggaaggggctaactgaatcttttaccacttctggcctggctccagaactttgttctagattccttaaaagtcggtagctgatgtcaaactcaattgagcagtagctttgatcccttggtctgggggtcgaaggaagatggtgctgttatcagcggggaaatgtactatttaagatcagctttgttgtaaaaccatttgttctagaataaaactcaattggaaacgtgg

SEQ ID NO: 108288 - DNA, 895 bp, Homo sapiens
  Payload ID: 1279
  Gene Symbol: AEN
  Gene Name: apoptosis enhancing nuclease
  ENST ID: ENST00000559528
  CDS Start-End: 359-895
cgcggggcttcaggtgagatccaggaccctgcaccggggcggcggggtcgggcgggctgaggccgcgtgtcccgggtcgcaggtccccgcgcgttgtttccgccccggcctgcggcggggacgcctgaactgggctgaccctgccctaccggcccgcagaaaagcaggccgggcgccgcctgtctccagccctcgctctgctcgggggtccagggccagagggggcggcgctggtcgttgggactcggcccagctgccgcggccagcaagtgaccaacgcccgagtccttcccggctgctgccccattggaagattactccccaggcttcccttgccccaagcagtgagctgactggaatggtaccccgggaggcccctgagtctgctcagtgcctgtgcccttccctcaccatcccaaatgccaaggatgtgcttcggaagaggcacaagagaaggagccgacagcaccagcggttcatggcccggaaggccttgctgcaggagcaggggctgctgagcatgcctccagaaccagggtcctccccactgcccacccctttcggggcagcgacagcaactgaagctgccagcagtgggaagcagtgtctgagggctggatctggcagtgccccatgcagcagaaggcctgctcccgggaaagcctcagggcccttgcccagcaagtgtgtggctatcgactgtgagatggtgggcacgggaccccgagggcgggtaagcgagctggcccgctgttccattgtgagctaccatggcaatgtcctctatgacaagtacatcaggcctgagatgcccatcgctgactaccgtacccgctggagtggcatcactcggcagcacatgcgcaaggctgtccccttccaggtggcccagaaa

SEQ ID NO: 108289 - DNA, 3714 bp, Homo sapiens
  Payload ID: 1280
  Gene Symbol: API5
  Gene Name: apoptosis inhibitor 5
  Uniprot ID: Q9BZZ5
  ENST ID: ENST00000378852
  CDS Start-End: 126-1640
gcggctgcactggcggcagctggaggtgtaatagtgcgggtagtgggtttggagaagttccgaggcggcggtggcgccggtcaggacaaggatagcggaaccgggccctgggcttgtcgctcaccatgccgacagtagaggagctttaccgcaattatggcatcctggccgatgccacggagcaagtgggccagcataaagatgcctatcaagtgatattggatggtgtgaaaggtggtactaaggaaaagcgattagcagctcaatttattccgaaattctttaagcattttccagaattggctgattctgctatcaatgcacagttagacctctgtgaggatgaagatgtatctattcgacgtcaagcaattaaagaactgcctcaatttgccactggagaaaatcttcctcgagtggcagatatactaacgcaacttttgcagacagatgactctgcagaatttaacctagtgaacaatgccctattaagtatatttaaaatggatgcaaaagggactttaggtgggttgttcagccaaatacttcaaggagaggacattgttagagaacgagcaattaaattcctttctacaaaacttaagactttaccagatgaagtcttaacaaaggaagtggaagagcttatactaactgaatccaaaaaggtcctagaagatgtgactggtgaagaatttgttctatttatgaagatactgtctgggttaaaaagcttacagacagtgagtggaagacagcaacttgtagagttggtggctgaacaggccgacctagaacagaccttcaatccctcggatcctgactgtgtggacaggctcttacagtgcactcggcaggcagtacccctcttctctaaaaatgtccattccacaaggtttgtgacatatttctgtgagcaggttctccctaacctcggtaccttgactaccccagtggaaggtcttgatatacagttggaggtattgaaattgttggcggagatgagttcattttgtggtgacatggaaaaactagaaacaaatttaaggaaactatttgataagttattggaatacatgcccctccctccagaagaggcagaaaatggagagaatgctggtaatgaagaacccaagctacagttcagttatgtggaatgtttgttgtacagttttcaccagttgggccgaaaacttccagatttcttaacagccaaactgaatgcagaaaagctcaaagatttcaaaatcaggctgcagtactttgcacggggcctgcaagtttatatcagacaacttcgcttagctctccagggtaaaacgggtgaggccttaaaaacagaagagaacaagattaaagtcgttgcattgaaaataacaaacaatatcaatgttttaatcaaggatctcttccacattcctccttcttataagagcacagtaacactatcctggaaacctgtacaaaaggttgagattgggcaaaagagagccagtgaagatacaacttcaggttcaccacccaagaaatcttcagcaggaccaaaaagagatgccaggcagatttataaccctcccagtgggaaatatagcagcaatttgggcaactttaattatgagaggagccttcaggggaagtagaggtggccgaggttggggcacacgaggaaatcgtagtcggggaagactctactgaataagacatcagcattcttcagcattgtcatgagcttaatatacttaaattctactactcattggattgccggggatgtccctttaaacagactgctgccttcagctaaaaacttaatgttctttatacctttgtatgtatgacctacttttgtaacagaccatggttgtgtccaaggtaaaaccacagtgatatttttggatgctttgtctgcaatcttgacttgtttttgcagtatcattattcagacttcaaattgtgaatcttttaaacatcttgataatttgttgttgagagctgttcattctaaaatgtaatgaaattcagtctagttctgctgataaagatcatcagttttgaaaggttactgattttcctcttccctcttagttttttacccaatatatggagaagagtaatggtcaatcttaacattttgttttaattgtttaataaagctgctgggcagtggtgcagcattcctacctagtgtcataaaagcaaaatacttacatagctttcttaaaatataggaatgacattacatttttaggagaaagtaagttgctttgcaccgcctacttaattcttttccatatattgtgatacaaacttttgaatatggaatcttactatttgaatagaaatgtgtatgtataatatacatacatacataagcatatatgtgtgtgtgtgtgtgtatatatatatatatgcatgctgtgaaacttgactacacaacataaatcactttttaaattccaggaacgggtagtctgacacggtgattatccttttgaggctgaatccgttattaacttgttatttaggtttttactcccagtagcaagggattctaagttagttgcacttacatgattattgttatttaaaactaagaataaaggctgcattttcaaagataaattggaattgctgttggtgaaataacaaccaaaatactgaatctgatgtacatacaggtttctacaggaagagatggtataatttacaatttggagatttaataaccagggctacccagaaaaagtgacttgataacatggtaccaataagtaagggatgctctctcggtttgcttttgccactttcaagattttaacttctcaggttattaatcaaaattattgtataagttagccaatagaatttttaggttaaaacaacagatggggggtttgtggagtgtttaatgtcatgggcatttttagtaggatagaccctttgttctgcatttgaatgtttcgtatatttttgtttcacagttaatcttccctccccaagtttgctattcaaatcaactgcctgaatgacatttctagtagtctgatgtatttttctgaggaatagtttgtgattccaatgcaggtgtcttcattaccattacctctacactgcagaagaagcaaaactcctttattagaattactgcacatgtgtatggggaaaatagttctgaaaggctagaatgatacaagtgagcaaaagttggtcagcttggctatggagtggtggcaataatctctaaacattccaaaagaccatgagctgaacctaaactcccttggaatctgaacaaaggaatataaaattgccatttgaaaactgaccagctaatctggacctcagagatagatcagccagtggcccaaagccatttcaagtacagaaattatagagactacagctaaataaatttgaacattaaatataattttaccactttttgtctttataagcatatttgtaaactcagaactgagcagaagtgactttactttctcaagtttgatactgagttgactgttcccttatccctcacccttccccttccctttcctaaggcaatagtgcacaacttaggttatttttgcttccgaatttgaatgaaaaacttaatgccatggatttttttcttttgcaagacacctgtttatcatcttgtttaaatgtaaatgtccccttatgcttttgaaataaatttccttttgtaatttt

SEQ ID NO: 108290 - DNA, 2257 bp, Homo sapiens
  Payload ID: 1280
  Gene Symbol: API5
  Gene Name: apoptosis inhibitor 5
  Uniprot ID: Q9BZZ5
  ENST ID: ENST00000455725
  CDS Start-End: 246-1787
gcagccgcgctgtgcgcggtgactggcggctgcactggcggcagctggaggtgtaatagtgcgggtagtgggtttggagaagttccgaggcggcggtggcgccggtcaggacaaggatagcggaaccgggccctgggcttgtcgctcaccatgccgacagtagaggagctttaccgcaattatggcatcctggccgatgccacggagcaagtgggccagactcatccatctcccccaactcaaaaatgaaacaaagatggagggagaacggaattgggaagcataaagatgcctatcaagtgatattggatggtgtgaaaggtggtactaaggaaaagcgattagcagctcaatttattccgaaattctttaagcattttccagaattggctgattctgctatcaatgcacagttagacctctgtgaggatgaagatgtatctattcgacgtcaagcaattaaagaactgcctcaatttgccactggagaaaatcttcctcgagtggcagatatactaacgcaacttttgcagacagatgactctgcagaatttaacctagtgaacaatgccctattaagtatatttaaaatggatgcaaaagggactttaggtgggttgttcagccaaatacttcaaggagaggacattgttagagaacgagcaattaaattcctttctacaaaacttaagactttaccagatgaagtcttaacaaaggaagtggaagagcttatactaactgaatccaaaaaggtcctagaagatgtgactggtgaagaatttgttctatttatgaagatactgtctgggttaaaaagcttacagacagtgagtggaagacagcaacttgtagagttggtggctgaacaggccgacctagaacagaccttcaatccctcggatcctgactgtgtggacaggctcttacagtgcactcggcaggcagtacccctcttctctaaaaatgtccattccacaaggtttgtgacatatttctgtgagcaggttctccctaacctcggtaccttgactaccccagtggaaggtcttgatatacagttggaggtattgaaattgttggcggagatgagttcattttgtggtgacatggaaaaactagaaacaaatttaaggaaactatttgataagttattggaatacatgcccctccctccagaagaggcagaaaatggagagaatgctggtaatgaagaacccaagctacagttcagttatgtggaatgtttgttgtacagttttcaccagttgggccgaaaacttccagatttcttaacagccaaactgaatgcagaaaagctcaaagatttcaaaatcaggctgcagtactttgcacggggcctgcaagtttatatcagacaacttcgcttagctctccagggtaaaacgggtgaggccttaaaaacagaagagaacaagattaaagtcgttgcattgaaaataacaaacaatatcaatgttttaatcaaggatctcttccacattcctccttcttataagagcacagtaacactatcctggaaacctgtacaaaaggttgagattgggcaaaagagagccagtgaagatacaacttcaggttcaccacccaagaaatcttcagcaggaccaaaaagagatgccaggcagatttataaccctcccagtgggaaatatagcagcaatttgggcaactttaattatgagcagagaggagccttcaggggaagtagaggtggccgaggttggggcacacgaggaaatcgtagtcggggaagactctactgaataagacatcagcattcttcagcattgtcatgagcttaatatacttaaattctactactcattggattgccggggatgtccctttaaacagactgctgccttcagctaaaaacttaatgttctttatacctttgtatgtatgacctacttttgtaacagaccatggttgtgtccaaggtaaaaccacagtgatatttttggatgctttgtctgcaatcttgacttgtttttgcagtatcattattcagacttcaaattgtgaatcttttaaacatcttgataatttgttgttgagagctgttcattctaaaatgtaatgaaattcagtctagttctgctgataaagatcatcagttttgaaaggttactgattttcctcttccctcttagttttttacccaatatatggagaagagtaatggtcaatcttaacattttgttttaattgtttaataaagctgctgggcagt

SEQ ID NO: 108291 - DNA, 2009 bp, Homo sapiens
  Payload ID: 1280
  Gene Symbol: API5
  Gene Name: apoptosis inhibitor 5
  Uniprot ID: Q9BZZ5
  ENST ID: ENST00000420461
  CDS Start-End: 131-1483
gactggcggctgcactggcggcagctggaggtgtaatagtgcgggtagtgggtttggagaagttccgaggcggcggtggcgccggtcaggacaaggatagcggaaccgggccctgggcttgtcgctcaccatgccgacagtagaggagctttaccgcaattatggcatcctggccgatgccacggagcaagtgggccagattcgacgtcaagcaattaaagaactgcctcaatttgccactggagaaaatcttcctcgagtggcagatatactaacgcaacttttgcagacagatgactctgcagaatttaacctagtgaacaatgccctattaagtatatttaaaatggatgcaaaagggactttaggtgggttgttcagccaaatacttcaaggagaggacattgttagagaacgagcaattaaattcctttctacaaaacttaagactttaccagatgaagtcttaacaaaggaagtggaagagcttatactaactgaatccaaaaaggtcctagaagatgtgactggtgaagaatttgttctatttatgaagatactgtctgggttaaaaagcttacagacagtgagtggaagacagcaacttgtagagttggtggctgaacaggccgacctagaacagaccttcaatccctcggatcctgactgtgtggacaggctcttacagtgcactcggcaggcagtacccctcttctctaaaaatgtccattccacaaggtttgtgacatatttctgtgagcaggttctccctaacctcggtaccttgactaccccagtggaaggtcttgatatacagttggaggtattgaaattgttggcggagatgagttcattttgtggtgacatggaaaaactagaaacaaatttaaggaaactatttgataagttattggaatacatgcccctccctccagaagaggcagaaaatggagagaatgctggtaatgaagaacccaagctacagttcagttatgtggaatgtttgttgtacagttttcaccagttgggccgaaaacttccagatttcttaacagccaaactgaatgcagaaaagctcaaagatttcaaaatcaggctgcagtactttgcacggggcctgcaagtttatatcagacaacttcgcttagctctccagggtaaaacgggtgaggccttaaaaacagaagagaacaagattaaagtcgttgcattgaaaataacaaacaatatcaatgttttaatcaaggatctcttccacattcctccttcttataagagcacagtaacactatcctggaaacctgtacaaaaggttgagattgggcaaaagagagccagtgaagatacaacttcaggttcaccacccaagaaatcttcagcaggaccaaaaagagatgccaggcagatttataaccctcccagtgggaaatatagcagcaatttgggcaactttaattatgagaggagccttcaggggaagtagaggtggccgaggttggggcacacgaggaaatcgtagtcggggaagactctactgaataagacatcagcattcttcagcattgtcatgagcttaatatacttaaattctactactcattggattgccggggatgtccctttaaacagactgctgccttcagctaaaaacttaatgttctttatacctttgtatgtatgacctacttttgtaacagaccatggttgtgtccaaggtaaaaccacagtgatatttttggatgctttgtctgcaatcttgacttgtttttgcagtatcattattcagacttcaaattgtgaatcttttaaacatcttgataatttgttgttgagagctgttcattctaaaatgtaatgaaattcagtctagttctgctgataaagatcatcagttttgaaaggttactgattttcctcttccctcttagttttttacccaatatatggagaagagtaatggtcaatcttaacattttgttttaattgtttaataaagctgctgggcagtg

SEQ ID NO: 108292 - DNA, 1868 bp, Homo sapiens
  Payload ID: 1280
  Gene Symbol: API5
  Gene Name: apoptosis inhibitor 5
  Uniprot ID: Q9BZZ5
  ENST ID: ENST00000531273
  CDS Start-End: 140-1714
gtgcgcggtgactggcggctgcactggcggcagctggaggtgtaatagtgcgggtagtgggtttggagaagttccgaggcggcggtggcgccggtcaggacaaggatagcggaaccgggccctgggcttgtcgctcaccatgccgacagtagaggagctttaccgcaattatggcatcctggccgatgccacggagcaagtgggccagcataaagatgcctatcaagtgatattggatggtgtgaaaggtggtactaaggaaaagcgattagcagctcaatttattccgaaattctttaagcattttccagaattggctgattctgctatcaatgcacagttagacctctgtgaggatgaagatgtatctattcgacgtcaagcaattaaagaactgcctcaatttgccactggagaaaatcttcctcgagtggcagatatactaacgcaacttttgcagacagatgactctgcagaatttaacctagtgaacaatgccctattaagtatatttaaaatggatgcaaaagggactttaggtgggttgttcagccaaatacttcaaggagaggacattgttagagaacgagcaattaaattcctttctacaaaacttaagactttaccagatgaagtcttaacaaaggaagtggaagagcttatactaactgaatccaaaaaggtcctagaagatgtgactggtgaagaatttgttctatttatgaagatactgtctgggttaaaaagcttacagacagtgagtggaagacagcaacttgtagagttggtggctgaacaggccgacctagaacagaccttcaatccctcggatcctgactgtgtggacaggctcttacagtgcactcggcaggcagtacccctcttctctaaaaatgtccattccacaaggtttgtgacatatttctgtgagcaggttctccctaacctcggtaccttgactaccccagtggaaggtcttgatatacagttggaggtattgaaattgttggcggagatgagttcattttgtggtgacatggaaaaactagaaacaaatttaaggaaactatttgataagttattggaatacatgcccctccctccagaagaggcagaaaatggagagaatgctggtaatgaagaacccaagctacagttcagttatgtggaatgtttgttgtacagttttcaccagttgggccgaaaacttccagatttcttaacagccaaactgaatgcagaaaagctcaaagatttcaaaatcaggctgcagtactttgcacggggcctgcaagtttatatcagacaacttcgcttagctctccagggtaaaacgggtgaggccttaaaaacagaagagaacaagattaaagtcgttgcattgaaaataacaaacaatatcaatgttttaatcaaggatctcttccacattcctccttcttataagagcacagtaacactatcctggaaacctgtacaaaaggttgagattgggcaaaagagagccagtgaagatacaacttcaggttcaccacccaagaaatcttcagcaggaccaaaaagagatgccaggcagatttataaccctcccagtgggaaatatagcagcaatttgggcaactttaattatgagcagagaggagccttcaggggaagtagaggtggccgaggttggggcacacgaggaaatcgtagtcggggaagactctactgaataagacatcagcattcttcagcattgtcatgagcttaatatacttaaattctactactcattggattgccggggatgtccctttaaacagactgctgccttcagctaaaaacttaatgttctttatacctttgtatgtatgacctacttttgt

SEQ ID NO: 108293 - DNA, 1760 bp, Homo sapiens
  Payload ID: 1280
  Gene Symbol: API5
  Gene Name: apoptosis inhibitor 5
  ENST ID: ENST00000534600
  CDS Start-End: 33-1565
agcggaaccgggccctgggcttgtcgctcaccatgccgacagtagaggagctttaccgcaattatggcatcctggccgatgccacggagcaagtgggccagcataaagatgcctatcaagtgatattggatggtgtgaaaggtggtactaaggaaaagcgattagcagctcaatttattccgaaattctttaagcattttccagaattggctgattctgctatcaatgcacagttagacctctgtgaggatgaagatgtatctattcgacgtcaagcaattaaagaactgcctcaatttgccactggagaaaatcttcctcgagtggcagatatactaacgcaacttttgcagacagatgactctgcagaatttaacctagtgaacaatgccctattaagtatatttaaaatggatgcaaaagggactttaggtgggttgttcagccaaatacttcaaggagaggacattgttagagaacgagcaattaaattcctttctacaaaacttaagactttaccagatgaagtcttaacaaaggaagtggaagagcttatactaactgaatccaaaaaggtcctagaagatgtgactggtgaagaatttgttctatttatgaagatactgtctgggttaaaaagcttacagacagtgagtggaagacagcaacttgtagagttggtggctgaacaggccgacctagaacagaccttcaatccctcggatcctgactgtgtggacaggctcttacagtgcactcggcaggcagtacccctcttctctaaaaatgtccattccacaaggtttgtgacatatttctgtgagcaggttctccctaacctcggtaccttgactaccccagtggaaggtcttgatatacagttggaggtattgaaattgttggcggagatgagttcattttgtggtgacatggaaaaactagaaacaaatttaaggaaactatttgataagttattggaatacatgcccctccctccagaagaggcagaaaatggagagaatgctggtaatgaagaacccaagctacagttcagttatgtggaatgtttgttgtacagttttcaccagttgggccgaaaacttccagatttcttaacagccaaactgaatgcagaaaagctcaaagatttcaaaatcaggctgcagtactttgcacggggcctgcaagtttatatcagacaacttcgcttagctctccagggtaaaacgggtgaggccttaaaaacagaagagaacaagattaaagtcgttgcattgaaaataacaaacaatatcaatgttttaatcaaggatctcttccacattcctccttcttataagagcacagtaacactatcctggaaacctgtacaaaaggttgagattgggcaaaagagagccagtgaagatacaacttcaggttcaccacccaagaaatcttcagcaggaccaaaaagagatgccaggcagatttataaccctcccagtgggaaatatagcagcaatttgggcaactttaattatggtgagcgtttccgtttgggtacaaggaatatgagagattaggcagaaattgtgttatactttattttaattagtaattatatacagtgtcatggttctatccaatgacttttctgaattagcttggagaactagggctgttgaggaaatgatttatcccattcctctctcattcacccttctgggctgactgtattgaacatgcaacattaaacagtaagcacttaaagaaaaata

SEQ ID NO: 108294 - DNA, 560 bp, Homo sapiens
  Payload ID: 1280
  Gene Symbol: API5
  Gene Name: apoptosis inhibitor 5
  ENST ID: ENST00000534695
  CDS Start-End: 166-537
gtagacgtcgggggcgcagccgcgctgtgcgcggtgactggcggctgcactggcggcagctggaggtgtaatagtgcgggtagtgggtttggagaagttccgaggcggcggtggcgccggtcaggacaaggatagcggaaccgggccctgggcttgtcgctcaccatgccgacagtagaggagctttaccgcaattatggcatcctggccgatgccacggagcaagtgggccagcataaagatgcctatcaagtgatattggatggtgtgaaaggtggtactaaggaaaagcgattagcagctcaatttattccgaaattctttaagcattttccagaattggctgattctgctatcaatgcacagttagacctctgtgaggatgaagatgtatctaagacatcagcattcttcagcattgtcatgagcttaatatacttaaattctactactcattggattgccggggatgtccctttaaacagactgctgccttcagctaaaaacttaatgttctttatacctttgtatgtatgacctacttttgtaacagaccatgg

SEQ ID NO: 108295 - DNA, 883 bp, Homo sapiens
  Payload ID: 1280
  Gene Symbol: API5
  Gene Name: apoptosis inhibitor 5
  ENST ID: ENST00000526394
  CDS Start-End: 1-883
gcaattaaattcctttctacaaaacttaagactttaccagatgaagtcttaacaaaggaagtggaagagcttatactaactgaatccaaaaaggtcctagaagatgtgactggtgaagaatttgttctatttatgaagatactgtctgggttaaaaagcttacagacagtgagtggaagacagcaacttgtagagttggtggctgaacaggccgacctagaacagaccttcaatccctcggatcctgactgtgtggacaggctcttacagtgcactcggcaggcagtacccctcttctctgtattgaaattgttggcggagatgagttcattttgtggtgacatggaaaaactagaaacaaatttaaggaaactatttgataagttattggaatacatgcccctccctccagaagaggcagaaaatggagagaatgctggtaatgaagaacccaagctacagttcagttatgtggaatgtttgttgtacagttttcaccagttgggccgaaaacttccagatttcttaacagccaaactgaatgcagaaaagctcaaagatttcaaaatcaggctgcagtactttgcacggggcctgcaagtttatatcagacaacttcgcttagctctccagggtaaaacgggtgaggccttaaaaacagaagagaacaagattaaagtcgttgcattgaaaataacaaacaatatcaatgttttaatcaaggatctcttccacattcctccttcttataagagcacagtaacactatcctggaaacctgtacaaaaggttgagattgggcaaaagagagccagtgaagatacaacttcaggttcaccacccaagaaatcttcagcaggaccaaaaagagatgccaggcaga

SEQ ID NO: 108296 - DNA, 5456 bp, Homo sapiens
  Payload ID: 1281
  Gene Symbol: AREL1
  Gene Name: apoptosis resistant E3 ubiquitin protein ligase 1
  Uniprot ID: O15033
  ENST ID: ENST00000356357
  CDS Start-End: 517-2988
atagcccggaagcggaaactccttggggaaagggcaatcccccgagccggttcccaggccgggtggagaccaactctggggtctgttggtgggagagtggggagcccgtcttctgctgagtgctgccgccccttcccaggacagcggaggtggaacttcgtcgcgctgcaacccccggctcgggatcctggggcgtcctttggcagtcgattgcaccctgcactagagagaagtccaggaatgatatattcttgggctgtatttctctaccctggagttcatccagttcatcccagaaacactgacctgattactgtgacaaagtctgatggatagaccctttctgttgaccttgtggcgtttttctttcatgtggaagttggaagacaaggtgaaaggggccaaaagttacctgctttggtgaataggagtgctctacttggttctcagaacatgggccctcgtttaaagctgcagctgtgatcctcggctgtctgttggcattgacgggacctgatgttttacgttattggtggaatcacagtgtctgtggttgcattcttcttcacaattaagttcctctttgagcttgccgcacgtgtagtcagcttcctccagaatgaggaccgcgagcgccgaggggaccggactatttatgactacgtgcggggaaattacctggatccccggtcttgcaaagtctcctgggattggaaggacccctatgaggtgggccacagcatggccttccgagtgcatttattctataagaacgggcagcctttccctgcacatcggcctgtgggactaagagttcacatctctcatgtcgagctagcagtggaaattccagtgacccaggaagtccttcaggagcccaattccaacgtagtaaaagtggccttcactgtgcgcaaggctgggcgttatgaaatcacagtgaagcttggtggattaaatgtggcatatagtccctactacaaaatttttcaacctggaatggtggttccttctaagaccaaaattgtgtgccacttttctactcttgtattgacctgtgggcagccgcacacccttcaaatagtaccccgagatgagtatgataatcccaccaacaattccatgtccttgagagatgagcacaattacaccttgtccattcatgagctcggccctcaagaagaagagagtactggtgtctcatttgagaaatcagtaacatccaacaggcagactttccaggtgttcttgcgactcaccctgcattctcgaggctgcttccatgcttgcatttcataccaaaatcagccaatcaataatggtgaatttgacattattgtcctaagtgaggatgagaagaatatcgtcgaacgcaatgtgtccacttcaggcgtgagcatttactttgaggcttatctttataatgctaccaactgtagcagcactccatggcacctgccacccatgcacatgacctcttcccagcgccggccatccactgctgttgacgaggaagatgaagactcgccctctgagtgccacacccctgagaaggtgaagaaaccgaagaaggtgtactgctatgtgtcaccaaagcaattctcagtgaaggagttctacctgaagatcatcccctggcgcctttacaccttccgagtgtgtccaggaacaaaattttcataccttggtcctgaccctgtccataagctgctcacactggtggtggatgatggcattcaacctcctgtggagctcagctgtaaggagaggaacattctagcagccacttttatccgctccctgcataagaacataggaggctctgagacctttcaggacaaggtgaactttttccagcgagagcttcggcaggtacatatgaaaagaccacattccaaagtcaccctgaaggtcagcagacatgccttgttggaatcgtctctgaaagccactcggaatttctccatctcagattggagcaagaactttgaggttgttttccaggatgaagaagctctggactggggagggcctcgccgggaatggtttgagctaatctgcaaagcactatttgataccaccaatcagctcttcacccggttcagtgacaacaaccaagcattagtgcatcccaaccctaatcgccccgctcatctgcgcctgaaaatgtatgagtttgcgggacggctcgtgggcaagtgtctctatgagtcctctctaggaggagcctacaagcagttggtccgagctcgcttcacccgctctttcctggcccaaatcataggactgcgtatgcattacaagtactttgaaacagatgacccagaattctacaaatctaaagtttgttttatcctcaacaatgacatgagtgagatggagctggtctttgcagaagagaaatataataaatcaggtcaattggataaggttgtagaactcatgacaggtggagctcaaactccagtcaccaatgcgaataaaatcttctatttaaatttgctggcccaatatcggctggccagtcaagtgaaagaggaggtggaacatttcctaaaaggcctgaatgaattggtccctgagaaccttttggctatttttgatgagaatgagcttgagctgctgatgtgtgggactggagacatcagtgtgtctgacttcaaagcccatgcagtagttgttggtggctcatggcatttcagagaaaaggtcatgaggtggttttggactgtggtttccagtctgacccaggaggagttggctcggctacttcagttcacaacaggctcctctcagctaccacctggaggctttgccgccctctgtccctcatttcagattattgccgctccgacccatagcacgctgcctactgcacacacatgttttaaccagctgtgcctccctacatatgactcctatgaagaggtgcacaggatgctgcagctggccatcagcgagggttgcgagggctttggcatgctctgaccactctcctgtcatccagttggctcccatgctctctggagcttctgggcgcaagttacagacatcataaccactgatcctaacacacataaccatcagccagaagatgccgcatgctcccctgtgtctggaggattttgtcacctacaagccttgtctttacctcacctgctccctgcccatatctaccacaggccactttggcatggtatgtaagctgagctcttcattctgtcatgagaagaggaccatgctgctatcatttatttggtcctttgaagatctcagtagctgagggagatggcacacggggctcagccctgttgggaaactggtgtggagacccttaaatccacactgtgctccaaaactccctctgctgatactccttggagacaccctctttggccctcactacttgaccagactggtacttgagtccttctcatgggtggggtgattgcctcttctcatcaggagccaggagagagggggacagataggaggtggcccataggagcagtcccgctgcacaatggtaggcataggccatggcactggactgcctctaaggactgctaaaaagaatatttttttgtggtgtcagaactggaaaaagcactttcccttcgggcatttctggaaatgattattaatccacaaagaagaactctgtaagctttttcttgaattgtagccagtgagaaaagcagatagactgaagaatatgaaggatagctgagctgtagcctccagagtggggcatgcctaggcatatggctggcttggagactactgatgcttttccctgagtttgttattggcactgaagtatggccggcttgggccactgacttccccattatgtagtctgctaaaagctggggatcctttagcattctactgaagaaaattttgtagcaaaagattagaacagtaagaatagtatgccagcaatccctgattctctctctgcttggtgttctctggcagcactaagacaaaggaacagggactaggagtttacgtgcttatcacaggtccttggcgtcaggacactagggatgaacatggaggtgatatgttacacagtaaacacctgccaacccctgtactcccctttgctccatcagttatcaggaaggagaactaaggagggaggaagcttattaggttcactgttgaatgatgattgaagagtacctgctgctgtatcttggaagatgacaacatcctttttcattactgtttgattgaaaataatttcaagattcaaaatctcattgacttcccaaatttgtgtttttaagaaggctttgctgcaagctaccattcccaatggggcagtcaactctgagaatattacaagccatctttattgccaaaaccagcaagtacacagagtcctgaaacaaggcaggactttggcaatgccttggcctcctggaagcatgtctgagccctcctgttcgcagggatcatgaggaacaagccctcctgagctgctacagttcctgcctgacctcagtctttcgcagtcatcatttgtcctttcttggcacatgggtgctgacctcactcatccttggggtccgggatccagcatcagggtctctataccccaggatcctccatgccacatggtcactgctctcctcagggaccaggacaaggtgctgctgcttgcccaaatgttttcccatgggatatgtaccggaaggtttatcaccaccctgggaaacataatgctgccccttgggcccagaaaggggtttccagctgggggcacgtggactggttctgctgtttttggcagtcgcttttctgaattctcccctccggcagccttccagagactgatcctggagattgagttgattgtcttggctagacctgtcattttaagctctagtcatagcactttttcagagcatcttaggcaccattgcaacccaaccagggaagctgcatccctgtggtggtccttaggcaccagtctttgttaaacaaaaccctttggcactattgtggttttctattctctgtctgaactctattcaaaagtatctttgctctcttgggccttttcttttactgttttgttttttttttttctaatcctgctttcatactagccagtgtggggaaaaggtacaatatgtcaaagagatgagagagtgttatttcttgggcaattttctattagtgtttcttattttggccagttcttttatttatgtccttgtgacccaggtacttggggggccagctacccttctggccttttagcgtctttgaaggagaccagacatgagtgaatacctaggagagtgtcagcatgtttctggaaaattggcagagaccaagccctgctgcagattcgtcaggccaggtgaaagggccaggcagttgcagctgatgatgtaaatattttgtacagtagataaataaatgtttaaaagaactaa

SEQ ID NO: 108297 - DNA, 581 bp, Homo sapiens
  Payload ID: 1281
  Gene Symbol: AREL1
  Gene Name: apoptosis resistant E3 ubiquitin protein ligase 1
  ENST ID: ENST00000555249
  CDS Start-End: 194-581
aatcccccgagccggttcccaggccgggtggagaccaactctggggtctgttggtgggagagtggggagcccgtcttctgctgagtgctgccgccccttcccaggacagcggaggtggaacttcgtcgcgctgcaacccccggctcggctgcagctgtgatcctcggctgtctgttggcattgacgggacctgatgttttacgttattggtggaatcacagtgtctgtggttgcattcttcttcacaattaagttcctctttgagcttgccgcacgtgtagtcagcttcctccagaatgaggaccgcgagcgccgaggggaccggactatttatgactacgtgcggggaaattacctggatccccggtcttgcaaagtctcctgggattggaaggacccctatgaggtgggccacagcatggccttccgagtgcatttattctataagaacgggcagcctttccctgcacatcggcctgtgggactaagagttcacatctctcatgtcgagctagcagtggaaattccagtgacccaggaagtccttcaggagcccaattccaacgtagtaaaagtggcct

SEQ ID NO: 108298 - DNA, 4855 bp, Homo sapiens
  Payload ID: 1281
  Gene Symbol: AREL1
  Gene Name: apoptosis resistant E3 ubiquitin protein ligase 1
  ENST ID: ENST00000555330
  CDS Start-End: 46-1560
ctgcagctgtgatcctcggctgtctgttggcattgacgggacctgatgttttacgttattggtggaatcacagtgtctgtggttgcattcttcttcacaattaagttcctctttgagcttgccgcacgtgtagtcagcttcctccagaatgaggaccgcgagcgccgaggggaccggactatttatgactacgtgcggggaaattacctggatccccggtcttgcaaagtctcctgggattggaaggacccctatgaggtgggccacagcatggccttccgagtgcatttattctataagaacgggcagcctttccctgcacatcggcctgtgggactaagagttcacatctctcatgtcgagctagcagtggaaattccagtgacccaggaagtccttcaggagcccaattccaacgtagtaaaagtggccttcactgtgcgcaaggctgggcgttatgaaatcacagtgaagcttggtggattaaatgtggcatatagtccctactacaaaatttttcaacctggaatggtggttccttctaagaccaaaattgtgtgccacttttctactcttgtattgacctgtgggcagccgcacacccttcaaatagtaccccgagatgagtatgataatcccaccaacaattccatgtccttgagagatgagcacaattacaccttgtccattcatgagctcggccctcaagaagaagagagtactggtgtctcatttgagaaatcagtaacatccaacaggcagactttccaggtgttcttgcgactcaccctgcattctcgaggctgcttccatgcttgcatttcataccaaaatcagccaatcaataatggtgaatttgacattattgtcctaagtgaggatgagaagaatatcgtcgaacgcaatgtgtccacttcaggcgtgagcatttactttgaggcttatctttataatgctaccaactgtagcagcactccatggcacctgccacccatgcacatgacctcttcccagcgccggccatccactgctgttgacgaggaagatgaagactcgccctctgagtgccacacccctgagaaggtgaagaaaccgaagaaggtgtactgctatgtgtcaccaaagcaattctcagtgaaggagttctacctgaagatcatcccctggcgcctttacaccttccgagtgtgtccaggaacaaaattttcataccttggtcctgaccctgtccataagctgctcacactggtggtggatgatggcattcaacctcctgtggagctcagctgtaaggagaggaacattctagcagccacttttatccgctccctgcataagaacataggaggctctgagacctttcaggacaaggtgaactttttccagcgagagcttcggcaggtacatatgaaaagaccacattccaaagtcaccctgaaggtcagcagacatgccttgttggaatcgtctctgaaagccactcggaatttctccatctcagattggagcaagaactttgaggttgttttccaggatgaagaaggtgcatcccaaccctaatcgccccgctcatctgcgcctgaaaatgtatgagtttgcgggacggctcgtgggcaagtgtctctatgagtcctctctaggaggagcctacaagcagttggtccgagctcgcttcacccgctctttcctggcccaaatcataggactgcgtatgcattacaagtactttgaaacagatgacccagaattctacaaatctaaagtttgttttatcctcaacaatgacatgagtgagatggagctggtctttgcagaagagaaatataataaatcaggtcaattggataaggttgtagaactcatgacaggtggagctcaaactccagtcaccaatgcgaataaaatcttctatttaaatttgctggcccaatatcggctggccagtcaagtgaaagaggaggtggaacatttcctaaaaggcctgaatgaattggtccctgagaaccttttggctatttttgatgagaatgagcttgagctgctgatgtgtgggactggagacatcagtgtgtctgacttcaaagcccatgcagtagttgttggtggctcatggcatttcagagaaaaggtcatgaggtggttttggactgtggtttccagtctgacccaggaggagttggctcggctacttcagttcacaacaggctcctctcagctaccacctggaggctttgccgccctctgtccctcatttcagattattgccgctccgacccatagcacgctgcctactgcacacacatgttttaaccagctgtgcctccctacatatgactcctatgaagaggtgcacaggatgctgcagctggccatcagcgagggttgcgagggctttggcatgctctgaccactctcctgtcatccagttggctcccatgctctctggagcttctgggcgcaagttacagacatcataaccactgatcctaacacacataaccatcagccagaagatgccgcatgctcccctgtgtctggaggattttgtcacctacaagccttgtctttacctcacctgctccctgcccatatctaccacaggccactttggcatggtatgtaagctgagctcttcattctgtcatgagaagaggaccatgctgctatcatttatttggtcctttgaagatctcagtagctgagggagatggcacacggggctcagccctgttgggaaactggtgtggagacccttaaatccacactgtgctccaaaactccctctgctgatactccttggagacaccctctttggccctcactacttgaccagactggtacttgagtccttctcatgggtggggtgattgcctcttctcatcaggagccaggagagagggggacagataggaggtggcccataggagcagtcccgctgcacaatggtaggcataggccatggcactggactgcctctaaggactgctaaaaagaatatttttttgtggtgtcagaactggaaaaagcactttcccttcgggcatttctggaaatgattattaatccacaaagaagaactctgtaagctttttcttgaattgtagccagtgagaaaagcagatagactgaagaatatgaaggatagctgagctgtagcctccagagtggggcatgcctaggcatatggctggcttggagactactgatgcttttccctgagtttgttattggcactgaagtatggccggcttgggccactgacttccccattatgtagtctgctaaaagctggggatcctttagcattctactgaagaaaattttgtagcaaaagattagaacagtaagaatagtatgccagcaatccctgattctctctctgcttggtgttctctggcagcactaagacaaaggaacagggactaggagtttacgtgcttatcacaggtccttggcgtcaggacactagggatgaacatggaggtgatatgttacacagtaaacacctgccaacccctgtactcccctttgctccatcagttatcaggaaggagaactaaggagggaggaagcttattaggttcactgttgaatgatgattgaagagtacctgctgctgtatcttggaagatgacaacatcctttttcattactgtttgattgaaaataatttcaagattcaaaatctcattgacttcccaaatttgtgtttttaagaaggctttgctgcaagctaccattcccaatggggcagtcaactctgagaatattacaagccatctttattgccaaaaccagcaagtacacagagtcctgaaacaaggcaggactttggcaatgccttggcctcctggaagcatgtctgagccctcctgttcgcagggatcatgaggaacaagccctcctgagctgctacagttcctgcctgacctcagtctttcgcagtcatcatttgtcctttcttggcacatgggtgctgacctcactcatccttggggtccgggatccagcatcagggtctctataccccaggatcctccatgccacatggtcactgctctcctcagggaccaggacaaggtgctgctgcttgcccaaatgttttcccatgggatatgtaccggaaggtttatcaccaccctgggaaacataatgctgccccttgggcccagaaaggggtttccagctgggggcacgtggactggttctgctgtttttggcagtcgcttttctgaattctcccctccggcagccttccagagactgatcctggagattgagttgattgtcttggctagacctgtcattttaagctctagtcatagcactttttcagagcatcttaggcaccattgcaacccaaccagggaagctgcatccctgtggtggtccttaggcaccagtctttgttaaacaaaaccctttggcactattgtggttttctattctctgtctgaactctattcaaaagtatctttgctctcttgggccttttcttttactgttttgttttttttttttctaatcctgctttcatactagccagtgtggggaaaaggtacaatatgtcaaagagatgagagagtgttatttcttgggcaattttctattagtgtttcttattttggccagttcttttatttatgtccttgtgacccaggtacttggggggccagctacccttctggccttttagcgtctttgaaggagaccagacatgagtgaatacctaggagagtgtcagcatgtttctggaaaattggcagagaccaagccctgctgcagattcgtcaggccaggtgaaagggccaggcagttgcagctgatgatgtaaatattttgtacagtagataaa

SEQ ID NO: 108299 - DNA, 742 bp, Homo sapiens
  Payload ID: 1281
  Gene Symbol: AREL1
  Gene Name: apoptosis resistant E3 ubiquitin protein ligase 1
  ENST ID: ENST00000554070
  CDS Start-End: 1-270
tggttttggactgtggtttccagtctgacccaggaggagttggctcggctacttcagttcacaacaggctcctctcagctaccacctggaggctttgccgccctctgtccctcatttcagattattgccgctccgacccatagcacgctgcctactgcacacacatgttttaaccagctgtgcctccctacatatgactcctatgaagaggtgcacaggatgctgcagctggccatcagcgagggttgcgagggctttggcatgctctgaccactctcctgtcatccagttggctcccatgctctctggagcttctgggcgcaagttacagacatcataaccactgatcctaacacacataaccatcagccagaagatgccgcatgctcccctgtgtctggaggattttgtcacctacaagccttgtctttacctcacctgctccctgcccatatctaccacaggccactttggcatgaaattcaatatagaaaatttggaaataagaaaaagaacaagggaaataggcaggccagagagaatgagtactcaagacacctggcccaaacattcatgaagaagacaccaagtcagaagagacttcctcctttgcatgatcctctcttcccatatgctaggagctttagtatttattgtctcattcacaacaaccctgcaagctagcagctgtggatactccgaacagaccagtgaggcagagcagcaaaagcagcctggaact

SEQ ID NO: 108300 - DNA, 874 bp, Homo sapiens
  Payload ID: 1281
  Gene Symbol: AREL1
  Gene Name: apoptosis resistant E3 ubiquitin protein ligase 1
  ENST ID: ENST00000481010
  CDS Start-End: 1-358
gtcaccaaagcaattctcagtgaaggagttctacctgaagatcatcccctggcgcctttacaccttccgagtgtgtccaggaacaaaattttcataccttggtcctgaccctgtccataagctgctcacactggtggtggatgatggcattcaacctcctgtggagctcagctgtaaggagaggaacattctagcagccacttttatccgctccctgcataagaacataggaggctctgagacctttcaggacaaggtgaactttttccagcgagagcttcggcaggtacatatgaaaagaccacattccaaagtcaccctgaaggtcagcagacatgccttgttggaatcggaatgagaaggcttggttcctgtccagaaagtgtttgtgatgtttggctctgtctctgaaagccactcggaatttctccatctcagattggagcaagaactttgaggttgttttccaggatgaagaagctctggactggggagggcctcgccgggaatggtttgagctaatctgcaaagcactatttgataccaccaatcagctcttcacccggttcagtgacaacaaccaagcattatctctttcttggacaggtgcatcccaaccctaatcgccccgctcatctgcgcctgaaaatgtatgagtttgcgggacggctcgtgggcaagtgtctctatgagtcctctctaggaggagcctacaagcagttggtccgagctcgcttcacccgctctttcctggcccaaatcataggactgcgtatgcattacaagtactttgaaacagatgacccagaattctacaaatctaaagtttgttttatcctcaacaatgacatgagtgagatggagctggtctttg

SEQ ID NO: 108301 - DNA, 761 bp, Homo sapiens
  Payload ID: 1281
  Gene Symbol: AREL1
  Gene Name: apoptosis resistant E3 ubiquitin protein ligase 1
  ENST ID: ENST00000553411
  CDS Start-End: 1-246
gtggccttcactgtgcgcaaggctgggcgttatgaaatcacagtgaagcttggtggattaaatgtggcatatagtccctactacaaaatttttcaacctggaatagggtctcactatgttgcccagggtggtctcgaactcctggactcaagtaatcttcctgctttggccttccaaagtgttgggattacaggcgtgagccaagtcacacagcctgattactgtagctcttataataagtcttgaaattggaatggtggttccttctaagaccaaaattgtgtgccacttttctactcttgtattgacctgtgggcagccgcacacccttcaaatagtaccccgagatgagtatgataatcccaccaacaattccatgtccttgagagatgagcacaattacaccttgtccattcatgagctcggccctcaagaagaagagagtactggtgtctcatttgagaaatcagtaacatccaacaggcagactttccaggtgttcttgcgactcaccctgcattctcgaggctgcttccatgcttgcatttcataccaaaatcagccaatcaataatggtgaatttgacattattgtcctaagtgaggatgagaagaatatcgtcgaacgcaatgtgtccacttcaggcgtgagcatttactttgaggcttatctttataatgctaccaactgtagcagcactccatggcacctgccacccatgcacatgacctcttcccagcgccggccatccactgctgttg

SEQ ID NO: 108302 - DNA, 394 bp, Homo sapiens
  Payload ID: 1281
  Gene Symbol: AREL1
  Gene Name: apoptosis resistant E3 ubiquitin protein ligase 1
  ENST ID: ENST00000490805
  CDS Start-End: 1-394
gctgcttccatgcttgcatttcataccaaaatcagccaatcaataatggtgaatttgacattattgtcctaagtgaggatgagaagaatatcgtcgaacgcaatgtgtccacttcaggcgtgagcatttactttgaggcttatctttataatgctaccaactgtagcagcactccatggcacctgccacccatgcacatgacctcttcccagcgccggccatccactgctgttgacgaggaagatgaagactcgccctctgagtgccacacccctgagaagcaattctcagtgaaggagttctacctgaagatcatcccctggcgcctttacaccttccgagtgtgtccaggaacaaaattttcataccttggtcctgaccctgtccataagct

SEQ ID NO: 108303 - DNA, 2639 bp, Homo sapiens
  Payload ID: 1281
  Gene Symbol: AREL1
  Gene Name: apoptosis resistant E3 ubiquitin protein ligase 1
  ENST ID: ENST00000556202
  CDS Start-End: 745-2639
aaagggcaatcccccgagccggttcccaggccgggtggagaccaactctggggtctgttggtgggagagtggggagcccgtcttctgctgagtgctgccgccccttcccaggacagcggaggtggaacttcgtcgcgctgcaacccccggctcgggatcctggggcgtcctttggcagtcgattgcaccctgcactagagagaagtccaggaatgatatattcttgggctgtatttctctaccctggagttcatccagttcatcccagaaacactgacctgattactgtgacaaagtctgatggatagaccctttctgttgaccttgtggcgtttttctttcatgtggaagttggaagacaaggtgaaaggggccaaaagttacctgctttggtgaataggagtgctctacttggttctcagaacatgggccctcgtttaaagctgcagctgtgatcctcggctgtctgttggcattgacgggacctgatgttttacgttattgttattctataagaacgggcagcctttccctgcacatcggcctgtgggactaagagttcacatctctcatgtcgagctagcagtggaaattccagtgacccaggaagtccttcaggagcccaattccaacgtagtaaaagtggccttcactgtgcgcaaggctgggcgttatgaaatcacagtgaagcttggtggattaaatgtggcatatagtccctactacaaaatttttcaacctggaatggtggttccttctaagaccaaaattgtgtgccacttttctactcttgtattgacctgtgggcagccgcacacccttcaaatagtaccccgagatgagtatgataatcccaccaacaattccatgtccttgagagatgagcacaattacaccttgtccattcatgagctcggccctcaagaagaagagagtactggtgtctcatttgagaaatcagtaacatccaacaggcagactttccaggtgttcttgcgactcaccctgcattctcgaggctgcttccatgcttgcatttcataccaaaatcagccaatcaataatggtgaatttgacattattgtcctaagtgaggatgagaagaatatcgtcgaacgcaatgtgtccacttcaggcgtgagcatttactttgaggcttatctttataatgctaccaactgtagcagcactccatggcacctgccacccatgcacatgacctcttcccagcgccggccatccactgctgttgacgaggaagatgaagactcgccctctgagtgccacacccctgagaaggtgaagaaaccgaagaaggtgtactgctatgtgtcaccaaagcaattctcagtgaaggagttctacctgaagatcatcccctggcgcctttacaccttccgagtgtgtccaggaacaaaattttcataccttggtcctgaccctgtccataagctgctcacactggtggtggatgatggcattcaacctcctgtggagctcagctgtaaggagaggaacattctagcagccacttttatccgctccctgcataagaacataggaggctctgagacctttcaggacaaggtgaactttttccagcgagagcttcggcaggtacatatgaaaagaccacattccaaagtcaccctgaaggtcagcagacatgccttgttggaatcgtctctgaaagccactcggaatttctccatctcagattggagcaagaactttgaggttgttttccaggatgaagaagctctggactggggagggcctcgccgggaatggtttgagctaatctgcaaagcactatttgataccaccaatcagctcttcacccggttcagtgacaacaaccaagcattagtgcatcccaaccctaatcgccccgctcatctgcgcctgaaaatgtatgagtttgcgggacggctcgtgggcaagtgtctctatgagtcctctctaggaggagcctacaagcagttggtccgagctcgcttcacccgctctttcctggcccaaatcataggactgcgtatgcattacaagtactttgaaacagatgacccagaattctacaaatctaaagtttgttttatcctcaacaatgacatgagtgagatggagctggtctttgcagaagagaaatataataaatcaggtcaattggataaggttgtagaactcatgacaggtggagctcaaactccagtcaccaatgcgaataaaatcttctatttaaatttgctggcccaatatcggctggccagtcaagtgaaagaggaggtggaacatttcctaaaaggcctgaatgaattggtccctgagaaccttttggctatttttgatgagaatgagcttgagctgctgatgtgtgggactggagacatcagtgtgtctgacttcaaagcccatgcagtagttgttggtggctcatggcatttcagagaaaaggtcatgaggtggttttggactgtggtttccagtctgacccaggaggagttggctcggctacttcagttcacaacaggctcctctcagctaccacctggaggctttgccgccctctgtccctcatttcagattattgccgctccgacccatagcacgctgcctactgcacacacatgttttaacca

SEQ ID NO: 108304 - DNA, 706 bp, Homo sapiens
  Payload ID: 1281
  Gene Symbol: AREL1
  Gene Name: apoptosis resistant E3 ubiquitin protein ligase 1
  ENST ID: ENST00000553279
  CDS Start-End: 32-331
ctcggctgtctgttggcattgacgggacctgatgttttacgttattggtggaatcacagtgtctgtggttgcattcttcttcacaattaagttcctctttgagcttgccgcacgtgtagtcagcttcctccagaatgaggaccgcgagcgccgaggggaccggactatttatgactacgtgcggggaaattacctggatccccggtcttgcaaagtctcctgggattggaaggacccctatgaggtgggccacagcatggccttccgagtgcatgaatggtggttccttctaagaccaaaattgtgtgccacttttctactcttgtattgacctgtgggcagccgcacacccttcaaatagtaccccgagatgagtatgataatcccaccaacaattccatgtccttgagagatgagcacaattacaccttgtccattcatgagctcggccctcaagaagaagagagtactggtgtctcatttgagaaatcagtaacatccaacaggcagactttccaggtgttcttgcgactcaccctgcattctcgaggctgcttccatgcttgcatttcataccaaaatcagccaatcaataatggtgaatttgacattattgtcctaagtgaggatgagaagaatatcgtcgaacgcaatgtgtccacttcaggcgtgagcatttactttgaggcttatctttataatgcta

SEQ ID NO: 108305 - DNA, 1605 bp, Homo sapiens
  Payload ID: 1282
  Gene Symbol: AVEN
  Gene Name: apoptosis, caspase activation inhibitor
  Uniprot ID: Q9NQS1
  ENST ID: ENST00000306730
  CDS Start-End: 131-1219
gcaccccgcgcctcgctgctaccgggcgcctttcgctcgcggctcctccgtgcggcccgcttccggtggggccagggcgtctccgccgcagctcggctcccgcgcgctcagcaccgccagcggcggccagatgcaggcggagcgaggagctcggggaggccgtgggcggcggccaggccgcggccggcctggcggagatcgccacagcgagcggcccggagccgcagcggcggtagccagaggcggcggcggaggcggcggcggggacggaggcggacgccggggccgtggccgtggccggggcttccgcggcgctcgcggaggccgaggaggaggaggcgccccgcgaggcagccgccgggagccgggaggctggggcgcaggggccagcgcgccggttgaagatgacagcgatgcagagacctatggagaagagaatgatgaacagggaaattattctaaaagaaagattgtctctaactgggatcgatatcaagatattgaaaaagaggtcaataatgaaagtggagagtcacagaggggaacagatttcagtgtcctccttagctctgcaggggactcattctcacagttccggtttgctgaggagaaagaatgggatagtgaagcttcttgtccaaaacagaattcagcattttatgtggatagtgagttattggttcgagcccttcaagagctgcctctctgcctccgactcaacgttgctgccgaactggtccagggtacagttcctttagaggttcctcaggtgaaaccaaagagaactgatgatggcaagggattagggatgcagttaaaggggcccttggggcctggaggaagggggcccatctttgagctgaaatctgtggctgctggctgccctgtgttgctgggcaaagacaacccaagcccgggtccttcaagggattctcagaaacccacttccccactgcagtcagcaggagaccatttggaagaagaactagatctgttgcttaatttagatgcacctataaaagagggagataacatcttaccagatcagacgtctcaggacctgaaatccaaggaagatggggaggtggtccaagaggaagaagtttgtgcaaaaccatctgtgactgaagaaaaaaacatggaacctgagcaaccaagtacctccaaaaatgttaccgaggaagagctggaagactggttggacagcatgatttcctaaaaaggggaaaaaaagtgcctgaagcaaatcttggttgccttctaacggcaggtgggcataaggctgtccttcaggaccagccagtttacaagcatgtctcaagctagtgtgttccattatgctcacagcagtaaatgcctacctctgtgtttgacatctgaaagaatacattgaagcagcttgttgcatttgtttttctggcttagtaatctaatagatttccttaagggcaggagatagactctggcccttgtttctagcctccttccttgcagtgtttacaacatagccagtgtttacagcatagcagatgctgctgctgattaagagaatagatgcaaacaaggcatgcatttggccaaaataaacaaatgctggtctgtcca

SEQ ID NO: 108306 - DNA, 284 bp, Homo sapiens
  Payload ID: 1282
  Gene Symbol: AVEN
  Gene Name: apoptosis, caspase activation inhibitor
  ENST ID: ENST00000560649
  CDS Start-End: 1-178
ggactcattctcacagttccggtttgctgaggagaaagaatgggatagtgaagcttcttgtccaaaacagaattcagcattttatgtggatagtgagttattggttcgagcccttcaagagctgcctctctgcctccgactcaacgttgctgccgaactggtccagatgcacctataaaagagggagataacatcttaccagatcagacgtctcaggacctgaaatccaaggaagatggggaggtggtccaagaggaagaagtttgtgcaaaaccatctgtgac

SEQ ID NO: 108307 - DNA, 5257 bp, Homo sapiens
  Payload ID: 1283
  Gene Symbol: AATK
  Gene Name: apoptosis-associated tyrosine kinase
  Uniprot ID: Q6ZMQ8
  ENST ID: ENST00000326724
  CDS Start-End: 26-4150
atgcccgccggccgctggcccggccatgtcgtcgtccttcttcaaccccagcttcgccttcagctcgcacttcgaccccgacggcgccccgctcagcgagctgtcctggccatcctccctcgccgtggtggctgtgtctttctccgggctcttcgccgtcatcgtcctcatgctggcctgcctgtgctgtaagaagggcggtatcgggttcaaggagtttgagaatgcggagggggacgagtacgcagccgacctggcgcagggctccccggccacggcagcacagaacgggcccgacgtgtacgtcctgccactcacggaggtctccttgcccatggccaagcagcctgggcgctcagtgcagctcctcaagtccacagacgtgggccggcacagcctcctgtacctgaaggaaatcggccgtggctggttcgggaaggtgttcctgggggaggtgaactctggcatcagcagtgcccaggtggtggtgaaggagctgcaggctagtgccagcgtgcaggagcagatgcagttcctggaggaggtgcagccctacagggccctgaagcacagcaacctgctccagtgcctggcccagtgcgccgaggtgacgccctacctgctggtgatggagttctgcccactgggggacctcaagggctacctgcggagctgccgggtggcggagtccatggctcccgacccccggaccctgcagcgcatggcctgtgaggtggcctgtggcgtcctgcaccttcatcgcaacaatttcgtgcacagcgacctggccctgcggaactgcctgctcacggctgacctgacggtgaagattggtgactatggcctggctcactgcaagtacagagaggactacttcgtgactgccgaccagctgtgggtgcctctgcgctggatcgcgccagagctggtggacgaggtgcatagcaacctgctcgtcgtggaccagaccaagagcgggaatgtgtggtccctgggcgtgaccatctgggagctctttgagctgggcacgcagccctatccccagcactcggaccagcaggtgctggcgtacacggtccgggagcagcagctcaagctgcccaagccccagctgcagctgaccctgtcggaccgctggtacgaggtgatgcagttctgctggctgcagcccgagcagcggcccacagccgaggaggtgcacctgctgctgtcctacctgtgtgccaagggcgccaccgaagcagaggaggagtttgaacggcgctggcgctctctgcggcccggcgggggcggcgtggggcccgggcccggtgcggcggggcccatgctgggcggcgtggtggagctcgccgctgcctcgtccttcccgctgctggagcagttcgcgggcgacggcttccacgcggacggcgacgacgtgctgacggtgaccgagaccagccgaggcctcaattttgagtacaagtgggaggcgggccgcggcgcggaggccttcccggccacgctgagccctggccgcaccgcacgcctgcaggagctgtgcgcccccgacggcgcgcccccgggcgtggttccggtgctcagcgcgcacagcccgtcgctgggcagcgagtacttcatccgcctagaggaggccgcacccgccgccggccacgaccctgactgcgccggctgcgcccccagtccacctgccaccgcggaccaggacgacgactctgacggcagcaccgccgcctcgctggccatggagccgctgctgggccacgggccacccgtcgacgtcccctggggccgcggcgaccactaccctcgcagaagcttggcgcgggacccgctctgcccctcacgctctccctcgccctcggcggggcccctgagtctggcggagggaggagcggaggatgcagactggggcgtggccgccttctgtcctgccttcttcgaggacccactgggcacgtcccctttggggagctcaggggcgcccccgctgccgctgactggcgaggatgagctagaggaggtgggagcgcggagggccgcccagcgcgggcactggcgctccaacgtgtcagccaacaacaacagcggcagccgctgtccagagtcctgggaccccgtctctgcgggcggccacgctgagggctgccccagtccaaagcagaccccacgggcctcccccgagccggggtaccctggagagcctctgcttgggctccaggcagcctctgcccaggagccaggctgctgccccggcctccctcatctatgctctgcccagggcctggcacctgctccctgcctggttacaccctcctggacagagacagccagtagtgggggtgaccacccgcaggcagagcccaagcttgccacggaggctgagggcactaccggaccccgcctgccccttccttccgtcccctccccatcccaggagggagccccacttccctcggaggaggccagtgcccccgacgcccctgatgccctgcctgactctcccacgcctgctactggtggcgaggtgtctgccatcaagctggcttctgccctgaatggcagcagcagctctcccgaggtggaggcacccagcagtgaggatgaggacacggccgaggccacctcaggcatcttcaccgacacgtccagcgacggcctgcaggccaggaggccggatgtggtgccagccttccgctctctgcagaagcaggtggggacccccgactccctggactccctggacatcccgtcctcagccagtgatggtggctatgaggtcttcagcccgtcggccactggcccctctggagggcagccgcgagcgctggacagtggctatgacaccgagaactatgagtcccctgagtttgtgctcaaggaggcgcaggaagggtgtgagccccaggcctttgcggagctggcctcagagggtgagggccccgggcccgagacacggctctccacctccctcagtggcctcaacgagaagaatccctaccgagactctgcctacttctcagacctcgaggctgaggccgaggccacctcaggcccagagaagaagtgcggcggggaccgagcccccgggccagagctgggcctgccgagcactgggcagccgtctgagcaggtctgtctcaggcctggggtttccggggaggcacaaggctctggccccggggaggtgctgcccccactgctgcagcttgaagggtcctccccagagcccagcacctgcccctcgggcctggtcccagagcctccggagccccaaggcccagccaaggtgcggcctgggcccagccccagctgctcccagtttttcctgctgaccccggttccgctgagatcagaaggcaacagctctgagttccaggggcccccaggactgttgtcagggccggccccacaaaagcggatggggggcccaggcacccccagagccccactccgcctggctctgcccggcctccctgcggccttggagggccggccggaggaggaggaggaggacagtgaggacagcgacgagtctgacgaggagctccgctgctacagcgtccaggagcctagcgaggacagcgaagaggaggcgccggcggtgcccgtggtggtggctgagagccagagcgcgcgcaacctgcgcagcctgctcaagatgcccagcctgctgtccgagaccttctgcgaggacctggaacgcaagaagaaggccgtgtccttcttcgacgacgtcaccgtctacctctttgaccaggaaagccccacccgggagctcggggagcccttcccgggcgccaaggaatcgccccctacgttccttagggggagccccggctctcccagcgcccccaaccggccgcagcaggctgatggctccccaaatggctccacagcggaagagggtggtgggttcgcgtgggacgacgacttcccgctgatgacggccaaggcagccttcgccatggccctagacccggccgcacccgccccggctgcgcccacgcccacgcccgctcccttctcgcgcttcacggtgtcgcccgcgcccacgtcccgcttctccatcacgcacgtgtctgactcggacgccgagtccaagagaggacctgaagctggtgccgggggtgagagtaaagaggcttgagacctgggcagctcctgcccctcaaggctggcgtcaccggagcccctgccaggcagcagcgaggatggtgaccgagaaggtggggaccacgtcctggtggctgttggcagcagattcaggtgcctctgccccacgcggtgtcctggagaagcccgtgggatgagaggccctggatggtagatcggccatgctccgccccagaggcagaattcgtctgggcttttaggcttgctgctagcccctgggggcgcctggagccacagtgggtgtctgtacacacatacacactcaaaaggggccagtgcccctgggcacggcggcccccaccctctgccctgcctgcctggcctcggaggacccgcatgccccatccggcagctcctccggtgtgctcacaggacacttaaaccaggacgaggcatggccccgagacactggcaggtttgtgagcctcttcccaccccctgtgcccccacccttgcctggttcctggtggctcagggcaaggagtggccctgggcgcccgtgtcggtcctgtttccgctgcccttatctcaaagtccgtggctgtttccccttcactgactcagctagacccgtaagcccacccttcccacagggaacaggctgctcccacctgggtcccgctgtggccacggtgggcagcccaaaagatcaggggtggaggggcttccaggctgtactcctgccccgtgggccccgttctagaggtgcccttggcaggaccgtgcaggcagctcccctctgtggggcagtatctggtcctgtgccccagctgccaaaggagagtgggggccatgccccgcagtcagtgttggggggctcctacctacagggagagggatggtggggaaggggtggagctgggggcagggcagcacagggaatatttttgtaactaactaactgctgtggttggagcgaatggaagttgggtgattttaagttattgttgccaaagagatgtaaagtttattgttgcttcgcagggggatttgttttgtgttttgtttgaggcttagaacgctggtgcaatgttttcttgttccttgttttttaagagaaatgaagctaagacaaaagaaa

SEQ ID NO: 108308 - DNA, 4938 bp, Homo sapiens
  Payload ID: 1283
  Gene Symbol: AATK
  Gene Name: apoptosis-associated tyrosine kinase
  Uniprot ID: Q6ZMQ8
  ENST ID: ENST00000374792
  CDS Start-End: 81-2720
gatgcggcggctcgggccggggccgcgggcgtcctgagcgcagcgccctcccgggatgcccgccggccgctggcccggccatgtcgtcgtccttcttcaaccccagcttcgccttcagctcgcacttcgaccccgacggcgccccgctcagcgagctgtcctggccatcctccctcgccgtggtggctgtgtctttctccgggctcttcgccgtcatcgtcctcatgctggcctgcctgtgctgtaagaagggcggtatcgggttcaaggagtttgagaatgcggagggggacgagtacgcagccgacctggcgcagggctccccggccacggcagcacagaacgggcccgacgtgtacgtcctgccactcacggaggtctccttgcccatggccaagcagcctgggcgctcagtgcagctcctcaagtccacagacgtgggccggcacagcctcctgtacctgaaggaaatcggccgtggctggttcgggaaggtgttcctgggggaggtgaactctggcatcagcagtgcccaggtggtggtgaaggagctgcaggctagtgccagcgtgcaggagcagatgcagttcctggaggaggtgcagccctacagggccctgaagcacagcaacctgctccagtgcctggcccagtgcgccgaggtgacgccctacctgctggtgatggagttctgcccactgggggacctcaagggctacctgcggagctgccgggtggcggagtccatggctcccgacccccggaccctgcagcgcatggcctgtgaggtggcctgtggcgtcctgcaccttcatcgcaacaatttcgtgcacagcgacctggccctgcggaactgcctgctcacggctgacctgacggtgaagattggtgactatggcctggctcactgcaagtacagagaggactacttcgtgactgccgaccagctgtgggtgcctctgcgctggatcgcgccagagctggtggacgaggtgcatagcaacctgctcgtcgtggaccagaccaagagcgggaatgtgtggtccctgggcgtgaccatctgggagctctttgagctgggcacgcagccctatccccagcactcggaccagcaggtgctggcgtacacggtccgggagcagcagctcaagctgcccaagccccagctgcagctgaccctgtcggaccgctggtacgaggtgatgcagttctgctggctgcagcccgagcagcggcccacagccgaggaggtgcacctgctgctgtcctacctgtgtgccaagggcgccaccgaagcagaggaggagtttgaacggcgctggcgctctctgcggcccggcgggggcggcgtggggcccgggcccggtgcggcggggcccatgctgggcggcgtggtggagctcgccgctgcctcgtccttcccgctgctggagcagttcgcgggcgacggcttccacgcggacggcgacgacgtgctgacggagctgtgcgcccccgacggcgcgcccccgggcgtggttccggtgctcagcgcgcacagcccgtcgctgggcagcgagtacttcatccgcctagaggaggccgcacccgccgccggccacgaccctgactgcgccggctgcgcccccagtccacctgccaccgcggaccaggacgacgactctgacggcagcaccgccgcctcgctggccatggagccgctgctgggccacgggccacccgtcgacgtcccctggggccgcggcgaccactaccctcgcagaagcttggcgcgggacccgctctgcccctcacgctctccctcgccctcggcggggcccctgagtctggcggagggaggagcggaggatgcagactggggcgtggccgccttctgtcctgccttcttcgaggacccactgggcacgtcccctttggggagctcaggggcgcccccgctgccgctgactggcgaggatgagctagaggaggtgggagcgcggagggccgcccagcgcgggcactggcgctccaacgtgtcagccaacaacaacagcggcagccgctgtccagagtcctgggaccccgtctctgcgggcggccacgctgagggctgccccagtccaaagcagaccccacgggcctcccccgagccggggtaccctggagagcctctgcttgggctccaggcagcctctgcccaggagccaggctgctgccccggcctccctcatctatgctctgcccagggcctggcacctgctccctgcctggttacaccctcctggacagagacagccagtagtgggggtgaccacccgcaggcagagcccaagcttgccacggaggctgagggcactaccggaccccgcctgccccttccttccgtcccctccccatcccaggagggagccccacttccctcggaggaggccagtgcccccgacgcccctgatgccctgcctgactctcccacgcctgctactggtggcgaggtgtctgccatcaagctggcttctgccctgaatggcagcagcagctctcccgaggtggaggcacccagcagtgaggatgaggacacggccgaggccacctcaggcatcttcaccgacacgtccagcgacggcctgcaggccaggaggccggatgtggtgccagccttccgctctctgcagaagcagtggcctcaacgagaagaatccctaccgagactctgcctacttctcagacctcgaggctgaggccgaggccacctcaggcccagagaagaagtgcggcggggaccgagcccccgggccagagctgggcctgccgagcactgggcagccgtctgagcaggtctgtctcaggcctggggtttccggggaggcacaaggctctggccccggggaggtgctgcccccactgctgcagcttgaagggtcctccccagagcccagcacctgcccctcgggcctggtcccagagcctccggagccccaaggcccagccaaggtgcggcctgggcccagccccagctgctcccagtttttcctgctgaccccggttccgctgagatcagaaggcaacagctctgagttccaggggcccccaggactgttgtcagggccggccccacaaaagcggatggggggcccaggcacccccagagccccactccgcctggctctgcccggcctccctgcggccttggagggccggccggaggaggaggaggaggacagtgaggacagcgacgagtctgacgaggagctccgctgctacagcgtccaggagcctagcgaggacagcgaagaggaggcgccggcggtgcccgtggtggtggctgagagccagagcgcgcgcaacctgcgcagcctgctcaagatgcccagcctgctgtccgagaccttctgcgaggacctggaacgcaagaagaaggccgtgtccttcttcgacgacgtcaccgtctacctctttgaccaggaaagccccacccgggagctcggggagcccttcccgggcgccaaggaatcgccccctacgttccttagggggagccccggctctcccagcgcccccaaccggccgcagcaggctgatggctccccaaatggctccacagcggaagagggtggtgggttcgcgtgggacgacgacttcccgctgatgacggccaaggcagccttcgccatggccctagacccggccgcacccgccccggctgcgcccacgcccacgcccgctcccttctcgcgcttcacggtgtcgcccgcgcccacgtcccgcttctccatcacgcacgtgtctgactcggacgccgagtccaagagaggacctgaagctggtgccgggggtgagagtaaagaggcttgagacctgggcagctcctgcccctcaaggctggcgtcaccggagcccctgccaggcagcagcgaggatggtgaccgagaaggtggggaccacgtcctggtggctgttggcagcagattcaggtgcctctgccccacgcggtgtcctggagaagcccgtgggatgagaggccctggatggtagatcggccatgctccgccccagaggcagaattcgtctgggcttttaggcttgctgctagcccctgggggcgcctggagccacagtgggtgtctgtacacacatacacactcaaaaggggccagtgcccctgggcacggcggcccccaccctctgccctgcctgcctggcctcggaggacccgcatgccccatccggcagctcctccggtgtgctcacaggacacttaaaccaggacgaggcatggccccgagacactggcaggtttgtgagcctcttcccaccccctgtgcccccacccttgcctggttcctggtggctcagggcaaggagtggccctgggcgcccgtgtcggtcctgtttccgctgcccttatctcaaagtccgtggctgtttccccttcactgactcagctagacccgtaagcccacccttcccacagggaacaggctgctcccacctgggtcccgctgtggccacggtgggcagcccaaaagatcaggggtggaggggcttccaggctgtactcctgccccgtgggccccgttctagaggtgcccttggcaggaccgtgcaggcagctcccctctgtggggcagtatctggtcctgtgccccagctgccaaaggagagtgggggccatgccccgcagtcagtgttggggggctcctacctacagggagagggatggtggggaaggggtggagctgggggcagggcagcacagggaatatttttgtaactaactaactgctgtggttggagcgaatggaagttgggtgattttaagttattgttgccaaagagatgtaaagtttattgttgcttcgcagggggatttgttttgtgttttgtttgaggcttagaacgctggtgcaatgttttcttgttccttgttttttaagagaaatgaagctaagacaaaag

SEQ ID NO: 108309 - DNA, 5081 bp, Homo sapiens
  Payload ID: 1283
  Gene Symbol: AATK
  Gene Name: apoptosis-associated tyrosine kinase
  ENST ID: ENST00000417379
  CDS Start-End: 168-3983
gccaccaggtgaaggtccaaggctgctggggcagatggcggtggcaggagtttgagaatgcggagggggacgagtacgcagccgacctggcgcagggctccccggccacggcagcacagaacgggcccgacgtgtacgtcctgccactcacggaggtctccttgcccatggccaagcagcctgggcgctcagtgcagctcctcaagtccacagacgtgggccggcacagcctcctgtacctgaaggaaatcggccgtggctggttcgggaaggtgttcctgggggaggtgaactctggcatcagcagtgcccaggtggtggtgaaggagctgcaggctagtgccagcgtgcaggagcagatgcagttcctggaggaggtgcagccctacagggccctgaagcacagcaacctgctccagtgcctggcccagtgcgccgaggtgacgccctacctgctggtgatggagttctgcccactgggggacctcaagggctacctgcggagctgccgggtggcggagtccatggctcccgacccccggaccctgcagcgcatggcctgtgaggtggcctgtggcgtcctgcaccttcatcgcaacaatttcgtgcacagcgacctggccctgcggaactgcctgctcacggctgacctgacggtgaagattggtgactatggcctggctcactgcaagtacagagaggactacttcgtgactgccgaccagctgtgggtgcctctgcgctggatcgcgccagagctggtggacgaggtgcatagcaacctgctcgtcgtggaccagaccaagagcgggaatgtgtggtccctgggcgtgaccatctgggagctctttgagctgggcacgcagccctatccccagcactcggaccagcaggtgctggcgtacacggtccgggagcagcagctcaagctgcccaagccccagctgcagctgaccctgtcggaccgctggtacgaggtgatgcagttctgctggctgcagcccgagcagcggcccacagccgaggaggtgcacctgctgctgtcctacctgtgtgccaagggcgccaccgaagcagaggaggagtttgaacggcgctggcgctctctgcggcccggcgggggcggcgtggggcccgggcccggtgcggcggggcccatgctgggcggcgtggtggagctcgccgctgcctcgtccttcccgctgctggagcagttcgcgggcgacggcttccacgcggacggcgacgacgtgctgacggtgaccgagaccagccgaggcctcaattttgagtacaagtgggaggcgggccgcggcgcggaggccttcccggccacgctgagccctggccgcaccgcacgcctgcaggagctgtgcgcccccgacggcgcgcccccgggcgtggttccggtgctcagcgcgcacagcccgtcgctgggcagcgagtacttcatccgcctagaggaggccgcacccgccgccggccacgaccctgactgcgccggctgcgcccccagtccacctgccaccgcggaccaggacgacgactctgacggcagcaccgccgcctcgctggccatggagccgctgctgggccacgggccacccgtcgacgtcccctggggccgcggcgaccactaccctcgcagaagcttggcgcgggacccgctctgcccctcacgctctccctcgccctcggcggggcccctgagtctggcggagggaggagcggaggatgcagactggggcgtggccgccttctgtcctgccttcttcgaggacccactgggcacgtcccctttggggagctcaggggcgcccccgctgccgctgactggcgaggatgagctagaggaggtgggagcgcggagggccgcccagcgcgggcactggcgctccaacgtgtcagccaacaacaacagcggcagccgctgtccagagtcctgggaccccgtctctgcgggcggccacgctgagggctgccccagtccaaagcagaccccacgggcctcccccgagccggggtaccctggagagcctctgcttgggctccaggcagcctctgcccaggagccaggctgctgccccggcctccctcatctatgctctgcccagggcctggcacctgctccctgcctggttacaccctcctggacagagacagccagtagtgggggtgaccacccgcaggcagagcccaagcttgccacggaggctgagggcactaccggaccccgcctgccccttccttccgtcccctccccatcccaggagggagccccacttccctcggaggaggccagtgcccccgacgcccctgatgccctgcctgactctcccacgcctgctactggtggcgaggtgtctgccatcaagctggcttctgccctgaatggcagcagcagctctcccgaggtggaggcacccagcagtgaggatgaggacacggccgaggccacctcaggcatcttcaccgacacgtccagcgacggcctgcaggccaggaggccggatgtggtgccagccttccgctctctgcagaagcaggtggggacccccgactccctggactccctggacatcccgtcctcagccagtgatggtggctatgaggtcttcagcccgtcggccactggcccctctggagggcagccgcgagcgctggacagtggctatgacaccgagaactatgagtcccctgagtttgtgctcaaggaggcgcaggaagggtgtgagccccaggcctttgcggagctggcctcagagggtgagggccccgggcccgagacacggctctccacctccctcagtggcctcaacgagaagaatccctaccgagactctgcctacttctcagacctcgaggctgaggccgaggccacctcaggcccagagaagaagtgcggcggggaccgagcccccgggccagagctgggcctgccgagcactgggcagccgtctgagcaggtctgtctcaggcctggggtttccggggaggcacaaggctctggccccggggaggtgctgcccccactgctgcagcttgaagggtcctccccagagcccagcacctgcccctcgggcctggtcccagagcctccggagccccaaggcccagccaaggtgcggcctgggcccagccccagctgctcccagtttttcctgctgaccccggttccgctgagatcagaaggcaacagctctgagttccaggggcccccaggactgttgtcagggccggccccacaaaagcggatggggggcccaggcacccccagagccccactccgcctggctctgcccggcctccctgcggccttggagggccggccggaggaggaggaggaggacagtgaggacagcgacgagtctgacgaggagctccgctgctacagcgtccaggagcctagcgaggacagcgaagaggaggcgccggcggtgcccgtggtggtggctgagagccagagcgcgcgcaacctgcgcagcctgctcaagatgcccagcctgctgtccgagaccttctgcgaggacctggaacgcaagaagaaggccgtgtccttcttcgacgacgtcaccgtctacctctttgaccaggaaagccccacccgggagctcggggagcccttcccgggcgccaaggaatcgccccctacgttccttagggggagccccggctctcccagcgcccccaaccggccgcagcaggctgatggctccccaaatggctccacagcggaagagggtggtgggttcgcgtgggacgacgacttcccgctgatgacggccaaggcagccttcgccatggccctagacccggccgcacccgccccggctgcgcccacgcccacgcccgctcccttctcgcgcttcacggtgtcgcccgcgcccacgtcccgcttctccatcacgcacgtgtctgactcggacgccgagtccaagagaggacctgaagctggtgccgggggtgagagtaaagaggcttgagacctgggcagctcctgcccctcaaggctggcgtcaccggagcccctgccaggcagcagcgaggatggtgaccgagaaggtggggaccacgtcctggtggctgttggcagcagattcaggtgcctctgccccacgcggtgtcctggagaagcccgtgggatgagaggccctggatggtagatcggccatgctccgccccagaggcagaattcgtctgggcttttaggcttgctgctagcccctgggggcgcctggagccacagtgggtgtctgtacacacatacacactcaaaaggggccagtgcccctgggcacggcggcccccaccctctgccctgcctgcctggcctcggaggacccgcatgccccatccggcagctcctccggtgtgctcacaggacacttaaaccaggacgaggcatggccccgagacactggcaggtttgtgagcctcttcccaccccctgtgcccccacccttgcctggttcctggtggctcagggcaaggagtggccctgggcgcccgtgtcggtcctgtttccgctgcccttatctcaaagtccgtggctgtttccccttcactgactcagctagacccgtaagcccacccttcccacagggaacaggctgctcccacctgggtcccgctgtggccacggtgggcagcccaaaagatcaggggtggaggggcttccaggctgtactcctgccccgtgggccccgttctagaggtgcccttggcaggaccgtgcaggcagctcccctctgtggggcagtatctggtcctgtgccccagctgccaaaggagagtgggggccatgccccgcagtcagtgttggggggctcctacctacagggagagggatggtggggaaggggtggagctgggggcagggcagcacagggaatatttttgtaactaactaactgctgtggttggagcgaatggaagttgggtgattttaagttattgttgccaaagagatgtaaagtttattgttgcttcgcagggggatttgttttgtgttttgtttgaggcttagaacgctggtgcaatgttttcttgttccttgttttttaagagaaatgaagctaaga

SEQ ID NO: 108310 - DNA, 475 bp, Homo sapiens
  Payload ID: 1283
  Gene Symbol: AATK
  Gene Name: apoptosis-associated tyrosine kinase
  ENST ID: ENST00000575363
  CDS Start-End: 127-475
attccagcaccagtgtgcccctgggaagtcctgcctccacactgggctccctcctgggatttggggacctgcgctgggctccctggtggggagctgtgctgagggaaggggctgggcaggcccccaatgctgaccctgtgctacctgattgcacgctgtatcggcaggacccggctggcccccgggcagcaggagtttgagaatgcggagggggacgagtacgcagccgacctggcgcagggctccccggccacggcagcacagaacgggcccgacgtgtacgtcctgccactcacggaggtctccttgcccatggccaagcagcctgggcgctcagtgcagctcctcaagtccacagacgtgggccggcacagcctcctgtacctgaaggaaatcggccgtggctggttcgggaaggtgttcctgggggaggtgaactctggcatcagcagtgcccaggtggtggtgaaggagc

SEQ ID NO: 108311 - DNA, 2108 bp, Homo sapiens
  Payload ID: 1283
  Gene Symbol: AATK
  Gene Name: apoptosis-associated tyrosine kinase
  ENST ID: ENST00000570932
  CDS Start-End: 1-318
tcggaggaggccagtgcccccgacgcccctgatgccctgcctgactctcccacgcctgctactggtggcgaggtgtctgccatcaagctggcttctgccctgaatggcagcagcagctctcccgaggtggaggcacccagcagtgaggatgaggacacggccgaggccacctcaggcatcttcaccgacacgtccagcgacggcctgcaggccaggaggccggatgtggtgccagccttccgctctctgcagaagcagtggcctcaacgagaagaatccctaccgagactctgcctacttctcagacctcgaggctgaggccgaggccacctcaggcccagagaagaagtgcggcggggaccgagcccccgggccagagctgggcctgccgagcactgggcagccgtctgagcagcgtccaggagcctagcgaggacagcgaagaggaggcgccggcggtgcccgtggtggtggctgagagccagagcgcgcgcaacctgcgcagcctgctcaagatgcccagcctgctgtccgagaccttctgcgaggacctggaacgcaagaagaaggccgtgtccttcttcgacgacgtcaccgtctacctctttgaccaggaaagccccacccgggagctcggggagcccttcccgggcgccaaggaatcgccccctacgttccttagggggagccccggctctcccagcgcccccaaccggccgcagcaggctgatggctccccaaatggctccacagcggaagagggtggtgggttcgcgtgggacgacgacttcccgctgatgacggccaaggcagccttcgccatggccctagacccggccgcacccgccccggctgcgcccacgcccacgcccgctcccttctcgcgcttcacggtgtcgcccgcgcccacgtcccgcttctccatcacgcacgtgtctgactcggacgccgagtccaagagaggacctgaagctggtgccgggggtgagagtaaagaggcttgagacctgggcagctcctgcccctcaaggctggcgtcaccggagcccctgccaggcagcagcgaggatggtgaccgagaaggtggggaccacgtcctggtggctgttggcagcagattcaggtgcctctgccccacgcggtgtcctggagaagcccgtgggatgagaggccctggatggtagatcggccatgctccgccccagaggcagaattcgtctgggcttttaggcttgctgctagcccctgggggcgcctggagccacagtgggtgtctgtacacacatacacactcaaaaggggccagtgcccctgggcacggcggcccccaccctctgccctgcctgcctggcctcggaggacccgcatgccccatccggcagctcctccggtgtgctcacaggacacttaaaccaggacgaggcatggccccgagacactggcaggtttgtgagcctcttcccaccccctgtgcccccacccttgcctggttcctggtggctcagggcaaggagtggccctgggcgcccgtgtcggtcctgtttccgctgcccttatctcaaagtccgtggctgtttccccttcactgactcagctagacccgtaagcccacccttcccacagggaacaggctgctcccacctgggtcccgctgtggccacggtgggcagcccaaaagatcaggggtggaggggcttccaggctgtactcctgccccgtgggccccgttctagaggtgcccttggcaggaccgtgcaggcagctcccctctgtggggcagtatctggtcctgtgccccagctgccaaaggagagtgggggccatgccccgcagtcagtgttggggggctcctacctacagggagagggatggtggggaaggggtggagctgggggcagggcagcacagggaatatttttgtaactaactaactgctgtggttggagcgaatggaagttgggtgattttaagttattgttgccaaagagatgtaaagtttattgttgcttcgcagggggatttgttttgtgttttgtttgaggcttagaacgctggtgcaatgttttcttgttccttgttttttaagagaaatgaagctaagacaaaag

SEQ ID NO: 108312 - DNA, 2260 bp, Homo sapiens
  Payload ID: 1284
  Gene Symbol: AIFM1
  Gene Name: apoptosis-inducing factor, mitochondrion-associated, 1
  Uniprot ID: O95831
  ENST ID: ENST00000287295
  CDS Start-End: 232-2073
aatgcggcagcgagtgctacgcctgcgcagtaggcctccggtcgccgttccccttccccggctctagcaggccggcttctctgtccaatgcccacccggagctgggaggaggagtctgcgtaatgtgcgtgtgaagagactgggggagctggccggggctcacggtgtttgacccgtcggtcgtgcgtgagaggaaagggaaggaggaggtcccgaatagcggtcgccgaaatgttccggtgtggaggcctggcggcgggtgctttgaagcagaagctggtgcccttggtgcggaccgtgtgcgtccgaagcccgaggcagaggaaccggctcccaggcaacttgttccagcgatggcatgttcctctagaactccagatgacaagacaaatggctagctctggtgcatcagggggcaaaatcgataattctgtgttagtccttattgtgggcttatcaacagtaggagctggtgcctatgcctacaagactatgaaagaggatgaaaaaagatacaatgaaagaatttcagggttagggctgacaccagaacagaaacagaaaaaggccgcgttatctgcttcagaaggagaggaagttcctcaagacaaggcgccaagtcatgttcctttcctgctaattggtggaggcacagctgcttttgctgcagccagatccatccgggctcgggatcctggggccagggtactgattgtatctgaagatcctgagctgccgtacatgcgacctcctctttcaaaagaactgtggttttcagatgacccaaatgtcacaaagacactgcgattcaaacagtggaatggaaaagagagaagcatatatttccagccaccttctttctatgtctctgctcaggacctgcctcatattgagaatggtggtgtggctgtcctcactgggaagaaggtagtacagctggatgtgagagacaacatggtgaaacttaatgatggctctcaaataacctatgaaaagtgcttgattgcaacaggaggtactccaagaagtctgtctgccattgatagggctggagcagaggtgaagagtagaacaacgcttttcagaaagattggagactttagaagcttggagaagatttcacgggaagtcaaatcaattacgattatcggtgggggcttccttggtagcgaactggcctgtgctcttggcagaaaggctcgagccttgggcacagaagtgattcaactcttccccgagaaaggaaatatgggaaagatcctccccgaatacctcagcaactggaccatggaaaaagtcagacgagagggggttaaggtgatgcccaatgctattgtgcaatccgttggagtcagcagtggcaagttacttatcaagctgaaagacggcaggaaggtagaaactgaccacatagtggcagctgtgggcctggagcccaatgttgagttggccaagactggtggcctggaaatagactcagattttggtggcttccgggtaaatgcagagctacaagcacgctctaacatctgggtggcaggagatgctgcatgcttctacgatataaagttgggaaggaggcgggtagagcaccatgatcacgctgttgtgagtggaagattggctggagaaaatatgactggagctgctaagccgtactggcatcagtcaatgttctggagtgatttgggccccgatgttggctatgaagctattggtcttgtggacagtagtttgcccacagttggtgtttttgcaaaagcaactgcacaagacaaccccaaatctgccacagagcagtcaggaactggtatccgatcagagagtgagacagagtccgaggcctcagaaattactattcctcccagcaccccggcagttccacaggctcccgtccagggggaggactacggcaaaggtgtcatcttctacctcagggacaaagtggtcgtggggattgtgctatggaacatctttaaccgaatgccaatagcaaggaagatcattaaggacggtgagcagcatgaagatctcaatgaagtagccaaactattcaacattcatgaagactgaagccccacagtggaattggcaaacccactgcagcccctgagaggaggtcgaatgggtaaaggagcatttttttattcagcagactttctctgtgtatgagtgtgaatgatcaagtcctttgtgaatattttcaactatgtaggtaaattcttaatgttcacatagtgaaataaattctgattcttct

SEQ ID NO: 108313 - DNA, 2248 bp, Homo sapiens
  Payload ID: 1284
  Gene Symbol: AIFM1
  Gene Name: apoptosis-inducing factor, mitochondrion-associated, 1
  Uniprot ID: O95831
  ENST ID: ENST00000319908
  CDS Start-End: 224-2053
agcgagtgctacgcctgcgcagtaggcctccggtcgccgttccccttccccggctctagcaggccggcttctctgtccaatgcccacccggagctgggaggaggagtctgcgtaatgtgcgtgtgaagagactgggggagctggccggggctcacggtgtttgacccgtcggtcgtgcgtgagaggaaagggaaggaggaggtcccgaatagcggtcgccgaaatgttccggtgtggaggcctggcggcgggtgctttgaagcagaagctggtgcccttggtgcggaccgtgtgcgtccgaagcccgaggcagaggaaccggctcccagttgtgcagtctcatcacctaggatccccttctagatcactagcatctacaggtgcttctgggaaagatggcagcaacctagtgtacttcttaattgtaggagcaacagtcactggggcaggagtttattatgcctacaagactatgaaagaggatgaaaaaagatacaatgaaagaatttcagggttagggctgacaccagaacagaaacagaaaaaggccgcgttatctgcttcagaaggagaggaagttcctcaagacaaggcgccaagtcatgttcctttcctgctaattggtggaggcacagctgcttttgctgcagccagatccatccgggctcgggatcctggggccagggtactgattgtatctgaagatcctgagctgccgtacatgcgacctcctctttcaaaagaactgtggttttcagatgacccaaatgtcacaaagacactgcgattcaaacagtggaatggaaaagagagaagcatatatttccagccaccttctttctatgtctctgctcaggacctgcctcatattgagaatggtggtgtggctgtcctcactgggaagaaggtagtacagctggatgtgagagacaacatggtgaaacttaatgatggctctcaaataacctatgaaaagtgcttgattgcaacaggaggtactccaagaagtctgtctgccattgatagggctggagcagaggtgaagagtagaacaacgcttttcagaaagattggagactttagaagcttggagaagatttcacgggaagtcaaatcaattacgattatcggtgggggcttccttggtagcgaactggcctgtgctcttggcagaaaggctcgagccttgggcacagaagtgattcaactcttccccgagaaaggaaatatgggaaagatcctccccgaatacctcagcaactggaccatggaaaaagtcagacgagagggggttaaggtgatgcccaatgctattgtgcaatccgttggagtcagcagtggcaagttacttatcaagctgaaagacggcaggaaggtagaaactgaccacatagtggcagctgtgggcctggagcccaatgttgagttggccaagactggtggcctggaaatagactcagattttggtggcttccgggtaaatgcagagctacaagcacgctctaacatctgggtggcaggagatgctgcatgcttctacgatataaagttgggaaggaggcgggtagagcaccatgatcacgctgttgtgagtggaagattggctggagaaaatatgactggagctgctaagccgtactggcatcagtcaatgttctggagtgatttgggccccgatgttggctatgaagctattggtcttgtggacagtagtttgcccacagttggtgtttttgcaaaagcaactgcacaagacaaccccaaatctgccacagagcagtcaggaactggtatccgatcagagagtgagacagagtccgaggcctcagaaattactattcctcccagcaccccggcagttccacaggctcccgtccagggggaggactacggcaaaggtgtcatcttctacctcagggacaaagtggtcgtggggattgtgctatggaacatctttaaccgaatgccaatagcaaggaagatcattaaggacggtgagcagcatgaagatctcaatgaagtagccaaactattcaacattcatgaagactgaagccccacagtggaattggcaaacccactgcagcccctgagaggaggtcgaatgggtaaaggagcatttttttattcagcagactttctctgtgtatgagtgtgaatgatcaagtcctttgtgaatattttcaactatgtaggtaaattcttaatgttcacatagtgaaataaattctgattcttctaaattaaa

SEQ ID NO: 108314 - DNA, 1200 bp, Homo sapiens
  Payload ID: 1284
  Gene Symbol: AIFM1
  Gene Name: apoptosis-inducing factor, mitochondrion-associated, 1
  Uniprot ID: O95831
  ENST ID: ENST00000346424
  CDS Start-End: 25-1005
aggtcccgaatagcggtcgccgaaatgttccggtgtggaggcctggcggcgggtgctttgaagcagaagctggtgcccttggtgcggaccgtgtgcgtccgaagcccgaggcagaggaaccggctcccagctcgagccttgggcacagaagtgattcaactcttccccgagaaaggaaatatgggaaagatcctccccgaatacctcagcaactggaccatggaaaaagtcagacgagagggggttaaggtgatgcccaatgctattgtgcaatccgttggagtcagcagtggcaagttacttatcaagctgaaagacggcaggaaggtagaaactgaccacatagtggcagctgtgggcctggagcccaatgttgagttggccaagactggtggcctggaaatagactcagattttggtggcttccgggtaaatgcagagctacaagcacgctctaacatctgggtggcaggagatgctgcatgcttctacgatataaagttgggaaggaggcgggtagagcaccatgatcacgctgttgtgagtggaagattggctggagaaaatatgactggagctgctaagccgtactggcatcagtcaatgttctggagtgatttgggccccgatgttggctatgaagctattggtcttgtggacagtagtttgcccacagttggtgtttttgcaaaagcaactgcacaagacaaccccaaatctgccacagagcagtcaggaactggtatccgatcagagagtgagacagagtccgaggcctcagaaattactattcctcccagcaccccggcagttccacaggctcccgtccagggggaggactacggcaaaggtgtcatcttctacctcagggacaaagtggtcgtggggattgtgctatggaacatctttaaccgaatgccaatagcaaggaagatcattaaggacggtgagcagcatgaagatctcaatgaagtagccaaactattcaacattcatgaagactgaagccccacagtggaattggcaaacccactgcagcccctgagaggaggtcgaatgggtaaaggagcatttttttattcagcagactttctctgtgtatgagtgtgaatgatcaagtcctttgtgaatattttcaactatgtaggtaaattcttaatgttcacatagtgaaataaattctgattcttctaaattaaa

SEQ ID NO: 108315 - DNA, 2248 bp, Homo sapiens
  Payload ID: 1284
  Gene Symbol: AIFM1
  Gene Name: apoptosis-inducing factor, mitochondrion-associated, 1
  Uniprot ID: O95831
  ENST ID: ENST00000416073
  CDS Start-End: 9-983
tcgccgaaatgttccggtgtggaggcctggcggcgggtgctttgaagcagaagctggtgcccttggtgcggaccgtgtgcgtccgaagcccgaggcagaggaaccggctcccaggcaacttgttccagcgatggcatgttcctctagaactccagatgacaagacaaatggctagctctggtgcatcagggggcaaaatcgataattctgtgttagtccttattgtgggcttatcaacagtaggagctggtgcctatgcctacaagactatgaaagaggatgaaaaaagatacaatgaaagaatttcagggttagggctgacaccagaacagaaacagaaaaaggccgcgttatctgcttcagaaggagaggaagttcctcaagacaaggcgccaagtcatgttcctttcctgctaattggtggaggcacagctgcttttgctgcagccagatccatccgggctcgggatcctggggccagggtactgattgtatctgaagatcctgagctgccgtacatgcgacctcctctttcaaaagaactgtggttttcagatgacccaaatgtcacaaagacactgcgattcaaacagtggaatggaaaagagagaagcatatatttccagccaccttctttctatgtctctgctcaggacctgcctcatattgagaatggtggtgtggctgtcctcactgggaagaaggtagtacagctggatgtgagagacaacatggtgaaacttaatgatggctctcaaataacctatgaaaagtgcttgattgcaacaggaggtactccaagaagtctgtctgccattgatagggctggagcagaggtgaagagtagaacaacgcttttcagaaagattggagactttagaagcttggagaagatttcacgggaagtcaaatcaattacgattatcggtgggggcttccttggtagcgaactggcctgtgctcttggcagaaaggatatatgaaatcagggcatcttttcaggaggatgcttcctattcagaggttgcaaagcacttatgtaagccttaggtgactgcatgggtggaagtgcacagagttcaccatctgaagcttaatctggggccagcagttctgatacctgttgtatttgcgttacaaatgaacttgagcaccgaggccctcatgcccactgtcctctcgagccttgggcacagaagtgattcaactcttccccgagaaaggaaatatgggaaagatcctccccgaatacctcagcaactggaccatggaaaaagtcagacgagagggggttaaggtgatgcccaatgctattgtgcaatccgttggagtcagcagtggcaagttacttatcaagctgaaagacggcaggaaggtagaaactgaccacatagtggcagctgtgggcctggagcccaatgttgagttggccaagactggtggcctggaaatagactcagattttggtggcttccgggtaaatgcagagctacaagcacgctctaacatctgggtggcaggagatgctgcatgcttctacgatataaagttgggaaggaggcgggtagagcaccatgatcacgctgttgtgagtggaagattggctggagaaaatatgactggagctgctaagccgtactggcatcagtcaatgttctggagtgatttgggccccgatgttggctatgaagctattggtcttgtggacagtagtttgcccacagttggtgtttttgcaaaagcaactgcacaagacaaccccaaatctgccacagagcagtcaggaactggtatccgatcagagagtgagacagagtccgaggcctcagaaattactattcctcccagcaccccggcagttccacaggctcccgtccagggggaggactacggcaaaggtgtcatcttctacctcagggacaaagtggtcgtggggattgtgctatggaacatctttaaccgaatgccaatagcaaggaagatcattaaggacggtgagcagcatgaagatctcaatgaagtagccaaactattcaacattcatgaagactgaagccccacagtggaattggcaaacccactgcagcccctgagaggaggtcgaatgggtaaaggagcatttttttattcagcagactttctctgtgtatgagtgtgaatgatcaagtcctttgtgaatattttcaactatgtaggtaaattcttaatgttcacatagtgaaataaattctgattcttctaaattaaa

SEQ ID NO: 108316 - DNA, 1925 bp, Homo sapiens
  Payload ID: 1284
  Gene Symbol: AIFM1
  Gene Name: apoptosis-inducing factor, mitochondrion-associated, 1
  ENST ID: ENST00000460436
  CDS Start-End: 906-1730
gcccaggctggagtgcaatggtgtgatctctgctcaccacaacctccgcctcccaggttcaagcgattctcctgtctcagcctctggagtagctgggattacaggcatgcaccaccacacctggctaattttgtatttttggtagagacagggtttctccatgttggtcaggctggtcttgaactcccaacctcaggtgatccacccacctcggccacccaaagtgctgggattataggtgtgagtcactgcacctggccaacagcaatactttctttcctttcttttcctctaccctctatgccaggactccttagaaataaaatattaaggaaagtgagttatgaagatgataagggcaatgcagactacagaattatgggtgtctttgaactgctgcttcctgtaaaatgccaaaaacttctttgggcacatgatggttcccagcttgagagatctgtgagctccagttggaatgtttcatggcaactagttttcttaatgttctttttcagatatatgaaatcagggcatcttttcaggaggatgcttcctattcagaggttgcaaagcacttatgtaagccttaggtgactgcatgggtggaagtgcacagagttcaccatctgaagcttaatctggggccagcagttctgatacctgttgtatttgcgttacaaatgaacttgagcaccgaggccctcatgcccactgtcctgtaagtgggcgctcggcctggattgcagctctgccctgtctgtagtgagggctgcctgctgctcctttacttctcttcctgtattcctaggattgacttttgcttcctgctgtaactactctgtttcttcttcccagctcgagccttgggcacagaagtgattcaactcttccccgagaaaggaaatatgggaaagatcctccccgaatacctcagcaactggaccatggaaaaagtcagacgagagggggttaaggtgatgcccaatgctattgtgcaatccgttggagtcagcagtggcaagttacttatcaagctgaaagacggcaggaaggtagaaactgaccacatagtggcagctgtgggcctggagcccaatgttgagttggccaagactggtggcctggaaatagactcagattttggtggcttccgggtaaatgcagagctacaagcacgctctaacatctgggtggcaggagatgctgcatgcttctacgatataaagttgggaaggaggcgggtagagcaccatgatcacgctgttgtgagtggaagattggctggagaaaatatgactggagctgctaagccgtactggcatcagtcaatgttctggagtgatttgggccccgatgttggctatgaagctattggtcttgtggacagtagtttgcccacagttggtgtttttgcaaaagcaactgcacaagacaaccccaaatctgccacagagcagtcaggaactggtatccgatcagagagtgagacagagtccgaggcctcagaaattactattcctcccagcaccccggcagttccacaggctcccgtccagggggaggactacggcaaaggtgtcatcttctacctcagggacaaagtggtcgtggggattgtgctatggaacatctttaaccgaatgccaatagcaaggaagatcattaaggacggtgagcagcatgaagatctcaatgaagtagccaaactattcaacattcatgaagactgaagccccacagtggaattggcaaacccactgcagcccctgagaggaggtcgaatgggtaaaggagcatttttttattcagcagactttctctgtgtatgagtgtgaatgatcaagtcctttgtgaatattttcaactatgtaggtaaattcttaatgttcacatagtgaaataaattctgattcttctaaattaaa

SEQ ID NO: 108317 - DNA, 723 bp, Homo sapiens
  Payload ID: 1284
  Gene Symbol: AIFM1
  Gene Name: apoptosis-inducing factor, mitochondrion-associated, 1
  ENST ID: ENST00000529877
  CDS Start-End: 104-373
gtgtgaagagactgggggagctggccggggctcacggtgtttgacccgtcggtcgtgcgtgagaggaaagggaaggaggaggtcccgaatagcggtcgccgaaatgttccggtgtggaggcctggcggcgggtgctttgaagcagaagctggtgcccttggtgcggaccgtgtgcgtccgaagcccgaggcagaggaaccggctcccaggcaacttgttccagcgatggcatgttcctctagaactccagatgacaagacaaatggctagctctggtgcatcagggggcaaaatcgataattctgtgttagtccttattgtgggcttatcaacagtaggagctggtgcctatttgtgcagtctcatcacctaggatccccttctagatcactagcatctacaggtgcttctgggaaagatggcagcaacctagtgtacttcttaattgtaggagcaacagtcactggggcaggagtttattatgcctacaagactatgaaagaggatgaaaaaagatacaatgaaagaatttcagggttagggctgacaccagaacagaaacagaaaaaggccgcgttatctgcttcagaaggagaggaagttcctcaagacaaggcgccaagtcatgttcctttcctgctaattggtggaggcacagctgcttttgctgcagccagatccatccgggctcgggatcctggggccagggtactgattgtatct

SEQ ID NO: 108318 - DNA, 2105 bp, Homo sapiens
  Payload ID: 1284
  Gene Symbol: AIFM1
  Gene Name: apoptosis-inducing factor, mitochondrion-associated, 1
  ENST ID: ENST00000527892
  CDS Start-End: 9-140
tcgccgaaatgttccggtgtggaggcctggcggcgggtgctttgaagcagaagctggtgcccttggtgcggaccgtgtgcgtccgaagcccgaggcagaggaaccggctcccaggcctacaagactatgaaagaggatgaaaaaagatacaatgaaagaatttcagggttagggctgacaccagaacagaaacagaaaaaggccgcgttatctgcttcagaaggagaggaagttcctcaagacaaggcgccaagtcatgttcctttcctgctaattggtggaggcacagctgcttttgctgcagccagatccatccgggctcgggatcctggggccagggtactgattgtatctgaagatcctgagctgccgtacatgcgacctcctctttcaaaagaactgtggttttcagatgacccaaatgtcacaaagacactgcgattcaaacagtggaatggaaaagagagaagcatatatttccagccaccttctttctatgtctctgctcaggacctgcctcatattgagaatggtggtgtggctgtcctcactgggaagaaggtagtacagctggatgtgagagacaacatggtgaaacttaatgatggctctcaaataacctatgaaaagtgcttgattgcaacaggaggtactccaagaagtctgtctgccattgatagggctggagcagaggtgaagagtagaacaacgcttttcagaaagattggagactttagaagcttggagaagatttcacgggaagtcaaatcaattacgattatcggtgggggcttccttggtagcgaactggcctgtgctcttggcagaaaggatatatgaaatcagggcatcttttcaggaggatgcttcctattcagaggttgcaaagcacttatgtaagccttaggtgactgcatgggtggaagtgcacagagttcaccatctgaagcttaatctggggccagcagttctgatacctgttgtatttgcgttacaaatgaacttgagcaccgaggccctcatgcccactgtcctctcgagccttgggcacagaagtgattcaactcttccccgagaaaggaaatatgggaaagatcctccccgaatacctcagcaactggaccatggaaaaagtcagacgagagggggttaaggtgatgcccaatgctattgtgcaatccgttggagtcagcagtggcaagttacttatcaagctgaaagacggcaggaaggtagaaactgaccacatagtggcagctgtgggcctggagcccaatgttgagttggccaagactggtggcctggaaatagactcagattttggtggcttccgggtaaatgcagagctacaagcacgctctaacatctgggtggcaggagatgctgcatgcttctacgatataaagttgggaaggaggcgggtagagcaccatgatcacgctgttgtgagtggaagattggctggagaaaatatgactggagctgctaagccgtactggcatcagtcaatgttctggagtgatttgggccccgatgttggctatgaagctattggtcttgtggacagtagtttgcccacagttggtgtttttgcaaaagcaactgcacaagacaaccccaaatctgccacagagcagtcaggaactggtatccgatcagagagtgagacagagtccgaggcctcagaaattactattcctcccagcaccccggcagttccacaggctcccgtccagggggaggactacggcaaaggtgtcatcttctacctcagggacaaagtggtcgtggggattgtgctatggaacatctttaaccgaatgccaatagcaaggaagatcattaaggacggtgagcagcatgaagatctcaatgaagtagccaaactattcaacattcatgaagactgaagccccacagtggaattggcaaacccactgcagcccctgagaggaggtcgaatgggtaaaggagcatttttttattcagcagactttctctgtgtatgagtgtgaatgatcaagtcctttgtgaatattttcaactatgtaggtaaattcttaatgttcacatagtgaaataaattctgattcttctaaattaaa

SEQ ID NO: 108319 - DNA, 2468 bp, Homo sapiens
  Payload ID: 1284
  Gene Symbol: AIFM1
  Gene Name: apoptosis-inducing factor, mitochondrion-associated, 1
  Uniprot ID: O95831
  ENST ID: ENST00000535724
  CDS Start-End: 232-1206
aatgcggcagcgagtgctacgcctgcgcagtaggcctccggtcgccgttccccttccccggctctagcaggccggcttctctgtccaatgcccacccggagctgggaggaggagtctgcgtaatgtgcgtgtgaagagactgggggagctggccggggctcacggtgtttgacccgtcggtcgtgcgtgagaggaaagggaaggaggaggtcccgaatagcggtcgccgaaatgttccggtgtggaggcctggcggcgggtgctttgaagcagaagctggtgcccttggtgcggaccgtgtgcgtccgaagcccgaggcagaggaaccggctcccaggcaacttgttccagcgatggcatgttcctctagaactccagatgacaagacaaatggctagctctggtgcatcagggggcaaaatcgataattctgtgttagtccttattgtgggcttatcaacagtaggagctggtgcctatgcctacaagactatgaaagaggatgaaaaaagatacaatgaaagaatttcagggttagggctgacaccagaacagaaacagaaaaaggccgcgttatctgcttcagaaggagaggaagttcctcaagacaaggcgccaagtcatgttcctttcctgctaattggtggaggcacagctgcttttgctgcagccagatccatccgggctcgggatcctggggccagggtactgattgtatctgaagatcctgagctgccgtacatgcgacctcctctttcaaaagaactgtggttttcagatgacccaaatgtcacaaagacactgcgattcaaacagtggaatggaaaagagagaagcatatatttccagccaccttctttctatgtctctgctcaggacctgcctcatattgagaatggtggtgtggctgtcctcactgggaagaaggtagtacagctggatgtgagagacaacatggtgaaacttaatgatggctctcaaataacctatgaaaagtgcttgattgcaacaggaggtactccaagaagtctgtctgccattgatagggctggagcagaggtgaagagtagaacaacgcttttcagaaagattggagactttagaagcttggagaagatttcacgggaagtcaaatcaattacgattatcggtgggggcttccttggtagcgaactggcctgtgctcttggcagaaaggatatatgaaatcagggcatcttttcaggaggatgcttcctattcagaggttgcaaagcacttatgtaagccttaggtgactgcatgggtggaagtgcacagagttcaccatctgaagcttaatctggggccagcagttctgatacctgttgtatttgcgttacaaatgaacttgagcaccgaggccctcatgcccactgtcctctcgagccttgggcacagaagtgattcaactcttccccgagaaaggaaatatgggaaagatcctccccgaatacctcagcaactggaccatggaaaaagtcagacgagagggggttaaggtgatgcccaatgctattgtgcaatccgttggagtcagcagtggcaagttacttatcaagctgaaagacggcaggaaggtagaaactgaccacatagtggcagctgtgggcctggagcccaatgttgagttggccaagactggtggcctggaaatagactcagattttggtggcttccgggtaaatgcagagctacaagcacgctctaacatctgggtggcaggagatgctgcatgcttctacgatataaagttgggaaggaggcgggtagagcaccatgatcacgctgttgtgagtggaagattggctggagaaaatatgactggagctgctaagccgtactggcatcagtcaatgttctggagtgatttgggccccgatgttggctatgaagctattggtcttgtggacagtagtttgcccacagttggtgtttttgcaaaagcaactgcacaagacaaccccaaatctgccacagagcagtcaggaactggtatccgatcagagagtgagacagagtccgaggcctcagaaattactattcctcccagcaccccggcagttccacaggctcccgtccagggggaggactacggcaaaggtgtcatcttctacctcagggacaaagtggtcgtggggattgtgctatggaacatctttaaccgaatgccaatagcaaggaagatcattaaggacggtgagcagcatgaagatctcaatgaagtagccaaactattcaacattcatgaagactgaagccccacagtggaattggcaaacccactgcagcccctgagaggaggtcgaatgggtaaaggagcatttttttattcagcagactttctctgtgtatgagtgtgaatgatcaagtcctttgtgaatattttcaactatgtaggtaaattcttaatgttcacatagtgaaataaattctgattcttctaaatt

SEQ ID NO: 108320 - DNA, 3243 bp, Homo sapiens
  Payload ID: 1285
  Gene Symbol: AIFM2
  Gene Name: apoptosis-inducing factor, mitochondrion-associated, 2
  Uniprot ID: Q9BRQ8
  ENST ID: ENST00000307864
  CDS Start-End: 215-1336
ggccgttcggagaccagccccagcgtgccaggaccgtttccggggcctggccggggcgttgccgcggggtcggggaccagcacgagtgctgagtcacgccccgcccgggagcgcctcgggtcagtaactcgggaagacgaccaagcgggagcgggagcgggagcgggagccggagcgagagcgcgcgggcgcggccgacagtgcctgatttgagatggggtcccaggtctcggtggaatcgggagctctgcacgtggtgattgtgggtgggggctttggcgggatcgcagcagccagccagctgcaggccctgaacgtccccttcatgctggtggacatgaaggactccttccaccacaatgtggctgctctccgagcctccgtggagacagggttcgccaaaaagacattcatttcttactcggtgactttcaaggacaacttccggcaggggctagtagtggggatagacctgaagaaccagatggtgctgctgcagggtggcgaggccctgcccttctctcatcttatcctggccacgggcagcactgggcccttcccgggcaagtttaatgaggtttccagccagcaggccgctatccaggcctatgaggacatggtgaggcaggtccagcgctcacggttcatcgtggtggtgggaggaggctcggctggagtggagatggcagcagagattaaaacagaatatcctgagaaagaggtcactctcattcactcccaagtggccctggctgacaaggagctcctgccctccgtccggcaggaagtgaaggagatcctcctccggaagggcgtgcagctgctgctgagtgagcgggtgagcaatctggaggagctgcctctcaatgagtatcgagagtacatcaaagtgcagacggacaaaggcacagaggtggccaccaacctggtgattctctgcaccggcatcaagatcaacagctccgcctaccgcaaagcgtttgagagcagactagccagcagtggtgctctgagagtgaacgagcacctccaggtggagggccacagcaacgtctacgccattggtgactgtgccgacgtgaggacgcccaagatggcctatcttgccggcctccacgccaacatcgccgtggccaacatcgtcaactctgtgaagcagcggcctctccaggcctacaagccgggtgcactgacgttcctcctgtccatggggagaaatgacggtgtgggccaaatcagtggcttctatgtgggccggctcatggttcggctgaccaagagccgggacctgttcgtctctacgagctggaaaaccatgaggcagtctccaccttgatggagaggccaggcgggagaactaccgcagcaggtgggcgtacggactgcttggcgcatggcacccgcctggcaagtgctagaactaatgctattcttctggaataagatgccaatgatgtggtggctagaaatgcaacttgtataaaacaaaaatgggagagagagaggtattaaacaaataccccccttagaggatactttctgggtttggaaggtgtgcttgctgtggtactgggtgagcggctcatgtgtgctggctgcatggtgctggggaggccacagccagcccttcctctgcacctgcctcctctgggatgtgcatgtgtgtgtacgtgcttgtggtcatgacgcgtgccatttagagctctcagagcagggcagattgctgggctctggtggccagtgtctgtctgtgagggcaggaaggagagctgcacattgagaacaaaggagggacctgaggtggagagaggcccagcaccccaaatctctgccatcacacggtcggggagcccatacattctgcaacaaccagggacttcacaggagccttgttttcaatttgctaacaggtgcataatccctgtgctccttaagcctcatggccttcctacatttccactttatttgtttgtttgtttatttatttttgagacagtctcgccctgtcacccaggctggagtgcagtggcacgatctcagctcactgcaacctacgccttctgggttcacgtgattctcttgccttagcctcccaagtagctgggactacaggcacgtgccaccatgcctggctaatttttgtattttttaaatagagacggggtttcactgtgttggccaggctggtctcgaacacctgacctcaggtgatccattcgtcttggcctctcgaagtgctgggattccaggcgtgagccactgcggccagcacatttccacttttagatcctactccataccacaggtttcatttaagaagaaagagctagataaatgtgctcttctggttaccccaccctgacagagtgcatttttacacggctagcaggggttgagactgcagcctggcctgccagccattggaggtgtttaaggaagggcagataatgtgactctttgcggggtgccatctgcttacccattagcgagcagagggggtttctgcgggtgacccccagcatatttctaggttacttatgggcagatttgtaagtgacaaaactccagctgatgctgggaatggggagagggcccttgagggactttgtggttttgtgcttctggtttcctggccaaccccagggtcacttgtctggaggcccagctgggcactaatgtctgccaccgactatgttacagtgtataaatgattcctctatttgggagagatcttccaatccagaggagcccctcttggactgcctgggttaaatctgcatagcagaagtggttgatgagttcatctgaagaaattcaggccccacctccccaccctgcccctccctgctcccttttgatggtggcctctgggtactcgggcagagtccttgggacaccagcctctctggggttctcaggccatcccgttggggctgtcgcccaggcctaagtgagtcgtgtgcctctattggaggatggctgttcccctggtggttgcatccaagtatctgtctttctttatggaccacgaagggaagcccaccttcctggaggcaggaccttcggcctaagaaacacaggccctggtgctatctgacctggggtccagcgaggtgggaatcccagtgtgtgagcgacaggccttcttctattgacttacaatattctagaaggacctacgtgtggggacacagttttccaaactgaggaaaatgttgcaataaaagaatatgttgtaagaaa

SEQ ID NO: 108321 - DNA, 2570 bp, Homo sapiens
  Payload ID: 1285
  Gene Symbol: AIFM2
  Gene Name: apoptosis-inducing factor, mitochondrion-associated, 2
  Uniprot ID: Q9BRQ8
  ENST ID: ENST00000373248
  CDS Start-End: 19-1140
agcagtgcctgatttgagatggggtcccaggtctcggtggaatcgggagctctgcacgtggtgattgtgggtgggggctttggcgggatcgcagcagccagccagctgcaggccctgaacgtccccttcatgctggtggacatgaaggactccttccaccacaatgtggctgctctccgagcctccgtggagacagggttcgccaaaaagacattcatttcttactcggtgactttcaaggacaacttccggcaggggctagtagtggggatagacctgaagaaccagatggtgctgctgcagggtggcgaggccctgcccttctctcatcttatcctggccacgggcagcactgggcccttcccgggcaagtttaatgaggtttccagccagcaggccgctatccaggcctatgaggacatggtgaggcaggtccagcgctcacggttcatcgtggtggtgggaggaggctcggctggagtggagatggcagcagagattaaaacagaatatcctgagaaagaggtcactctcattcactcccaagtggccctggctgacaaggagctcctgccctccgtccggcaggaagtgaaggagatcctcctccggaagggcgtgcagctgctgctgagtgagcgggtgagcaatctggaggagctgcctctcaatgagtatcgagagtacatcaaagtgcagacggacaaaggcacagaggtggccaccaacctggtgattctctgcaccggcatcaagatcaacagctccgcctaccgcaaagcgtttgagagcagactagccagcagtggtgctctgagagtgaacgagcacctccaggtggagggccacagcaacgtctacgccattggtgactgtgccgacgtgaggacgcccaagatggcctatcttgccggcctccacgccaacatcgccgtggccaacatcgtcaactctgtgaagcagcggcctctccaggcctacaagccgggtgcactgacgttcctcctgtccatggggagaaatgacggtgtgggccaaatcagtggcttctatgtgggccggctcatggttcggctgaccaagagccgggacctgttcgtctctacgagctggaaaaccatgaggcagtctccaccttgatggagaggccaggcgggagaactaccgcagcaggccaagtggaacccctgggagatgacaggacaccacctctgaccccacaggaaccctgtcggtgtgcaccagcgcatccagctctcatgtctctgagatgacatgggtgttttgtccagactgggatgacggcagctttggggcagcagaggaggcatttttcagatgttttcatcttcgaatgaacttggtgatctggatgtctgcagcaagtctcagcaatctctttatgaatcatcattattattatggttcagttcatggtctttcccagggcctgggtgctgatgcttccccactccacactcgagcctcaagtatatgtggacagccacagtacactgtgcagctggtttaggacaagtgtctattccagtggtcactgtccactgggggagggcgtgcagaggggttttctttgttaatgttcttgggtttccatgatgcaactgagaaatggtgattgtgcattatacccagtacccctgagactcctttctggcccccagattcctggacactgttgatctattgggtccagaagcctggagaaggccgggtaactgaagctggtagccagttcatgttgagaagcagaggactaggtctacactggcgccctctgcattcaggtcaagggccaaatgggaatgtgcagaaggcaaggggaatccaccctcctcactgaagccttttaagaaaaaagcatcctggagagaggtagtttctctctacagaagcattcccaagaaggaaaggagcaatgctagaatgagaataccacagctttgcaactcctaacgaatggcggaatctagagaagaggcatcaatggccaccagcatcacaccaatacagacaaccaggcacgacgcgcctcctcgggcacgagcactcgccactgaccaaggagtcttggcaaagttttcgaacctacacctcatgaaacctctagatccaaccaccaagttataaaaaagcaaagaaacatgttttatgatgccaggaggatataatcaacaaaatccggactgcatgaaaccctataggacaaatggcccagcttcctcaacaaatgaattgcaaagaaataagaaagagatgaaggaggaacctatggtataagagactcatcaaccaactgcagtgcgtggactgatttggatccgaaatcaaataaacaaattttctttctttcctttcttcctttctctctccccctccccctccttccctccctccttccttctctaccttcccttccttcctttctctctctctctccctctgcctctctctttctctctttttctttccctccctccctccctctctctctctctttttctttctttcctttcttaatttcttgacatggtctcactctgtgcactctg

SEQ ID NO: 108322 - DNA, 3247 bp, Homo sapiens
  Payload ID: 1285
  Gene Symbol: AIFM2
  Gene Name: apoptosis-inducing factor, mitochondrion-associated, 2
  Uniprot ID: Q9BRQ8
  ENST ID: ENST00000613322
  CDS Start-End: 218-1339
ggccgttcggagaccagccccagcgtgccaggaccgtttccggggcctggccggggcgttgccgcggggtcggggaccagcacgagtgctgagtcacgccccgcccgggagcgcctcgggtcagtaactcgggaagacgaccaagcgggagcgggagcgggagcgggagccggagcgagagcgcgcgggcgcggccgacagcagtgcctgatttgagatggggtcccaggtctcggtggaatcgggagctctgcacgtggtgattgtgggtgggggctttggcgggatcgcagcagccagccagctgcaggccctgaacgtccccttcatgctggtggacatgaaggactccttccaccacaatgtggctgctctccgagcctccgtggagacagggttcgccaaaaagacattcatttcttactcggtgactttcaaggacaacttccggcaggggctagtagtggggatagacctgaagaaccagatggtgctgctgcagggtggcgaggccctgcccttctctcatcttatcctggccacgggcagcactgggcccttcccgggcaagtttaatgaggtttccagccagcaggccgctatccaggcctatgaggacatggtgaggcaggtccagcgctcacggttcatcgtggtggtgggaggaggctcggctggagtggagatggcagcagagattaaaacagaatatcctgagaaagaggtcactctcattcactcccaagtggccctggctgacaaggagctcctgccctccgtccggcaggaagtgaaggagatcctcctccggaagggcgtgcagctgctgctgagtgagcgggtgagcaatctggaggagctgcctctcaatgagtatcgagagtacatcaaagtgcagacggacaaaggcacagaggtggccaccaacctggtgattctctgcaccggcatcaagatcaacagctccgcctaccgcaaagcgtttgagagcagactagccagcagtggtgctctgagagtgaacgagcacctccaggtggagggccacagcaacgtctacgccattggtgactgtgccgacgtgaggacgcccaagatggcctatcttgccggcctccacgccaacatcgccgtggccaacatcgtcaactctgtgaagcagcggcctctccaggcctacaagccgggtgcactgacgttcctcctgtccatggggagaaatgacggtgtgggccaaatcagtggcttctatgtgggccggctcatggttcggctgaccaagagccgggacctgttcgtctctacgagctggaaaaccatgaggcagtctccaccttgatggagaggccaggcgggagaactaccgcagcaggtgggcgtacggactgcttggcgcatggcacccgcctggcaagtgctagaactaatgctattcttctggaataagatgccaatgatgtggtggctagaaatgcaacttgtataaaacaaaaatgggagagagagaggtattaaacaaataccccccttagaggatactttctgggtttggaaggtgtgcttgctgtggtactgggtgagcggctcatgtgtgctggctgcatggtgctggggaggccacagccagcccttcctctgcacctgcctcctctgggatgtgcatgtgtgtgtacgtgcttgtggtcatgacgcgtgccatttagagctctcagagcagggcagattgctgggctctggtggccagtgtctgtctgtgagggcaggaaggagagctgcacattgagaacaaaggagggacctgaggtggagagaggcccagcaccccaaatctctgccatcacacggtcggggagcccatacattctgcaacaaccagggacttcacaggagccttgttttcaatttgctaacaggtgcataatccctgtgctccttaagcctcatggccttcctacatttccactttatttgtttgtttgtttatttatttttgagacagtctcgccctgtcacccaggctggagtgcagtggcacgatctcagctcactgcaacctacgccttctgggttcacgtgattctcttgccttagcctcccaagtagctgggactacaggcacgtgccaccatgcctggctaatttttgtattttttaaatagagacggggtttcactgtgttggccaggctggtctcgaacacctgacctcaggtgatccattcgtcttggcctctcgaagtgctgggattccaggcgtgagccactgcggccagcacatttccacttttagatcctactccataccacaggtttcatttaagaagaaagagctagataaatgtgctcttctggttaccccaccctgacagagtgcatttttacacggctagcaggggttgagactgcagcctggcctgccagccattggaggtgtttaaggaagggcagataatgtgactctttgcggggtgccatctgcttacccattagcgagcagagggggtttctgcgggtgacccccagcatatttctaggttacttatgggcagatttgtaagtgacaaaactccagctgatgctgggaatggggagagggcccttgagggactttgtggttttgtgcttctggtttcctggccaaccccagggtcacttgtctggaggcccagctgggcactaatgtctgccaccgactatgttacagtgtataaatgattcctctatttgggagagatcttccaatccagaggagcccctcttggactgcctgggttaaatctgcatagcagaagtggttgatgagttcatctgaagaaattcaggccccacctccccaccctgcccctccctgctcccttttgatggtggcctctgggtactcgggcagagtccttgggacaccagcctctctggggttctcaggccatcccgttggggctgtcgcccaggcctaagtgagtcgtgtgcctctattggaggatggctgttcccctggtggttgcatccaagtatctgtctttctttatggaccacgaagggaagcccaccttcctggaggcaggaccttcggcctaagaaacacaggccctggtgctatctgacctggggtccagcgaggtgggaatcccagtgtgtgagcgacaggccttcttctattgacttacaatattctagaaggacctacgtgtggggacacagttttccaaactgaggaaaatgttgcaataaaagaatatgttgtaagaaag

SEQ ID NO: 108323 - DNA, 2309 bp, Homo sapiens
  Payload ID: 1286
  Gene Symbol: AIFM3
  Gene Name: apoptosis-inducing factor, mitochondrion-associated, 3
  Uniprot ID: Q96NN9
  ENST ID: ENST00000399163
  CDS Start-End: 186-1982
cgcggccccaagcggttcccgagcccaggcccgcgccgagcccaggtcctagagcagctccagcaggatggcggctccagcgtctctaaggcctgcagggggtccagccccatggggggcgccctaggcctccgacagctccccatctgtgctcctgcctgccggccatcctcaggccactcgccatgggcggctgcttctccaaacccaaaccagtggagctcaagatcgaggtggtgctgcctgagaaggagcgaggcaaggaggagctgtcggccagtgggaagggcagcccccgggcctaccagggcaatggcacggcccgccacttccacacggaggagcgcctgtccacccctcacccctaccccagccctcaggattgcgtggaggctgctgtctgccacgtcaaggacctcgagaatggccagatgcgggaagtggagctgggctgggggaaggtgttgctggtgaaggacaatggggagttccacgccctgggccataagtgtccgcactacggcgcacccctggtgaaaggcgttctgtcccgtggtcgggtgcgctgcccctggcacggcgcctgcttcaacatcagcactggggacctggaggacttccctggcctggacagtctacacaagttccaggtgaagattgagaaggagaaggtgtacgtccgggccagcaagcaggccctacagctgcagcgaaggaccaaggtgatggccaagtgtatctctccaagtgctgggtacagcagtagcaccaatgtgctcattgtgggtgcaggtgcagctggcctggtgtgtgcagagacactgcggcaggagggcttctccgaccggatcgtcctgtgcacgctagaccggcaccttccctacgaccgtcccaagctcagcaagtccctggacacacagcctgagcagctggccctgaggcccaaggagtttttccgagcctatggcatcgaggtgctcaccgaggctcaggtggtcacagtggacgtgagaactaagaaggtcgtgttcaaggatggcttcaagctggagtacagcaagctgctgctggcaccagggagcagccccaagactctgagctgcaaaggcaaagaagtggagaacgtgttcactatccggacgccagaggatgccaatcgcgtggtgaggctggcccgaggccgcaacgtggtcgtcgtgggagccggcttcctggggatggaggtggccgcttacctgacggagaaggcccactctgtgtctgtggtggagctggaggagacgcccttcaggaggttcctgggggagcgcgtgggtcgtgccctcatgaagatgtttgagaacaaccgggtgaagttctacatgcagacggaggtgtctgagctgcggggccaggagggaaagctgaaggaggttgtgctgaagagcagcaaggtcgtgcgggctgacgtctgcgtggtgggcattggtgcagtgcccgccacaggcttcctgaggcaaagcggcatcggtttggattcccgaggcttcatccctgtcaacaagatgatgcagaccaatgtcccaggcgtgtttgcagctggcgatgctgtcaccttcccccttgcctggaggaacaaccgcaaagtgaacattccacattggcagatggctcatgctcaggggcgcgtggcagcccagaacatgttggcgcaggaggcggagatgagcactgtgccctacctctggaccgccatgtttggcaagagcctgcgctacgcgggctacggagaaggcttcgacgacgtcatcatccagggggatctggaggagctgaagtttgtggctttttacactaaaggcgacgaggtgatcgccgtggccagcatgaactacgatcccattgtgtccaaggtcgctgaggtgctggcctcaggccgtgccatccggaagcgggaggtggagactggcgacatgtcctggcttacggggaaaggatcctgagctcacatgcagtagacttgggcaggcaaagggggcaccaagggcacaggccaagccttgggggcaggtgccaatctccagtcccaggatcccccagggcagaacctgagccctcccagtgcttgccttcagccacctggctcccctcctgggaggcctctgctggatccagaagatgctcaaccctcaaggcctctgctgccactgacagctggcactggaggcaggacaagccctgcctcttctccctctattgggactggtcccctgaagaaccctgcaacacgttaaacattaccgtaaaattaaaacgcacaaatttgcaga

SEQ ID NO: 108324 - DNA, 2387 bp, Homo sapiens
  Payload ID: 1286
  Gene Symbol: AIFM3
  Gene Name: apoptosis-inducing factor, mitochondrion-associated, 3
  Uniprot ID: Q96NN9
  ENST ID: ENST00000399167
  CDS Start-End: 241-2058
agtgcaaacgcagcgccagacacgccccgcccgcgcctccccgcccccccgcgcccgcggccccaagcggttcccgagcccaggcccgcgccgagcccaggtcctagagcagctccagcaggatggcggctccagcgtctctaaggcctgcagggggtccagccccatggggggcgccctaggcctccgacagctccccatctgtgctcctgcctgccggccatcctcaggccactcgccatgggcggctgcttctccaaacccaaaccagtggagctcaagatcgaggtggtgctgcctgagaaggagcgaggcaaggaggagctgtcggccagtgggaagggcagcccccgggcctaccagggcaatggcacggcccgccacttccacacggaggagcgcctgtccacccctcacccctaccccagccctcaggattgcgtggaggctgctgtctgccacgtcaaggacctcgagaatggccagatgcgggaagtggagctgggctgggggaaggtgttgctggtgaaggacaatggggagttccacgccctgggccataagtgtccgcactacggcgcacccctggtgaaaggcgttctgtcccgtggtcgggtgcgctgcccctggcacggcgcctgcttcaacatcagcactggggacctggaggacttccctggcctggacagtctacacaagttccaggtgaagattgagaaggagaaggtgtacgtccgggccagcaagcaggccctacagctgcagcgaaggaccaaggtgatggccaagtgtatctctccaagtgctgggtacagcagtagcaccaatgtgctcattgtgggtgcaggtgcagctggcctggtgtgtgcagagacactgcggcaggagggcttctccgaccggatcgtcctgtgcacgctagaccggcaccttccctacgaccgtcccaagctcagcaagtccctggacacacagcctgagcagctggccctgaggcccaaggagtttttccgagcctatggcatcgaggtgctcaccgaggctcaggtggtcacagtggacgtgagaactaagaaggtcgtgttcaaggatggcttcaagctggagtacagcaagctgctgctggcaccagggagcagccccaagactctgagctgcaaaggcaaagaagtggagaacgtgttcactatccggacgccagaggatgccaatcgcgtggtgaggctggcccgaggccgcaacgtggtcgtcgtgggagccggcttcctggggatggaggtggccgcttacctgacggagaaggcccactctgtgtctgtggtggagctggaggagacgcccttcaggaggttcctgggggagcgcgtgggtcgtgccctcatgaagatgtttgagaacaaccgggtgaagttctacatgcagacggaggtgtctgagctgcggggccaggagggaaagctgaaggaggttgtgctgaagagcagcaaggtcgtgcgggctgacgtctgcgtggtgggcattggtgcagtgcccgccacaggcttcctgaggcaaagcggcatcggtttggattcccgaggcttcatccctgtcaacaagatgatgcagaccaatgtcccaggcgtgtttgcagctggcgatgctgtcaccttcccccttgcctggaggaacaaccgcaaagtgaacattccacattggcagatggctcatgctcaggggcgcgtggcagcccagaacatgttggcgcaggaggcggagatgagcactgtgccctacctctggaccgccatgtttggcaagagcctgcgctacgcgggctacggagaaggcttcgacgacgtcatcatccagggggatctggaggagctgaagtttgtggctttttacactaaaggcgacgaggtgatcgccgtggccagcatgaactacgatcccattgtgtccaaggtcgctgaggtgctggcctcaggccgtgccatccggaagcgggaggtggagctgtttgtgctgcacagcaagactggcgacatgtcctggcttacggggaaaggatcctgagctcacatgcagtagacttgggcaggcaaagggggcaccaagggcacaggccaagccttgggggcaggtgccaatctccagtcccaggatcccccagggcagaacctgagccctcccagtgcttgccttcagccacctggctcccctcctgggaggcctctgctggatccagaagatgctcaaccctcaaggcctctgctgccactgacagctggcactggaggcaggacaagccctgcctcttctccctctattgggactggtcccctgaagaaccctgcaacacgttaaacattaccgtaaaattaaaacgcacaaatttgcagatc

SEQ ID NO: 108325 - DNA, 2333 bp, Homo sapiens
  Payload ID: 1286
  Gene Symbol: AIFM3
  Gene Name: apoptosis-inducing factor, mitochondrion-associated, 3
  Uniprot ID: Q96NN9
  ENST ID: ENST00000405089
  CDS Start-End: 190-2004
agtccactgctgggcctggaacacggagcagtggctgccctgcgaggaggtcctagagcagctccagcaggatggcggctccagcgtctctaaggcctgcagggggtccagccccatggggggcgccctaggcctccgacagctccccatctgtgctcctgcctgccggccatcctcaggccactcgccatgggcggctgcttctccaaacccaaaccaggcgctgccttgcccacagtggagctcaagatcgaggtggtgctgcctgagaaggagcgaggcaaggaggagctgtcggccagtgggaagggcagcccccgggcctaccagggcaatggcacggcccgccacttccacacggaggagcgcctgtccacccctcacccctaccccagccctcaggattgcgtggaggctgctgtctgccacgtcaaggacctcgagaatggccagatgcgggaagtggagctgggctgggggaaggtgttgctggtgaaggacaatggggagttccacgccctgggccataagtgtccgcactacggcgcacccctggtgaaaggcgttctgtcccgtggtcgggtgcgctgcccctggcacggcgcctgcttcaacatcagcactggggacctggaggacttccctggcctggacagtctacacaagttccaggtgaagattgagaaggagaaggtgtacgtccgggccagcaagcaggccctacagctgcagcgaaggaccaaggtgatggccaagtgtatctctccaagtgctgggtacagcagtagcaccaatgtgctcattgtgggtgcaggtgcagctggcctggtgtgtgcagagacactgcggcaggagggcttctccgaccggatcgtcctgtgcacgctagaccggcaccttccctacgaccgtcccaagctcagcaagtccctggacacacagcctgagcagctggccctgaggcccaaggagtttttccgagcctatggcatcgaggtgctcaccgaggctcaggtggtcacagtggacgtgagaactaagaaggtcgtgttcaaggatggcttcaagctggagtacagcaagctgctgctggcaccagggagcagccccaagactctgagctgcaaaggcaaagaagtggagaacgtgttcactatccggacgccagaggatgccaatcgcgtggtgaggctggcccgaggccgcaacgtggtcgtcgtgggagccggcttcctggggatggaggtggccgcttacctgacggagaaggcccactctgtgtctgtggtggagctggaggagacgcccttcaggaggttcctgggggagcgcgtgggtcgtgccctcatgaagatgtttgagaacaaccgggtgaagttctacatgcagacggaggtgtctgagctgcggggccaggagggaaagctgaaggaggttgtgctgaagagcagcaaggtcgtgcgggctgacgtctgcgtggtgggcattggtgcagtgcccgccacaggcttcctgaggcaaagcggcatcggtttggattcccgaggcttcatccctgtcaacaagatgatgcagaccaatgtcccaggcgtgtttgcagctggcgatgctgtcaccttcccccttgcctggaggaacaaccgcaaagtgaacattccacattggcagatggctcatgctcaggggcgcgtggcagcccagaacatgttggcgcaggaggcggagatgagcactgtgccctacctctggaccgccatgtttggcaagagcctgcgctacgcgggctacggagaaggcttcgacgacgtcatcatccagggggatctggaggagctgaagtttgtggctttttacactaaaggcgacgaggtgatcgccgtggccagcatgaactacgatcccattgtgtccaaggtcgctgaggtgctggcctcaggccgtgccatccggaagcgggaggtggagactggcgacatgtcctggcttacggggaaaggatcctgagctcacatgcagtagacttgggcaggcaaagggggcaccaagggcacaggccaagccttgggggcaggtgccaatctccagtcccaggatcccccagggcagaacctgagccctcccagtgcttgccttcagccacctggctcccctcctgggaggcctctgctggatccagaagatgctcaaccctcaaggcctctgctgccactgacagctggcactggaggcaggacaagccctgcctcttctccctctattgggactggtcccctgaagaaccctgcaacacgttaaacattaccgtaaaattaaaacgcacaaatttgcagatc

SEQ ID NO: 108326 - DNA, 2368 bp, Homo sapiens
  Payload ID: 1286
  Gene Symbol: AIFM3
  Gene Name: apoptosis-inducing factor, mitochondrion-associated, 3
  Uniprot ID: Q96NN9
  ENST ID: ENST00000440238
  CDS Start-End: 222-2039
gctcccactgtctctctccgtccctctgtgtctctacctgcccacacgccccggtcctgatggctccagtctcccctgcaggtcctagagcagctccagcaggatggcggctccagcgtctctaaggcctgcagggggtccagccccatggggggcgccctaggcctccgacagctccccatctgtgctcctgcctgccggccatcctcaggccactcgccatgggcggctgcttctccaaacccaaaccagtggagctcaagatcgaggtggtgctgcctgagaaggagcgaggcaaggaggagctgtcggccagtgggaagggcagcccccgggcctaccagggcaatggcacggcccgccacttccacacggaggagcgcctgtccacccctcacccctaccccagccctcaggattgcgtggaggctgctgtctgccacgtcaaggacctcgagaatggccagatgcgggaagtggagctgggctgggggaaggtgttgctggtgaaggacaatggggagttccacgccctgggccataagtgtccgcactacggcgcacccctggtgaaaggcgttctgtcccgtggtcgggtgcgctgcccctggcacggcgcctgcttcaacatcagcactggggacctggaggacttccctggcctggacagtctacacaagttccaggtgaagattgagaaggagaaggtgtacgtccgggccagcaagcaggccctacagctgcagcgaaggaccaaggtgatggccaagtgtatctctccaagtgctgggtacagcagtagcaccaatgtgctcattgtgggtgcaggtgcagctggcctggtgtgtgcagagacactgcggcaggagggcttctccgaccggatcgtcctgtgcacgctagaccggcaccttccctacgaccgtcccaagctcagcaagtccctggacacacagcctgagcagctggccctgaggcccaaggagtttttccgagcctatggcatcgaggtgctcaccgaggctcaggtggtcacagtggacgtgagaactaagaaggtcgtgttcaaggatggcttcaagctggagtacagcaagctgctgctggcaccagggagcagccccaagactctgagctgcaaaggcaaagaagtggagaacgtgttcactatccggacgccagaggatgccaatcgcgtggtgaggctggcccgaggccgcaacgtggtcgtcgtgggagccggcttcctggggatggaggtggccgcttacctgacggagaaggcccactctgtgtctgtggtggagctggaggagacgcccttcaggaggttcctgggggagcgcgtgggtcgtgccctcatgaagatgtttgagaacaaccgggtgaagttctacatgcagacggaggtgtctgagctgcggggccaggagggaaagctgaaggaggttgtgctgaagagcagcaaggtcgtgcgggctgacgtctgcgtggtgggcattggtgcagtgcccgccacaggcttcctgaggcaaagcggcatcggtttggattcccgaggcttcatccctgtcaacaagatgatgcagaccaatgtcccaggcgtgtttgcagctggcgatgctgtcaccttcccccttgcctggaggaacaaccgcaaagtgaacattccacattggcagatggctcatgctcaggggcgcgtggcagcccagaacatgttggcgcaggaggcggagatgagcactgtgccctacctctggaccgccatgtttggcaagagcctgcgctacgcgggctacggagaaggcttcgacgacgtcatcatccagggggatctggaggagctgaagtttgtggctttttacactaaaggcgacgaggtgatcgccgtggccagcatgaactacgatcccattgtgtccaaggtcgctgaggtgctggcctcaggccgtgccatccggaagcgggaggtggagctgtttgtgctgcacagcaagactggcgacatgtcctggcttacggggaaaggatcctgagctcacatgcagtagacttgggcaggcaaagggggcaccaagggcacaggccaagccttgggggcaggtgccaatctccagtcccaggatcccccagggcagaacctgagccctcccagtgcttgccttcagccacctggctcccctcctgggaggcctctgctggatccagaagatgctcaaccctcaaggcctctgctgccactgacagctggcactggaggcaggacaagccctgcctcttctccctctattgggactggtcccctgaagaaccctgcaacacgttaaacattaccgtaaaattaaaacgcacaaatttgcagatc

SEQ ID NO: 108327 - DNA, 1092 bp, Homo sapiens
  Payload ID: 1286
  Gene Symbol: AIFM3
  Gene Name: apoptosis-inducing factor, mitochondrion-associated, 3
  ENST ID: ENST00000434714
  CDS Start-End: 286-1092
ctcctggccacagcttgagctgggaggagggtggaggctgggccgcctcctggacccctgccctccctgcccggccttccaaggcccggcagcctcagtccactgctgggcctggaacacggagcagtggctgccctgcgaggaggtcctagagcagctccagcaggatggcggctccagcgtctctaaggcctgcagggggtccagccccatggggggcgccctaggcctccgacagctccccatctgtgctcctgcctgccggccatcctcaggccactcgccatgggcggctgcttctccaaacccaaaccagtggagctcaagatcgaggtggtgctgcctgagaaggagcgaggcaaggaggagctgtcggccagtgggaagggcagcccccgggcctaccagggcaatggcacggcccgccacttccacacggaggagcgcctgtccacccctcacccctaccccagccctcaggattgcgtggaggctgctgtctgccacgtcaaggacctcgagaatggccagatgcgggaagtggagctgggctgggggaaggtgttgctggtgaaggacaatggggagttccacgccctgggccataagtgtccgcactacggcgcacccctggtgaaaggcgttctgtcccgtggtcgggtgcgctgcccctggcacggcgcctgcttcaacatcagcactggggacctggaggacttccctggcctggacagtctacacaagttccaggtgaagattgagaaggagaaggtgtacgtccgggccagcaagcaggccctacagctgcagcgaaggaccaaggtgatggccaagtgtatctctccaagtgctgggtacagcagtagcaccaatgtgctcattgtgggtgcaggtgcagctggcctggtgtgtgcagagacactgcggcaggagggcttctccgaccggatcgtcctgtgcacgctagaccggcaccttccctacgaccgtcccaagctcagcaagtccctggacacacagcctgagcagctggccctgaggcccaaggagtttttccgagcctatggcatcgaggtgctcaccgaggctcag

SEQ ID NO: 108328 - DNA, 606 bp, Homo sapiens
  Payload ID: 1286
  Gene Symbol: AIFM3
  Gene Name: apoptosis-inducing factor, mitochondrion-associated, 3
  ENST ID: ENST00000441376
  CDS Start-End: 218-606
aagcggttcccgagcccaggcccgcgccgagcccaggcacccacccacggcccttcctggtatctggaccagaccaggtcctagagcagctccagcaggatggcggctccagcgtctctaaggcctgcagggggtccagccccatggggggcgccctaggcctccgacagctccccatctgtgctcctgcctgccggccatcctcaggccactcgccatgggcggctgcttctccaaacccaaaccagtggagctcaagatcgaggtggtgctgcctgagaaggagcgaggcaaggaggagctgtcggccagtgggaagggcagcccccgggcctaccagggcaatggcacggcccgccacttccacacggaggagcgcctgtccacccctcacccctaccccagccctcaggattgcgtggaggctgctgtctgccacgtcaaggacctcgagaatggccagatgcgggaagtggagctgggctgggggaaggtgttgctggtgaaggacaatggggagttccacgccctgggccataagtgtccgcactacggcgcacccctggtgaaaggcgttctgtcccgtggtcgggtgcgctgcccctg

SEQ ID NO: 108329 - DNA, 521 bp, Homo sapiens
  Payload ID: 1286
  Gene Symbol: AIFM3
  Gene Name: apoptosis-inducing factor, mitochondrion-associated, 3
  ENST ID: ENST00000426113
  CDS Start-End: 197-421
cagcctcagtccactgctgggcctggaacacggagcagtggctgccctgcgaggaggtcctagagcagctccagcaggatggcggctccagcgtctctaaggcctgcagggggtccagccccatggggggcgccctaggcctccgacagctccccatctgtgctcctgcctgccggccatcctcaggccactcgccatgggcggctgcttctccaaacccaaaccagtgggaagggcagcccccgggcctaccagggcaatggcacggcccgccacttccacacggaggagcgcctgtccacccctcacccctaccccagccctcaggattgcgtggaggctgctgtctgccacgtcaaggacctcgagaatggccagatgcgggaagtggagctgggctgggggaaggtgttgctggtgaaggacaatggggagttccacgccctgggccataagtgtccgcactacggcgcacccctggtgaaaggcgttctgtcccgtggtcgggtgcgctgcccctg

SEQ ID NO: 108330 - DNA, 789 bp, Homo sapiens
  Payload ID: 1286
  Gene Symbol: AIFM3
  Gene Name: apoptosis-inducing factor, mitochondrion-associated, 3
  ENST ID: ENST00000417515
  CDS Start-End: 182-547
gccccaagcggttcccgagcccaggcccgcgccgagcccaggtcctagagcagctccagcaggatggcggctccagcgtctctaaggcctgcagggggtccagccccatggggggcgccctaggcctccgacagctccccatctgtgctcctgcctgccggccatcctcaggccactcgccatgggcggctgcttctccaaacccaaaccagtggagctcaagatcgaggtggtgctgcctgagaaggagcgaggcaaggaggagctgtcggccagtgggaagggcagcccccgggcctaccagggcaatggcacggcccgccacttccacacggaggagcgcctgtccacccctcacccctaccccagccctcaggattgcgtggaggctgctgtctgccacgtcaaggacctcgagaatggccagcgttctgtcccgtggtcgggtgcgctgcccctggcacggcgcctgcttcaacatcagcactggggacctggaggacttccctggcctggacagtctacacaagttccaggtgaagattgagaaggagaaggtgtacgtccgggccagcaagcaggccctacagctgcagcgaaggaccaaggtgatggccaagtgtatctctccaagtgctgggtacagcagtagcaccaatgtgctcattgtgggtgcaggtgcagctggcctggtgtgtgcagagacactgcggcaggagggcttctccgaccggatcgtcctgtgcacgctagaccggcaccttccctacgaccgtcccaagctcagca

SEQ ID NO: 108331 - DNA, 896 bp, Homo sapiens
  Payload ID: 1287
  Gene Symbol: APITD1
  Gene Name: apoptosis-inducing, TAF9-like domain 1
  Uniprot ID: Q8N2Z9
  ENST ID: ENST00000309048
  CDS Start-End: 76-492
gggaaaatccgacctggccgcgcaccaccgccccttctcggccctcctgcgtttgcccagggtcggcccgcagtgatggaggaggaggcggagaccgaggagcagcagcgattctcttaccaacagaggctaaaggcagcagttcactatactgtgggttgtctttgcgaggaagttgcattggacaaagagatgcagttcagcaaacagaccattgcggccatttcggagctgactttccgacagtgtgaaaattttgccaaagaccttgaaatgtttgcaagacatgcgaaaagaaccacaattaacactgaagatgtgaagctcttagccaggaggagtaattcactgctaaaatacatcacagacaaaagtgaagagattgctcagattaacctagaacgaaaagcacagaagaaaaagaagtcagaggatggaagcaaaaattcaaggcagccagcagaggctggagtggtggaaagtgagaattaaagtccctcgccgcttggaaagtgcagccttctacaggtagagccacctagaaatgcatatggctgcaaaggaaactttgaagggttaaatagagatttaaaaaaataaaataaaaaggctgggctagggtgctttttgtgctgaattctccacattgttaactgccaaagctagttttagagaatgagaaagtcttaagcaaaatactcccaggtctcactccagaacataaaaatggtgtgtgatcaaatggtatatattagaaattacatctgttgtaattaaaattgtgtgagcaattaaacatggttgactttttcaagcaaaaatcagttcatcttttgatgtaattttctaggctaaatggcaatctctgaaagatgaataaagctatatttatttag

SEQ ID NO: 108332 - DNA, 914 bp, Homo sapiens
  Payload ID: 1287
  Gene Symbol: APITD1
  Gene Name: apoptosis-inducing, TAF9-like domain 1
  ENST ID: ENST00000477755
  CDS Start-End: 508-744
gaagcggttctaggggagcgtgcgggcgccggggtccggcggcgagaggccaccttctggccttgcgatgaatcctcggtttccccttctcagatggggttttcgtgagggtacaacgtcggcattagacattccaggtgacgcccgtacgcggtgggcggttcgggccggagctctggaacgctggccctggaggcgtcgacccctcgttactgatgcagggacgcggtgcggaccagtcaggcccagagctcgtccttagatgtgggttcgaatctctgccccgccaacttgtgatcgtatcgactcggcccagacgcaattttcttctctgcaaaatcgtcataagaataatcacttgtcagggtagctgcgggcatcccattcgttcctttcatcagcgccgggcatatggggcgtcagaggctgagaacgttgccgtgaagaggcttaaaagcaagacccggagtggcgaccttaaagaggacggactgaagaaacgcgggaatgagctccagacgcgggagtttcctctctacaaagttacactgcagcagctgtctaccctgccccttgtcttttgagaagttcaaaccttcagaaaagttgcaagaacacgaggctaaaggcagcagttcactatactgtgggttgtctttgcgaggaagttgcattggacaaagagatgcagttcagcaaacagaccattgcggccatttcggagctgactttccgacagtgtgaaaattttgccaaagaccttgaaatgtttgcaagacatgcgaaaagaaccacaattaacactgaagatgtgaagctcttagccaggaggagtaattcactgctaaaatacatcacagacaaaagtgaagagattgctcagattaacctagaacgaaaagcacagaagaaaa

SEQ ID NO: 108333 - DNA, 584 bp, Homo sapiens
  Payload ID: 1287
  Gene Symbol: APITD1
  Gene Name: apoptosis-inducing, TAF9-like domain 1
  ENST ID: ENST00000462462
  CDS Start-End: 168-317
cgtcataagaataatcacttgtcagggtagctgcgggcatcccattcgttcctttcatcagcgccgggcatatggggcgtcagaggctgagaacgttgccgtgaagaggcttaaaagcaagacccggagtggcgaccttaaagaggacggactgaagaaacgcgggaatgagctccagacgcgggagtttcctctctacaaagttacactgcagcagctgtctaccctgccccttgtcttttgagaagttcaaaccttcagaaaagttgcaagaacacgacatgcgaaaagaaccacaattaacactgaagatgtgaagctcttagccaggaggagtaattcactgctaaaatacatcacagacaaaagtgaagagattgctcagattaacctagaacgaaaagcacagaagaaaaagaagtcagaggatggaagcaaaaattcaaggcagccagcagaggctggagtggtggaaagtgagaattaaagtccctcgccgcttggaaagtgcagccttctacaggtagagccacctagaaatgcatatggctgcaaaggaaactttgaagggttaaatagagatt

SEQ ID NO: 108334 - DNA, 4935 bp, Homo sapiens
  Payload ID: 1288
  Gene Symbol: ACIN1
  Gene Name: apoptotic chromatin condensation inducer 1
  Uniprot ID: Q9UKV3
  ENST ID: ENST00000262710
  CDS Start-End: 329-4354
cttttctctcgaagggcacccgaagattgtcacgagtccttagactccaactactgcggcagcttccaaatttcctgaaaaccctaagctgggccagcccggcagcccacgcacttccggcctcggacccgccccaaacacccaagcgccccagcgcctcatctctaggtccggaaataaacgaacatctccgattatggttataccagggtcgagggtttccgaatatattcgattcaaagcttcggcaagacgaagaaaaccgagcctgaaagcagggcgagaaaaggggcgctgcagggcggatggaaagaattgattggtaacgatgtggagacggaaacatccgaggacatccggaggaacccggggagttctgagtggtaatcgaggggtagagtatggcagtgggcggggtcatctcggtacgttcgaagggcgttggcggaaattaccgaagatgcccgaagccgtcgggacggacccgagtacctcacgcaagatggcggagctggaggaggtgactctggacgggaagcctcttcaggcgctgcgggtgaccgacctgaaggccgcactggagcagcgaggcctagccaagagcgggcagaagagtgccctggtcaagcggctcaaaggggctctaatgctagaaaatttacagaaacactcaacaccccatgctgcattccagccaaattcccagattggtgaggaaatgagccagaacagtttcataaaacagtatctggaaaagcagcaggagctacttaggcagcgtctggaacgtgaagctcgagaagctgcagaacttgaagaagcttcagctgagtcggaggacgagatgatccatcctgagggagtggcttccctgctgcctcctgactttcagagcagcctggagagaccagagctggagctcagcagacattcgcccagaaaaagctcctcaatttctgaagagaaaggtgactctgatgatgagaaaccaaggaaaggagaaagacgatcatctagggtcagacaggcaagagcagctaaactgtctgagggcagccaacctgctgaggaggaagaggatcaagaaacaccttccagaaacctaagggtcagagcagatcgaaatttgaaaacagaggaggaagaagaggaggaggaggaggaggaagaagatgatgaagaagaggaaggtgatgatgagggacaaaaatctagggaggcaccaatcctgaaagagtttaaggaagaaggggaagagatacctagagtaaaaccagaggagatgatggatgagagacccaaaacaagatcccaggaacaggaggtgttagagagaggagggagatttacaagatcccaggaagaggctagaaaaagtcatctggccagacagcagcaggagaaggaaatgaaaacaacatctccccttgaggaggaagaaagagaaataaaatcttcacaaggcttaaaggaaaaatcgaagtctccttcccctcctcgactgactgaagatcgaaagaaggcctcacttgtagcgctgccagagcaaactgccagcgaggaggagactcctccacctttactaacaaaggaagcatcttctccaccacctcatccacagctccatagcgaagaagaaatagagcccatggaaggcccagcccccgctgtcctcattcagttatctcctcctaatacagatgctgacaccagggagctattagtatctcagcatactgtccagttggtaggaggcctgtctcctttgtcaagtccttcagacaccaaagcagaatctccagcagagaaagtgccagaggagagtgtcctgcctctggttcagaaaagcacactggctgactactcagcccagaaggatcttgaacctgagtcagacagatctgctcagcccctccctctaaaaattgaggaattagcactggccaaaggaatcactgaagaatgtctgaaacagccatctttggaacagaaggaaggcagaagagcttctcatacccttctcccaagccacagattgaaacagtcagctgattcatcctctagccggtcctcctcatcttcctcctccagttctagatcaagatctcgctctcctgacagttcaggttctcggtctcattcaccgctcagatccaagcagagagatgtagcccaggcacgtactcatgccaaccctcgtggtagacccaagatgggctccagatcaacatcagagtccagatcaaggtcacgttcacgttctcgttcagcatcaagcaacagcagaaaatctctgagccctggagtctccagggacagcagcaccagctatactgaaaccaaagatccctcttctggtcaggaggttgcaactccaccagtgccacaactgcaggtctgtgagccaaaggagaggacttccacctcctcatcctctgtccaagcaaggcgtctgagtcagcctgaatcagctgaaaagcatgtgacccagaggttacagcctgagcgggggagcccaaagaagtgtgaagctgaagaggcagagccaccagctgccacacagccccaaacctcagagactcagacctctcatctgccagaatcagaaagaattcatcacactgttgaggagaaggaggaagtgaccatggacacaagtgaaaacagacctgaaaatgatgttccagaacctcccatgcctattgcagaccaagtcagcaatgatgaccgcccggagggcagtgttgaagatgaggagaagaaagagagctcgctgcccaaatcattcaagaggaagatctccgttgtctcagctaccaagggggtgccagctggaaacagtgacacagaggggggccagcctggtcggaaacgacgctggggagccagcacagccaccacacagaagaaaccttccatcagtatcaccactgaatcactaaagagcctcatccccgacatcaaacccctggcggggcaggaggctgttgtggatcttcatgctgatgactctcgcatctctgaggatgagacagagcgtaatggcgatgatgggacccatgacaaggggctgaaaatatgccggacagtcactcaggtagtacctgcagagggccaggagaatgggcagagggaagaagaggaagaagagaaggaacctgaagcagaacctcctgtacctccccaggtgtcagtagaggtggccttgcccccacctgcagagcatgaagtaaagaaagtgactttaggagataccttaactcgacgttccattagccagcagaagtccggagtttccattaccattgatgacccagtccgaactgcccaggtgccctccccaccccggggcaagattagcaacattgtccatatctccaatttggtccgtcctttcactttaggccagctaaaggagttgttggggcgcacaggaaccttggtggaagaggccttctggattgacaagatcaaatctcattgctttgtaacgtactcaacagtagaggaagctgttgccacccgcacagctctgcacggggtcaaatggccccagtccaatcccaaattcctttgtgctgactatgccgagcaagatgagctggattatcaccgaggcctcttggtggaccgtccctctgaaactaagacagaggagcagggaataccacggcccctgcaccccccacccccacccccggtccagccaccacagcacccccgggcagagcagcgggagcaggaacgggcagtgcgggaacagtgggcagaacgggaacgggaaatggagcggcgggagcggactcgatcagagcgtgaatgggatcgggacaaagttcgagaagggccccgttcccgatcaaggtcccgtgaccgccgccgcaaggaacgtgcgaagtctaaagaaaagaagagtgagaagaaagagaaagcccaggaggaaccacctgccaagctgctggatgaccttttccgaaagaccaaggcagctccctgcatctattggctcccactgactgacagccagatcgttcagaaagaggcagagcgggccgaacgggccaaggagcgggagaagcggcgaaaggagcaagaagaagaagagcaaaaggagcgggagaaggaagccgagcgggaacggaaccgacagctggagcgagagaaacgtcgggagcacagtcgggagagggacagggagagagagagagaaagggagcgggacaggggggaccgagatcgggatagggaaagggaccgagaacgaggcagggaaagggatcgcagggacaccaagcgccacagcagaagccggagtcggagcacacctgtgcgggaccggggtgggcgccgctagctgggaaaacactagagctgcaggtaccagccactcggccccagggggttatggccacagagggataggcacagtctccaccaccctggagccaagggtctttcacatcacctatccctacatacataccaaatggaaaagtggccatccttttccccccaaacacacccccttaacctatctcttgggacttagcccgaccctccctctcatttcccattaagtctgagaggcaagagctaggttaggcaaggaggtggttggccagagatggggaacagccaggtgccccagtcctctgatttttcctccatcctgcttaccacctccctgggtacttacagccttctcttgggaacagccggggccaggactgggtcacctatgagctgaatcagcatctcctcctgagtcccagggcccctgcagttcccagtctcttctgtcctgcagcccttgcctctttcccacaggttccactttatatccaccttttccttttgttcaatttttatttttattttttttattattaaatgatgtggtctatggaaaaaaaaataaaaatctgacttagtttt

SEQ ID NO: 108335 - DNA, 2445 bp, Homo sapiens
  Payload ID: 1288
  Gene Symbol: ACIN1
  Gene Name: apoptotic chromatin condensation inducer 1
  Uniprot ID: Q9UKV3
  ENST ID: ENST00000338631
  CDS Start-End: 20-1864
ggcaagatggctcccctgcatgtctccggctgatcgctgccgctccgccaatacaatagagccagccactaccagcagcctggccctcttcctccttctccagagagaccaatccagccgaactcggggtttgcctgaggagaaggaggaagtgaccatggacacaagtgaaaacagacctgaaaatgatgttccagaacctcccatgcctattgcagaccaagtcagcaatgatgaccgcccggagggcagtgttgaagatgaggagaagaaagagagctcgctgcccaaatcattcaagaggaagatctccgttgtctcagctaccaagggggtgccagctggaaacagtgacacagaggggggccagcctggtcggaaacgacgctggggagccagcacagccaccacacagaagaaaccttccatcagtatcaccactgaatcactaaagagcctcatccccgacatcaaacccctggcggggcaggaggctgttgtggatcttcatgctgatgactctcgcatctctgaggatgagacagagcgtaatggcgatgatgggacccatgacaaggggctgaaaatatgccggacagtcactcaggtagtacctgcagagggccaggagaatgggcagagggaagaagaggaagaagagaaggaacctgaagcagaacctcctgtacctccccaggtgtcagtagaggtggccttgcccccacctgcagagcatgaagtaaagaaagtgactttaggagataccttaactcgacgttccattagccagcagaagtccggagtttccattaccattgatgacccagtccgaactgcccaggtgccctccccaccccggggcaagattagcaacattgtccatatctccaatttggtccgtcctttcactttaggccagctaaaggagttgttggggcgcacaggaaccttggtggaagaggccttctggattgacaagatcaaatctcattgctttgtaacgtactcaacagtagaggaagctgttgccacccgcacagctctgcacggggtcaaatggccccagtccaatcccaaattcctttgtgctgactatgccgagcaagatgagctggattatcaccgaggcctcttggtggaccgtccctctgaaactaagacagaggagcagggaataccacggcccctgcaccccccacccccacccccggtccagccaccacagcacccccgggcagagcagcgggagcaggaacgggcagtgcgggaacagtgggcagaacgggaacgggaaatggagcggcgggagcggactcgatcagagcgtgaatgggatcgggacaaagttcgagaagggccccgttcccgatcaaggtcccgtgaccgccgccgcaaggaacgtgcgaagtctaaagaaaagaagagtgagaagaaagagaaagcccaggaggaaccacctgccaagctgctggatgaccttttccgaaagaccaaggcagctccctgcatctattggctcccactgactgacagccagatcgttcagaaagaggcagagcgggccgaacgggccaaggagcgggagaagcggcgaaaggagcaagaagaagaagagcaaaaggagcgggagaaggaagccgagcgggaacggaaccgacagctggagcgagagaaacgtcgggagcacagtcgggagagggacagggagagagagagagaaagggagcgggacaggggggaccgagatcgggatagggaaagggaccgagaacgaggcagggaaagggatcgcagggacaccaagcgccacagcagaagccggagtcggagcacacctgtgcgggaccggggtgggcgccgctagctgggaaaacactagagctgcaggtaccagccactcggccccagggggttatggccacagagggataggcacagtctccaccaccctggagccaagggtctttcacatcacctatccctacatacataccaaatggaaaagtggccatccttttccccccaaacacacccccttaacctatctcttgggacttagcccgaccctccctctcatttcccattaagtctgagaggcaagagctaggttaggcaaggaggtggttggccagagatggggaacagccaggtgccccagtcctctgatttttcctccatcctgcttaccacctccctgggtacttacagccttctcttgggaacagccggggccaggactgggtcacctatgagctgaatcagcatctcctcctgagtcccagggcccctgcagttcccagtctcttctgtcctgcagcccttgcctctttcccacaggttccactttatatccaccttttccttttgttcaatttttatttttattttttttattattaaatgatgtggtctatggaaaaaaaaataaaaatctgacttagtttt

SEQ ID NO: 108336 - DNA, 2563 bp, Homo sapiens
  Payload ID: 1288
  Gene Symbol: ACIN1
  Gene Name: apoptotic chromatin condensation inducer 1
  Uniprot ID: Q9UKV3
  ENST ID: ENST00000357481
  CDS Start-End: 231-1982
ctcccctgctgcagcaaggccctcccccatccgcacacacaggctgctgggtaagtggcaagatggctcccctgcatgtctccggctgatcgctgccgctccgccaatacaatagagccagccactaccagcagcctggccctcttcctccttctccagagagaccaatccagccgaactcggggtttgccaaagggataaacagcacttccagggggagaaaaaaaatcatgttatcagaaagcaaagaaggtgaggagaaggaggaagtgaccatggacacaagtgaaaacagacctgaaaatgatgttccagaacctcccatgcctattgcagaccaagtcagcaatgatgaccgcccggagggcagtgttgaagatgaggagaagaaagagagctcgctgcccaaatcattcaagaggaagatctccgttgtctcagctaccaagggggtgccagctggaaacagtgacacagaggggggccagcctggtcggaaacgacgctggggagccagcacagccaccacacagaagaaaccttccatcagtatcaccactgaatcactaaagagcctcatccccgacatcaaacccctggcggggcaggaggctgttgtggatcttcatgctgatgactctcgcatctctgaggatgagacagagcgtaatggcgatgatgggacccatgacaaggggctgaaaatatgccggacagtcactcaggtagtacctgcagagggccaggagaatgggcagagggaagaagaggaagaagagaaggaacctgaagcagaacctcctgtacctccccaggtgtcagtagaggtggccttgcccccacctgcagagcatgaagtaaagaaagtgactttaggagataccttaactcgacgttccattagccagcagaagtccggagtttccattaccattgatgacccagtccgaactgcccaggtgccctccccaccccggggcaagattagcaacattgtccatatctccaatttggtccgtcctttcactttaggccagctaaaggagttgttggggcgcacaggaaccttggtggaagaggccttctggattgacaagatcaaatctcattgctttgtaacgtactcaacagtagaggaagctgttgccacccgcacagctctgcacggggtcaaatggccccagtccaatcccaaattcctttgtgctgactatgccgagcaagatgagctggattatcaccgaggcctcttggtggaccgtccctctgaaactaagacagaggagcagggaataccacggcccctgcaccccccacccccacccccggtccagccaccacagcacccccgggcagagcagcgggagcaggaacgggcagtgcgggaacagtgggcagaacgggaacgggaaatggagcggcgggagcggactcgatcagagcgtgaatgggatcgggacaaagttcgagaagggccccgttcccgatcaaggtcccgtgaccgccgccgcaaggaacgtgcgaagtctaaagaaaagaagagtgagaagaaagagaaagcccaggaggaaccacctgccaagctgctggatgaccttttccgaaagaccaaggcagctccctgcatctattggctcccactgactgacagccagatcgttcagaaagaggcagagcgggccgaacgggccaaggagcgggagaagcggcgaaaggagcaagaagaagaagagcaaaaggagcgggagaaggaagccgagcgggaacggaaccgacagctggagcgagagaaacgtcgggagcacagtcgggagagggacagggagagagagagagaaagggagcgggacaggggggaccgagatcgggatagggaaagggaccgagaacgaggcagggaaagggatcgcagggacaccaagcgccacagcagaagccggagtcggagcacacctgtgcgggaccggggtgggcgccgctagctgggaaaacactagagctgcaggtaccagccactcggccccagggggttatggccacagagggataggcacagtctccaccaccctggagccaagggtctttcacatcacctatccctacatacataccaaatggaaaagtggccatccttttccccccaaacacacccccttaacctatctcttgggacttagcccgaccctccctctcatttcccattaagtctgagaggcaagagctaggttaggcaaggaggtggttggccagagatggggaacagccaggtgccccagtcctctgatttttcctccatcctgcttaccacctccctgggtacttacagccttctcttgggaacagccggggccaggactgggtcacctatgagctgaatcagcatctcctcctgagtcccagggcccctgcagttcccagtctcttctgtcctgcagcccttgcctctttcccacaggttccactttatatccaccttttccttttgttcaatttttatttttattttttttattattaaatgatgtggtctatggaaaaaaaaataaaaatctgacttagtttt

SEQ ID NO: 108337 - DNA, 2738 bp, Homo sapiens
  Payload ID: 1288
  Gene Symbol: ACIN1
  Gene Name: apoptotic chromatin condensation inducer 1
  Uniprot ID: Q9UKV3
  ENST ID: ENST00000397341
  CDS Start-End: 419-2170
aagtggcaagatggctcccctgcatgtctccggctgatcgctgccgctccgccaatacaatagagccagccactaccagcagcctggccctcttcctccttctccagagagaccaatccagccgaactcggggtttgccgtgaggacttaacgcttatctcttaaaagccagatctgttttagcctccccgcaccaccaccacctccccttccatttaccattttttggatccccggttgctacatctcaattttctctctctggatcgggtggctggggaggaggtggtgggatcttggaacaaggaaggtgtggttttttttctttattttttttaggattttttttgtttggtttttgttatttcttccattccagaaagggataaacagcacttccagggggagaaaaaaaatcatgttatcagaaagcaaagaaggtgaggagaaggaggaagtgaccatggacacaagtgaaaacagacctgaaaatgatgttccagaacctcccatgcctattgcagaccaagtcagcaatgatgaccgcccggagggcagtgttgaagatgaggagaagaaagagagctcgctgcccaaatcattcaagaggaagatctccgttgtctcagctaccaagggggtgccagctggaaacagtgacacagaggggggccagcctggtcggaaacgacgctggggagccagcacagccaccacacagaagaaaccttccatcagtatcaccactgaatcactaaagagcctcatccccgacatcaaacccctggcggggcaggaggctgttgtggatcttcatgctgatgactctcgcatctctgaggatgagacagagcgtaatggcgatgatgggacccatgacaaggggctgaaaatatgccggacagtcactcaggtagtacctgcagagggccaggagaatgggcagagggaagaagaggaagaagagaaggaacctgaagcagaacctcctgtacctccccaggtgtcagtagaggtggccttgcccccacctgcagagcatgaagtaaagaaagtgactttaggagataccttaactcgacgttccattagccagcagaagtccggagtttccattaccattgatgacccagtccgaactgcccaggtgccctccccaccccggggcaagattagcaacattgtccatatctccaatttggtccgtcctttcactttaggccagctaaaggagttgttggggcgcacaggaaccttggtggaagaggccttctggattgacaagatcaaatctcattgctttgtaacgtactcaacagtagaggaagctgttgccacccgcacagctctgcacggggtcaaatggccccagtccaatcccaaattcctttgtgctgactatgccgagcaagatgagctggattatcaccgaggcctcttggtggaccgtccctctgaaactaagacagaggagcagggaataccacggcccctgcaccccccacccccacccccggtccagccaccacagcacccccgggcagagcagcgggagcaggaacgggcagtgcgggaacagtgggcagaacgggaacgggaaatggagcggcgggagcggactcgatcagagcgtgaatgggatcgggacaaagttcgagaagggccccgttcccgatcaaggtcccgtgaccgccgccgcaaggaacgtgcgaagtctaaagaaaagaagagtgagaagaaagagaaagcccaggaggaaccacctgccaagctgctggatgaccttttccgaaagaccaaggcagctccctgcatctattggctcccactgactgacagccagatcgttcagaaagaggcagagcgggccgaacgggccaaggagcgggagaagcggcgaaaggagcaagaagaagaagagcaaaaggagcgggagaaggaagccgagcgggaacggaaccgacagctggagcgagagaaacgtcgggagcacagtcgggagagggacagggagagagagagagaaagggagcgggacaggggggaccgagatcgggatagggaaagggaccgagaacgaggcagggaaagggatcgcagggacaccaagcgccacagcagaagccggagtcggagcacacctgtgcgggaccggggtgggcgccgctagctgggaaaacactagagctgcaggtaccagccactcggccccagggggttatggccacagagggataggcacagtctccaccaccctggagccaagggtctttcacatcacctatccctacatacataccaaatggaaaagtggccatccttttccccccaaacacacccccttaacctatctcttgggacttagcccgaccctccctctcatttcccattaagtctgagaggcaagagctaggttaggcaaggaggtggttggccagagatggggaacagccaggtgccccagtcctctgatttttcctccatcctgcttaccacctccctgggtacttacagccttctcttgggaacagccggggccaggactgggtcacctatgagctgaatcagcatctcctcctgagtcccagggcccctgcagttcccagtctcttctgtcctgcagcccttgcctctttcccacaggttccactttatatccaccttttccttttgttcaatttttatttttattttttttattattaaatgatgtggtctatggaaaaaaaaataaaaat

SEQ ID NO: 108338 - DNA, 4815 bp, Homo sapiens
  Payload ID: 1288
  Gene Symbol: ACIN1
  Gene Name: apoptotic chromatin condensation inducer 1
  ENST ID: ENST00000457657
  CDS Start-End: 329-4234
cttttctctcgaagggcacccgaagattgtcacgagtccttagactccaactactgcggcagcttccaaatttcctgaaaaccctaagctgggccagcccggcagcccacgcacttccggcctcggacccgccccaaacacccaagcgccccagcgcctcatctctaggtccggaaataaacgaacatctccgattatggttataccagggtcgagggtttccgaatatattcgattcaaagcttcggcaagacgaagaaaaccgagcctgaaagcagggcgagaaaaggggcgctgcagggcggatggaaagaattgattggtaacgatgtggagacggaaacatccgaggacatccggaggaacccggggagttctgagtggtaatcgaggggtagagtatggcagtgggcggggtcatctcggtacgttcgaagggcgttggcggaaattaccgaagatgcccgaagccgtcgggacggacccgagtacctcacgcaagatggcggagctggaggaggtgactctggacgggaagcctcttcaggcgctgcgggtgaccgacctgaaggccgcactggagcagcgaggcctagccaagagcgggcagaagagtgccctggtcaagcggctcaaaggggctctaatgctagaaaatttacagaaacactcaacaccccatgctgcattccagccaaattcccagattggtgaggaaatgagccagaacagtttcataaaacagtatctggaaaagcagcaggagctacttaggcagcgtctggaacgtgaagctcgagaagctgcagaacttgaaggaaaaagctcctcaatttctgaagagaaaggtgactctgatgatgagaaaccaaggaaaggagaaagacgatcatctagggtcagacaggcaagagcagctaaactgtctgagggcagccaacctgctgaggaggaagaggatcaagaaacaccttccagaaacctaagggtcagagcagatcgaaatttgaaaacagaggaggaagaagaggaggaggaggaggaggaagaagatgatgaagaagaggaaggtgatgatgagggacaaaaatctagggaggcaccaatcctgaaagagtttaaggaagaaggggaagagatacctagagtaaaaccagaggagatgatggatgagagacccaaaacaagatcccaggaacaggaggtgttagagagaggagggagatttacaagatcccaggaagaggctagaaaaagtcatctggccagacagcagcaggagaaggaaatgaaaacaacatctccccttgaggaggaagaaagagaaataaaatcttcacaaggcttaaaggaaaaatcgaagtctccttcccctcctcgactgactgaagatcgaaagaaggcctcacttgtagcgctgccagagcaaactgccagcgaggaggagactcctccacctttactaacaaaggaagcatcttctccaccacctcatccacagctccatagcgaagaagaaatagagcccatggaaggcccagcccccgctgtcctcattcagttatctcctcctaatacagatgctgacaccagggagctattagtatctcagcatactgtccagttggtaggaggcctgtctcctttgtcaagtccttcagacaccaaagcagaatctccagcagagaaagtgccagaggagagtgtcctgcctctggttcagaaaagcacactggctgactactcagcccagaaggatcttgaacctgagtcagacagatctgctcagcccctccctctaaaaattgaggaattagcactggccaaaggaatcactgaagaatgtctgaaacagccatctttggaacagaaggaaggcagaagagcttctcatacccttctcccaagccacagattgaaacagtcagctgattcatcctctagccggtcctcctcatcttcctcctccagttctagatcaagatctcgctctcctgacagttcaggttctcggtctcattcaccgctcagatccaagcagagagatgtagcccaggcacgtactcatgccaaccctcgtggtagacccaagatgggctccagatcaacatcagagtccagatcaaggtcacgttcacgttctcgttcagcatcaagcaacagcagaaaatctctgagccctggagtctccagggacagcagcaccagctatactgaaaccaaagatccctcttctggtcaggaggttgcaactccaccagtgccacaactgcaggtctgtgagccaaaggagaggacttccacctcctcatcctctgtccaagcaaggcgtctgagtcagcctgaatcagctgaaaagcatgtgacccagaggttacagcctgagcgggggagcccaaagaagtgtgaagctgaagaggcagagccaccagctgccacacagccccaaacctcagagactcagacctctcatctgccagaatcagaaagaattcatcacactgttgaggagaaggaggaagtgaccatggacacaagtgaaaacagacctgaaaatgatgttccagaacctcccatgcctattgcagaccaagtcagcaatgatgaccgcccggagggcagtgttgaagatgaggagaagaaagagagctcgctgcccaaatcattcaagaggaagatctccgttgtctcagctaccaagggggtgccagctggaaacagtgacacagaggggggccagcctggtcggaaacgacgctggggagccagcacagccaccacacagaagaaaccttccatcagtatcaccactgaatcactaaagagcctcatccccgacatcaaacccctggcggggcaggaggctgttgtggatcttcatgctgatgactctcgcatctctgaggatgagacagagcgtaatggcgatgatgggacccatgacaaggggctgaaaatatgccggacagtcactcaggtagtacctgcagagggccaggagaatgggcagagggaagaagaggaagaagagaaggaacctgaagcagaacctcctgtacctccccaggtgtcagtagaggtggccttgcccccacctgcagagcatgaagtaaagaaagtgactttaggagataccttaactcgacgttccattagccagcagaagtccggagtttccattaccattgatgacccagtccgaactgcccaggtgccctccccaccccggggcaagattagcaacattgtccatatctccaatttggtccgtcctttcactttaggccagctaaaggagttgttggggcgcacaggaaccttggtggaagaggccttctggattgacaagatcaaatctcattgctttgtaacgtactcaacagtagaggaagctgttgccacccgcacagctctgcacggggtcaaatggccccagtccaatcccaaattcctttgtgctgactatgccgagcaagatgagctggattatcaccgaggcctcttggtggaccgtccctctgaaactaagacagaggagcagggaataccacggcccctgcaccccccacccccacccccggtccagccaccacagcacccccgggcagagcagcgggagcaggaacgggcagtgcgggaacagtgggcagaacgggaacgggaaatggagcggcgggagcggactcgatcagagcgtgaatgggatcgggacaaagttcgagaagggccccgttcccgatcaaggtcccgtgaccgccgccgcaaggaacgtgcgaagtctaaagaaaagaagagtgagaagaaagagaaagcccaggaggaaccacctgccaagctgctggatgaccttttccgaaagaccaaggcagctccctgcatctattggctcccactgactgacagccagatcgttcagaaagaggcagagcgggccgaacgggccaaggagcgggagaagcggcgaaaggagcaagaagaagaagagcaaaaggagcgggagaaggaagccgagcgggaacggaaccgacagctggagcgagagaaacgtcgggagcacagtcgggagagggacagggagagagagagagaaagggagcgggacaggggggaccgagatcgggatagggaaagggaccgagaacgaggcagggaaagggatcgcagggacaccaagcgccacagcagaagccggagtcggagcacacctgtgcgggaccggggtgggcgccgctagctgggaaaacactagagctgcaggtaccagccactcggccccagggggttatggccacagagggataggcacagtctccaccaccctggagccaagggtctttcacatcacctatccctacatacataccaaatggaaaagtggccatccttttccccccaaacacacccccttaacctatctcttgggacttagcccgaccctccctctcatttcccattaagtctgagaggcaagagctaggttaggcaaggaggtggttggccagagatggggaacagccaggtgccccagtcctctgatttttcctccatcctgcttaccacctccctgggtacttacagccttctcttgggaacagccggggccaggactgggtcacctatgagctgaatcagcatctcctcctgagtcccagggcccctgcagttcccagtctcttctgtcctgcagcccttgcctctttcccacaggttccactttatatccaccttttccttttgttcaatttttatttttattttttttattattaaatgatgtggtctatggaaaaaaaaataaaaatctgacttagtttt

SEQ ID NO: 108339 - DNA, 2751 bp, Homo sapiens
  Payload ID: 1288
  Gene Symbol: ACIN1
  Gene Name: apoptotic chromatin condensation inducer 1
  ENST ID: ENST00000557515
  CDS Start-End: 419-2167
aagtggcaagatggctcccctgcatgtctccggctgatcgctgccgctccgccaatacaatagagccagccactaccagcagcctggccctcttcctccttctccagagagaccaatccagccgaactcggggtttgccgtgaggacttaacgcttatctcttaaaagccagatctgttttagcctccccgcaccaccaccacctccccttccatttaccattttttggatccccggttgctacatctcaattttctctctctggatcgggtggctggggaggaggtggtgggatcttggaacaaggaaggtgtggttttttttctttattttttttaggattttttttgtttggtttttgttatttcttccattccagaaagggataaacagcacttccagggggagaaaaaaaatcatgttatcagaaagcaaagaaggtgaggagaaggaggaagtgaccatggacacaagtgaaaacagacctgaaaatgatgttccagaacctcccatgcctattgcagaccaagtcagcaatgatgaccgcccggagggcagtgttgaagatgaggagaagaaagagagctcgctgcccaaatcattcaagaggaagatctccgttgtctctaccaagggggtgccagctggaaacagtgacacagaggggggccagcctggtcggaaacgacgctggggagccagcacagccaccacacagaagaaaccttccatcagtatcaccactgaatcactaaagagcctcatccccgacatcaaacccctggcggggcaggaggctgttgtggatcttcatgctgatgactctcgcatctctgaggatgagacagagcgtaatggcgatgatgggacccatgacaaggggctgaaaatatgccggacagtcactcaggtagtacctgcagagggccaggagaatgggcagagggaagaagaggaagaagagaaggaacctgaagcagaacctcctgtacctccccaggtgtcagtagaggtggccttgcccccacctgcagagcatgaagtaaagaaagtgactttaggagataccttaactcgacgttccattagccagcagaagtccggagtttccattaccattgatgacccagtccgaactgcccaggtgccctccccaccccggggcaagattagcaacattgtccatatctccaatttggtccgtcctttcactttaggccagctaaaggagttgttggggcgcacaggaaccttggtggaagaggccttctggattgacaagatcaaatctcattgctttgtaacgtactcaacagtagaggaagctgttgccacccgcacagctctgcacggggtcaaatggccccagtccaatcccaaattcctttgtgctgactatgccgagcaagatgagctggattatcaccgaggcctcttggtggaccgtccctctgaaactaagacagaggagcagggaataccacggcccctgcaccccccacccccacccccggtccagccaccacagcacccccgggcagagcagcgggagcaggaacgggcagtgcgggaacagtgggcagaacgggaacgggaaatggagcggcgggagcggactcgatcagagcgtgaatgggatcgggacaaagttcgagaagggccccgttcccgatcaaggtcccgtgaccgccgccgcaaggaacgtgcgaagtctaaagaaaagaagagtgagaagaaagagaaagcccaggaggaaccacctgccaagctgctggatgaccttttccgaaagaccaaggcagctccctgcatctattggctcccactgactgacagccagatcgttcagaaagaggcagagcgggccgaacgggccaaggagcgggagaagcggcgaaaggagcaagaagaagaagagcaaaaggagcgggagaaggaagccgagcgggaacggaaccgacagctggagcgagagaaacgtcgggagcacagtcgggagagggacagggagagagagagagaaagggagcgggacaggggggaccgagatcgggatagggaaagggaccgagaacgaggcagggaaagggatcgcagggacaccaagcgccacagcagaagccggagtcggagcacacctgtgcgggaccggggtgggcgccgctagctgggaaaacactagagctgcaggtaccagccactcggccccagggggttatggccacagagggataggcacagtctccaccaccctggagccaagggtctttcacatcacctatccctacatacataccaaatggaaaagtggccatccttttccccccaaacacacccccttaacctatctcttgggacttagcccgaccctccctctcatttcccattaagtctgagaggcaagagctaggttaggcaaggaggtggttggccagagatggggaacagccaggtgccccagtcctctgatttttcctccatcctgcttaccacctccctgggtacttacagccttctcttgggaacagccggggccaggactgggtcacctatgagctgaatcagcatctcctcctgagtcccagggcccctgcagttcccagtctcttctgtcctgcagcccttgcctctttcccacaggttccactttatatccaccttttccttttgttcaatttttatttttattttttttattattaaatgatgtggtctatggaaaaaaaaataaaaatctgacttagttttaaa

SEQ ID NO: 108340 - DNA, 4173 bp, Homo sapiens
  Payload ID: 1288
  Gene Symbol: ACIN1
  Gene Name: apoptotic chromatin condensation inducer 1
  Uniprot ID: Q9UKV3
  ENST ID: ENST00000555053
  CDS Start-End: 98-4084
tcgattcaaagcttcggcaagacgaagaaaaccgagcctgaaagcagggcgagaaaaggggcgctgcagggcggatggaaagaattgattggtaacgatgtggagacggaaacatccgaggacatccggaggaacccggggagttctgagtggtaatcgaggggtagagtatggcagtgggcggggtcatctcggtacgttcgaagggcgttggcggaaattaccgaagatgcccgaagccgtcgggacggacccgagtacctcacgcaagatggcggagctggaggaggtgactctggacgggaagcctcttcaggcgctgcgggtgaccgacctgaaggccgcactggagcagcgaggcctagccaagagcgggcagaagagtgccctggtcaagcggctcaaaggggctctaatgctagaaaatttacagaaacactcaacaccccatgctgcattccagccaaattcccagattggtgaggaaatgagccagaacagtttcataaaacagtatctggaaaagcagcaggagctacttaggcagcgtctggaacgtgaagctcgagaagctgcagaacttgaagaagcttcagctgagtcggaggacgagatgatccatcctgagggagtggcttccctgctgcctcctgactttcagagcagcctggagagaccagagctggagctcagcagacattcgcccagaaaaagctcctcaatttctgaagagaaaggtgactctgatgatgagaaaccaaggaaaggagaaagacgatcatctagggtcagacaggcaagagcagctaaactgtctgagggcagccaacctgctgaggaggaagaggatcaagaaacaccttccagaaacctaagggtcagagcagatcgaaatttgaaaacagaggaggaagaagaggaggaggaggaggaggaagaagatgatgaagaagaggaaggtgatgatgagggacaaaaatctagggaggcaccaatcctgaaagagtttaaggaagaaggggaagagatacctagagtaaaaccagaggagatgatggatgagagacccaaaacaagatcccaggaacaggaggtgttagagagaggagggagatttacaagatcccaggaagaggctagaaaaagtcatctggccagacagcagcaggagaaggaaatgaaaacaacatctccccttgaggaggaagaaagagaaataaaatcttcacaaggcttaaaggaaaaatcgaagtctccttcccctcctcgactgactgaagatcgaaagaaggcctcacttgtagcgctgccagagcaaactgccagcgaggaggagactcctccacctttactaacaaaggaagcatcttctccaccacctcatccacagctccatagcgaagaagaaatagagcccatggaaggcccagcccccgctgtcctcattcagttatctcctcctaatacagatgctgacaccagggagctattagtatctcagcatactgtccagttggtaggaggcctgtctcctttgtcaagtccttcagacaccaaagcagaatctccagcagagaaagtgccagaggagagtgtcctgcctctggttcagaaaagcacactggctgactactcagcccagaaggatcttgaacctgagtcagacagatctgctcagcccctccctctaaaaattgaggaattagcactggccaaaggaatcactgaagaatgtctgaaacagccatctttggaacagaaggaaggcagaagagcttctcatacccttctcccaagccacagattgaaacagtcagctgattcatcctctagccggtcctcctcatcttcctcctccagttctagatcaagatctcgctctcctgacagttcaggttctcggtctcattcaccgctcagatccaagcagagagatgtagcccaggcacgtactcatgccaaccctcgtggtagacccaagatgggctccagatcaacatcagagtccagatcaaggtcacgttcacgttctcgttcagcatcaagcaacagcagaaaatctctgagccctggagtctccagggacagcagcaccagctatactgaaaccaaagatccctcttctggtcaggaggttgcaactccaccagtgccacaactgcaggtctgtgagccaaaggagaggacttccacctcctcatcctctgtccaagcaaggcgtctgagtcagcctgaatcagctgaaaagcatgtgacccagaggttacagcctgagcgggggagcccaaagaagtgtgaagctgaagaggcagagccaccagctgccacacagccccaaacctcagagactcagacctctcatctgccagaatcagaaagaattcatcacactgttgaggagaaggaggaagtgaccatggacacaagtgaaaacagacctgaaaatgatgttccagaacctcccatgcctattgcagaccaagtcagcaatgatgaccgcccggagggcagtgttgaagatgaggagaagaaagagagctcgctgcccaaatcattcaagaggaagatctccgttgtctctaccaagggggtgccagctggaaacagtgacacagaggggggccagcctggtcggaaacgacgctggggagccagcacagccaccacacagaagaaaccttccatcagtatcaccactgaatcactaaaggaggctgttgtggatcttcatgctgatgactctcgcatctctgaggatgagacagagcgtaatggcgatgatgggacccatgacaaggggctgaaaatatgccggacagtcactcaggtagtacctgcagagggccaggagaatgggcagagggaagaagaggaagaagagaaggaacctgaagcagaacctcctgtacctccccaggtgtcagtagaggtggccttgcccccacctgcagagcatgaagtaaagaaagtgactttaggagataccttaactcgacgttccattagccagcagaagtccggagtttccattaccattgatgacccagtccgaactgcccaggtgccctccccaccccggggcaagattagcaacattgtccatatctccaatttggtccgtcctttcactttaggccagctaaaggagttgttggggcgcacaggaaccttggtggaagaggccttctggattgacaagatcaaatctcattgctttgtaacgtactcaacagtagaggaagctgttgccacccgcacagctctgcacggggtcaaatggccccagtccaatcccaaattcctttgtgctgactatgccgagcaagatgagctggattatcaccgaggcctcttggtggaccgtccctctgaaactaagacagaggagcagggaataccacggcccctgcaccccccacccccacccccggtccagccaccacagcacccccgggcagagcagcgggagcaggaacgggcagtgcgggaacagtgggcagaacgggaacgggaaatggagcggcgggagcggactcgatcagagcgtgaatgggatcgggacaaagttcgagaagggccccgttcccgatcaaggtcccgtgaccgccgccgcaaggaacgtgcgaagtctaaagaaaagaagagtgagaagaaagagaaagcccaggaggaaccacctgccaagctgctggatgaccttttccgaaagaccaaggcagctccctgcatctattggctcccactgactgacagccagatcgttcagaaagaggcagagcgggccgaacgggccaaggagcgggagaagcggcgaaaggagcaagaagaagaagagcaaaaggagcgggagaaggaagccgagcgggaacggaaccgacagctggagcgagagaaacgtcgggagcacagtcgggagagggacagggagagagagagagaaagggagcgggacaggggggaccgagatcgggatagggaaagggaccgagaacgaggcagggaaagggatcgcagggacaccaagcgccacagcagaagccggagtcggagcacacctgtgcgggaccggggtgggcgccgctagctgggaaaacactagagctgcaggtaccagccactcggccccagggggttatggccacagagggataggcacagtctccaccaccctgg

SEQ ID NO: 108341 - DNA, 734 bp, Homo sapiens
  Payload ID: 1288
  Gene Symbol: ACIN1
  Gene Name: apoptotic chromatin condensation inducer 1
  ENST ID: ENST00000555566
  CDS Start-End: 152-734
ctccggctgatcgctgccgctccgccaatacaatagagccagccactaccagcagcctggccctcttcctccttctccagagagaccaatccagccgaactcggggtttgccaaagggataaacagcacttccagggggagaaaaaaaatcatgttatcagaaagcaaagaaggtgaggagaaggaggaagtgaccatggacacaagtgaaaacagacctgaaaatgatgttccagaacctcccatgcctattgcagaccaagtcagcaatgatgaccgcccggagggcagtgttgaagatgaggagaagaaagagagctcgctgcccaaatcattcaagaggaagatctccgttgtctcagctaccaagggggtgccagctggaaacagtgacacagaggggggccagcctggtcggaaacgacgctggggagccagcacagccaccacacagaagaaaccttccatcagtatcaccactgaatcactaaaggaggctgttgtggatcttcatgctgatgactctcgcatctctgaggatgagacagagcgtaatggcgatgatgggacccatgacaaggggctgaaaatatgccggacagtcactcaggtagtacctgcagagggccaggagaatgggcagagggaagaagaggaagaagagaaggaacctgaagcagaacctcctgtacctccccaggtgtcagtagaggtggccttgcccccacctgcag

SEQ ID NO: 108342 - DNA, 4474 bp, Homo sapiens
  Payload ID: 1288
  Gene Symbol: ACIN1
  Gene Name: apoptotic chromatin condensation inducer 1
  ENST ID: ENST00000605057
  CDS Start-End: 42-3893
tgcccgaagccgtcgggacggacccgagtacctcacgcaagatggcggagctggaggaggtgactctggacgggaagcctcttcaggcgctgcgggtgaccgacctgaaggccgcactggagcagcgaggcctagccaagagcgggcagaagagtgccctggtcaagcggctcaaaggggctctaatgctagaaaatttacagaaacactcaacaccccatgctgcattccagccaaattcccagattggtgaggaaatgagccagaacagtttcataaaacagtatctggaaaagcagcaggagctacttaggcagcgtctggaacgtgaagctcgagaagctgcagaacttgaagaagcttcagctgagtcggaggacgagatgatccatcctgagggagtggcttccctgctgcctcctgactttcagagcagcctggagagaccagagctggagctcagcagacattcgcccagaaaaagctcctcaatttctgaagagaaaggtgactctgatgatgagaaaccaaggaaaggagaaagacgatcatctagggtcagacaggcaagagcagctaaactgtctgagggcagccaacctgctgaggaggaagaggatcaagaaacaccttccagaaacctaagggtcagagcagatcgaaatttgaaaacagaggaggaagaagaggaggaggaggaggaggaagaagatgatgaagaagaggaaggtgatgatgagggacaaaaatctagggaggcaccaatcctgaaagagtttaaggaagaaggggaagagatacctagagtaaaaccagaggagatgatggatgagagacccaaaacaagatcccaggaacaggaggtgttagagagaggagggagatttacaagatcccaggaagaggctagaaaaagtcatctggccagacagcagcaggagaaggaaatgaaaacaacatctccccttgaggaggaagaaagagaaataaaatcttcacaaggcttaaaggaaaaatcgaagtctccttcccctcctcgactgactgaagatcgaaagaaggcctcacttgtagcgctgccagagcaaactgccagcgaggaggagactcctccacctttactaacaaaggaagcatcttctccaccacctcatccacagctccatagcgaagaagaaatagagcccatggaaggcccagcccccgctgtcctcattcagttatctcctcctaatacagatgctgacaccagggagctattagtatctcagcatactgtccagttggtaggaggcctgtctcctttgtcaagtccttcagacaccaaagcagaatctccagcagagaaagtgccagaggagagtgtcctgcctctggttcagaaaagcacactggctgactactcagcccagaaggatcttgaacctgagtcagacagatctgctcagcccctccctctaaaaattgaggaattagcactggccaaaggaatcactgaagaatgtctgaaacagccatctttggaacagaaggaaggcagaagagcttctcatacccttctcccaagccacagattgaaacagtcagctgattcatcctctagccggtcctcctcatcttcctcctccagttctagatcaagatctcgctctcctgacagttcaggttctcggtctcattcaccgctcagatccaagcagagagatgtagcccaggcacgtactcatgccaaccctcgtggtagacccaagatgggctccagatcaacatcagagtccagatcaaggtcacgttcacgttctcgttcagcatcaagcaacagcagaaaatctctgagccctggagtctccagggacagcagcaccagctatactgaaaccaaagatccctcttctggtcaggaggttgcaactccaccagtgccacaactgcaggtctgtgagccaaaggagaggacttccacctcctcatcctctgtccaagcaaggcgtctgagtcagcctgaatcagctgaaaagcatgtgacccagaggttacagcctgagcgggggagcccaaagaagtgtgaagctgaagaggcagagccaccagctgccacacagccccaaacctcagagactcagacctctcatctgccagaatcagaaagaattcatcacactgttgaggagaaggaggaagtgaccatggacacaagtgaaaacagacctgaaaatgatgttccagaacctcccatgcctattgcagaccaagtcagcaatgatgaccgcccggagggcagtgttgaagatgaggagaagaaagagagctcgctgcccaaatcattcaagaggaagatctccgttgtctcagctaccaagggggtgccagctggaaacagtgacacagaggggggccagcctggtcggaaacgacgctggggagccagcacagccaccacacagaagaaaccttccatcagtatcaccactgaatcactaaagagcctcatccccgacatcaaacccctggcggggcaggaggctgttgtggatcttcatgctgatgactctcgcatctctgaggatgagacagagcgtaatggcgatgatgggacccatgacaaggggctgaaaatatgccggacagtcactcaggtagtacctgcagagggccaggagaatgggcagagggaagaagaggaagaagagaaggaacctgaagcagaacctcctgtacctccccaggtgtcagtagaggtggccttgcccccacctgcagagcatgaagtaaagaaagtgactttaggagataccttaactcgacgttccattagccagcagaagtccggagtttccattaccattgatgacccagtccgaactgcccaggtgccctccccaccccggggcaagattagcaacattgtccatatctccaatttggtccgtcctttcactttaggccagctaaaggagttgttggggcgcacaggaaccttggtggaagaggccttctggattgacaagatcaaatctcattgctttgtaacgtactcaacagtagaggaagctgttgccacccgcacagctctgcacggggtcaaatggccccagtccaatcccaaattcctttgtgctgactatgccgagcaagatgagctggattatcaccgaggcctcttggtggaccgtccctctgaaactaagacagaggagcagggaataccacggcccctgcaccccccacccccacccccggtccagccaccacagcacccccgggcagagcagcgggagcaggaacgggcagtgcgggaacagtgggcagaacgggaacgggaaatggagcggcgggagcggactcgatcagagcgtgaatgggatcgggacaaagttcgagaagggccccgttcccgatcaaggtcccgtgaccgccgccgcaaggaacgtgcgaagtctaaagaaaagaagagtgagaagaaagagaaagcccaggaggaaccacctgccaagctgctggatgaccttttccgaaagaccaaggcagctccctgcatctattggctcccactgactgacagccagatcgttcagaaagaggcagagcgggccgaacgggccaaggagcgggagaagcggcgaaaggagcaagaagaagaagagcaaaaggagcgggagaaggaagccgagcgggaacggaaccgacagctggagcgagagaaacgtcgggagcacagtcgggagagggacagggagagagagagagaaagggagcgggacaggggggaccgagatcgggatagggaaagggaccgagaacgaggcagggaaagggatcgcagggacaccaagcgccacagcagaagccggagtcggagcacacctgtgcgggaccggggtgggcgccgctagctgggaaaacactagagctgcaggtaccagccactcggccccagggggttatggccacagagggataggcacagtctccaccaccctggagccaagggtctttcacatcacctatccctacatacataccaaatggaaaagtggccatccttttccccccaaacacacccccttaacctatctcttgggacttagcccgaccctccctctcatttcccattaagtctgagaggcaagagctaggttaggcaaggaggtggttggccagagatggggaacagccaggtgccccagtcctctgatttttcctccatcctgcttaccacctccctgggtacttacagccttctcttgggaacagccggggccaggactgggtcacctatgagctgaatcagcatctcctcctgagtcccagggcccctgcagttcccagtctcttctgtcctgcagcccttgcctctttcccacaggttccactttatatccaccttttccttttgttcaatttttatttttattttttttattattaaatgatgtggtctatggaaaaaaaaataaaaatctgacttagtttt

SEQ ID NO: 108343 - DNA, 579 bp, Homo sapiens
  Payload ID: 1288
  Gene Symbol: ACIN1
  Gene Name: apoptotic chromatin condensation inducer 1
  ENST ID: ENST00000555352
  CDS Start-End: 1-249
cagcctgaatcagctgaaaagcatgtgacccagaggttacagcctgagcgggggagcccaaagaagtgtgaagctgaagaggcagagccaccagctgccacacagccccaaacctcagagactcagacctctcatctgccagaatcagaaagaattcatcacactgtctttttttctggacattcccatgcaagtccagggcacatgaagcttggagtcatagagtttcctgtccccccactccagtgaggagaaggaggaagtgaccatggacacaagtgaaaacagacctgaaaatgatgttccagaacctcccatgcctattgcagaccaagtcagcaatgatgaccgcccggagggcagtgttgaagatgaggagaagaaagagtacctcatgtacggtaatccgcccgtaaaatataaccctgcccaactggccaatcgctgatgccgcctcttcctctggacccacccgctgctactgagctgcccaatcagagccaagtctgctatccaggtgtcttggccagaggggggcatgtatatgggctcctgtgatgggcccccttttgcctccct

SEQ ID NO: 108344 - DNA, 3540 bp, Homo sapiens
  Payload ID: 1288
  Gene Symbol: ACIN1
  Gene Name: apoptotic chromatin condensation inducer 1
  ENST ID: ENST00000473758
  CDS Start-End: 1-110
gcaatgatgaccgcccggagggcagtgttgaagatgaggagaagaaagagtacctcatgtacggtaatccgcccgtaaaatataaccctgcccaactggccaatcgctgatgccgcctcttcctctggacccacccgctgctactgagctgcccaatcagagccaagtctgctatccaggtgtcttggccagaggggggcatgtatatgggctcctgtgatgggcccccttttgcctccctgtcttgcttacatcagggggccaagaagaacactgttctggagagacttgtattgagcaagcaaaaaacatttggaaaggggtggacttgcatcatctccctacttgggacaccccaagaagagcttgtgccagtgctggggcgcctgcccacatgcccttgcccttttgaggactgtgggttgccttgtttgctacagactgttgggatccccatctagggcaccaagacctcctaaagtttgtgatcgcagtgccatgctgtaaaacactgagtgggaccctctacttaagctgtgacgactaggaaccgtgcagaggagtctagggtctgagcccctggggatttaatgctgatgacagcccagcccatgtgtcaccacttgctcatcagatggactttcctttggtccctgttgtccatggtgaagggcagcatgttggttgctccaacttctcctccatccctggaggcagggactcatttcatccacctgactggaaccactgtctcagctggagtccctgaggagatgccagccacaactctccgaagagaagtattctgaccttgctgctgaatgtctgccaggtcctggggtattcacctacccccaggctaccttcatcagaggctccatgatcccactcggtgagaggaccccctccccagttacaggcagaggagaaagggactctggagtcatcacctggattccaagtattgggtggtgttattgctgcagcttgccactggtggacatagggtcctgcctgcctctcacgataaaaggcaaggatcattcctgctactcacaggccatctcatcagggactgcaagatgatgtcccttcagggccaggactgatgtctctgcccctttcccccctctatccctcgctgagcctggccaccgccagtgaactgtcttgacatcatggaaactgggcagcgtccccccacacgtttccctcccgccccccctgcgcccctgggaggactctggcagtgccgtgctgactaccacgccgtgcgcccaccttttttgccaacccaaccccccaccaattgcacagcgcctagcagggagggctcattctgattggaccggcggttgactagatacagtacacagtgaggtgcgattggctgaactgaagatcccagagctcgctgcccaaatcattcaagaggaagatctccgttgtctcagctaccaagggggtgccagctggaaacagtgacacagaggggggccagcctggtcggaaacgacgctggggagccagcacagccaccacacagaagaaaccttccatcagtatcaccactgaatcactaaaggaggctgttgtggatcttcatgctgatgactctcgcatctctgaggatgagacagagcgtaatggcgatgatgggacccatgacaaggggctgaaaatatgccggacagtcactcaggtagtacctgcagagggccaggagaatgggcagagggaagaagaggaagaagagaaggaacctgaagcagaacctcctgtacctccccaggtgtcagtagaggtggccttgcccccacctgcagagcatgaagtaaagaaagtgactttaggagataccttaactcgacgttccattagccagcagaagtccggagtttccattaccattgatgacccagtccgaactgcccaggtgccctccccaccccggggcaagattagcaacattgtccatatctccaatttggtccgtcctttcactttaggccagctaaaggagttgttggggcgcacaggaaccttggtggaagaggccttctggattgacaagatcaaatctcattgctttgtaacgtactcaacagtagaggaagctgttgccacccgcacagctctgcacggggtcaaatggccccagtccaatcccaaattcctttgtgctgactatgccgagcaagatgagctggattatcaccgaggcctcttggtggaccgtccctctgaaactaagacagaggagcagggaataccacggcccctgcaccccccacccccacccccggtccagccaccacagcacccccgggcagagcagcgggagcaggaacgggcagtgcgggaacagtgggcagaacgggaacgggaaatggagcggcgggagcggactcgatcagagcgtgaatgggatcgggacaaagttcgagaagggccccgttcccgatcaaggtcccgtgaccgccgccgcaaggaacgtgcgaagtctaaagaaaagaagagtgagaagaaagagaaagcccaggaggaaccacctgccaagctgctggatgaccttttccgaaagaccaaggcagctccctgcatctattggctcccactgactgacagccagatcgttcagaaagaggcagagcgggccgaacgggccaaggagcgggagaagcggcgaaaggagcaagaagaagaagagcaaaaggagcgggagaaggaagccgagcgggaacggaaccgacagctggagcgagagaaacgtcgggagcacagtcgggagagggacagggagagagagagagaaagggagcgggacaggggggaccgagatcgggatagggaaagggaccgagaacgaggcagggaaagggatcgcagggacaccaagcgccacagcagaagccggagtcggagcacacctgtgcgggaccggggtgggcgccgctagctgggaaaacactagagctgcaggtaccagccactcggccccagggggttatggccacagagggataggcacagtctccaccaccctggagccaagggtctttcacatcacctatccctacatacataccaaatggaaaagtggccatccttttccccccaaacacacccccttaacctatctcttgggacttagcccgaccctccctctcatttcccattaagtctgagaggcaagagctaggttaggcaaggaggtggttggccagagatggggaacagccaggtgccccagtcctctgatttttcctccatcctgcttaccacctccctgggtacttacagccttctcttgggaacagccggggccaggactgggtcacctatgagctgaatcagcatctcctcctgagtcccagggcccctgcagttcccagtctcttctgtcctgcagcccttgcctctttcccacaggttccactttatatccaccttttccttttgttcaatttttatttttattttttttattattaaatgatgtggtctatggaaaaaaaaataaaaatctgacttagtttt

SEQ ID NO: 108345 - DNA, 4539 bp, Homo sapiens
  Payload ID: 1289
  Gene Symbol: APAF1
  Gene Name: apoptotic peptidase activating factor 1
  Uniprot ID: O14727
  ENST ID: ENST00000333991
  CDS Start-End: 578-1594
aagaagaggtagcgagtggacgtgactgctctatcccgggcaaaagggatagaaccagaggtggggagtctgggcagtcggcgacccgcgaagacttgaggtgccgcagcggcatccggagtagcgccgggctccctccggggtgcagccgccgtcgggggaagggcgccacaggccgggaagacctcctccctttgtgtccagtagtggggtccaccggagggcggcccgtgggccgggcctcaccgcggcgctccgggactgtggggtcaggctgcgttgggtggacgcccacctcgccaaccttcggaggtccctgggggtcttcgtgcgccccggggctgcagagatccaggggaggcgcctgtgaggcccggacctgccccggggcgaagggtatgtggcgagacagagccctgcacccctaattcccggtggaaaactcctgttgccgtttccctccaccggcctggagtctcccagtcttgtcccggcagtgccgccctccccactaagacctaggcgcaaaggcttggctcatggttgacagctcagagagagaaagatctgagggaagatggatgcaaaagctcgaaattgtttgcttcaacatagagaagctctggaaaaggacatcaagacatcctacatcatggatcacatgattagtgatggatttttaacaatatcagaagaggaaaaagtaagaaatgagcccactcaacagcaaagagcagctatgctgattaaaatgatacttaaaaaagataatgattcctacgtatcattctacaatgctctactacatgaaggatataaagatcttgctgcccttctccatgatggcattcctgttgtctcttcttccagtggtaaagattcagttagtggaataacttcgtatgtaaggacagtcctgtgtgaaggtggagtaccacagaggccagttgtttttgtcacaaggaagaagctggtgaatgcaattcagcagaagctctccaaattgaaaggtgaaccaggatgggtcaccatacatggaatggcaggctgtgggaagtctgtattagctgcagaagctgttagagatcattcccttttagaaggttgtttcccagggggagtgcattgggtttcagttgggaaacaagacaaatctgggcttctgatgaaactgcagaatctttgcacacggttggatcaggatgagagtttttcccagaggcttccacttaatattgaagaggctaaagaccgtctccgcattctgatgcttcgcaaacacccaaggtctctcttgatcttggatgatgtttgggactcttgggtgttgaaagcttttgacagtcagtgtcagattcttcttacaaccagagacaagagtgttacagattcagtaatgggtcctaaatatgtagtccctgtggagagttccttaggaaaggaaaaaggacttgaaattttatccctttttgttaatatgaagaaggcagatttgccagaacaagctcatagtattataaaagaatgtaaagtggtggaacgttgtcactggggaatcctcacagaccttctacacaaatggaaccaatcttaagaaaatacacgtgtcccctgacttcaaaacatatgtgactgtggataatcttggtattttatatattttacagactttagaataaaatagttaagcattaatgtagttgaactttttaaatttttgaattggaaaaaaattctaatgaaaccctgatatcaactttttataaagctcttaattgttgtgcagtattgcattcattacaaaagtgtttgtggttggatgaataatattaatgtagctttttcccaaatgaacatacctttaatcttgtttttcatgatcatcattaacagtttgtccttaggatgcaaatgaaaatgtgaatacataccttgttgtactgttggtaaaattctgtcttgatgcattcaaaatggttgacataattaatgagaagaatttggaagaaattggtattttaatactgtctgtatttattactgttatgcaggctgtgcctcagggtagcagtggcctgctttttgaaccacacttaccccaagggggttttgttctcctaaatacaatcttagaggttttttgcactctttaaatttgctttaaaaatattgtgtctgtgtgcatagtctgcagcatttcctttaattgactcaataagtgagtcttggatttagcaggcccccccaccttttttttttgtttttggagacagagtcttgctttgttgccaggctggagtgcagtggcgcgatctcggctcaccacaatcgctgcctcctgggttcaagcaattctcctgcctcagcctcccgagtagctgggactacaggtgtgcgcacatgccaggctaatttttgtatttttagtagagacggggtttcaccatgttggccgggatggtctcgatctcttgacctcatgatctacccgccttggcctcccaaagtgctgagattacaggcgtgagccaccgtgcctggccaggccccttctcttttaatggagacagggtcttgcactatcacccaggctggagtgcagtggcataatcatacctcattgcagcctcagactcctgggttcaagcaatcctcctgcctcagcctcccaagtagctgagactacaggcacgagccaccacacccagctaatttttaagttttcttgtagagacagggtctcactatgttgtctaggctggtcttgaactcttggcctcaagtaatcctcctgcctcagcctcccaaagtgttgggattgcagatatgagccactggcctggccttcagcagttctttttgtgaagtaaaacttgtatgttggaaagagtagattttattggtctacccttttctcactgtagctgctggcagccctgtgccatatctggactctagttgtcagtatctgagttggacactattcctgctccctcttgtttcttacatatcagacttcttacttgaatgaaacctgatctttcctaatcctcacttttttcttttttaaaaagcagtttctccactgctaaatgttagtcattgaggtggggccaattttaatcataagccttaataagatttttctaagaaatgtgaaatagaacaattttcatctaattccatttacttttagatgaatggcattgtgaatgccattcttttaatgaatttcaagagaattctctggttttctgtgtaattccagatgagtcactgtaactctagaagattaaccttccagccaacctattttcctttcccttgtctctctcatcctcttttccttccttctttcctttctcttcttttatctccaaggttaatcaggaaaaatagcttttgacaggggaaaaaactcaataactagctatttttgacctcctgatcaggaactttagttgaagcgtaaatctaaagaaacattttctctgaaatatattattaagggcaatggagataaattaatagtagatgtggttcccagaaaatataatcaaaattcaaagattttttttgtttctgtaactggaactaaatcaaatgattactagtgttaatagtagataacttgtttttattgttggtgcatattagtataactgtggggtaggtcggggagagggtaagggaatagatcactcagatgtattttagataagctatttagcctttgatggaatcataaatacagtgaatacaatcctttgcattgttaaggaggttttttgtttttaaatggtgggtcaaggagctagtttacaggcttactgtgatttaagcaaatgtgaaaagtgaaaccttaattttatcaaaagaaatttctgtaaatggtatgtctccttagaatacccaaatcataattttatttgtacacactgttaggggctcatctcatgtaggcagagtataaagtattaccttttggaattaaaagccactgactgttataaagtataacaacacacatcaggttttaaaaagccttgaatggcccttgtcttaaaaagaaattaggagccaggtgcggtggcacgtgcctgtaatcccagctccttgggaggctaagacaggaggattccttgagccctggagtttgagtccagcctgggtgacatagcaagaccctgtcttaaaagaaaaatgggaagaaagacaaggtaacatgaagaaagaagagatacctagtatgatggagctgcaaatttcatggcagttcatgcagtcggtcaagaggaggattttgttttgtagtttgcagatgagcatttctaaagcattttcccttgctgtatttttttgtattataaattacattggacttcatatatataatttttttttacattatatgtctcttgtatgttttgaaactcttgtatttatgatatagcttatatgatttttttgccttggtatacattttaaaatatgaatttaaaaaatttttgtaaaaataaaattcacaaaattgttttg

SEQ ID NO: 108346 - DNA, 7055 bp, Homo sapiens
  Payload ID: 1289
  Gene Symbol: APAF1
  Gene Name: apoptotic peptidase activating factor 1
  Uniprot ID: O14727
  ENST ID: ENST00000357310
  CDS Start-End: 578-4195
aagaagaggtagcgagtggacgtgactgctctatcccgggcaaaagggatagaaccagaggtggggagtctgggcagtcggcgacccgcgaagacttgaggtgccgcagcggcatccggagtagcgccgggctccctccggggtgcagccgccgtcgggggaagggcgccacaggccgggaagacctcctccctttgtgtccagtagtggggtccaccggagggcggcccgtgggccgggcctcaccgcggcgctccgggactgtggggtcaggctgcgttgggtggacgcccacctcgccaaccttcggaggtccctgggggtcttcgtgcgccccggggctgcagagatccaggggaggcgcctgtgaggcccggacctgccccggggcgaagggtatgtggcgagacagagccctgcacccctaattcccggtggaaaactcctgttgccgtttccctccaccggcctggagtctcccagtcttgtcccggcagtgccgccctccccactaagacctaggcgcaaaggcttggctcatggttgacagctcagagagagaaagatctgagggaagatggatgcaaaagctcgaaattgtttgcttcaacatagagaagctctggaaaaggacatcaagacatcctacatcatggatcacatgattagtgatggatttttaacaatatcagaagaggaaaaagtaagaaatgagcccactcaacagcaaagagcagctatgctgattaaaatgatacttaaaaaagataatgattcctacgtatcattctacaatgctctactacatgaaggatataaagatcttgctgcccttctccatgatggcattcctgttgtctcttcttccagtggtaaagattcagttagtggaataacttcgtatgtaaggacagtcctgtgtgaaggtggagtaccacagaggccagttgtttttgtcacaaggaagaagctggtgaatgcaattcagcagaagctctccaaattgaaaggtgaaccaggatgggtcaccatacatggaatggcaggctgtgggaagtctgtattagctgcagaagctgttagagatcattcccttttagaaggttgtttcccagggggagtgcattgggtttcagttgggaaacaagacaaatctgggcttctgatgaaactgcagaatctttgcacacggttggatcaggatgagagtttttcccagaggcttccacttaatattgaagaggctaaagaccgtctccgcattctgatgcttcgcaaacacccaaggtctctcttgatcttggatgatgtttgggactcttgggtgttgaaagcttttgacagtcagtgtcagattcttcttacaaccagagacaagagtgttacagattcagtaatgggtcctaaatatgtagtccctgtggagagttccttaggaaaggaaaaaggacttgaaattttatccctttttgttaatatgaagaaggcagatttgccagaacaagctcatagtattataaaagaatgtaaaggctctccccttgtagtatctttaattggtgcacttttacgtgattttcccaatcgctgggagtactacctcaaacagcttcagaataagcagtttaagagaataaggaaatcttcgtcttatgattatgaggctctagatgaagccatgtctataagtgttgaaatgctcagagaagacatcaaagattattacacagatctttccatccttcagaaggacgttaaggtgcctacaaaggtgttatgtattctctgggacatggaaactgaagaagttgaagacatactgcaggagtttgtaaataagtctcttttattctgtgatcggaatggaaagtcgtttcgttattatttacatgatcttcaagtagattttcttacagagaagaattgcagccagcttcaggatctacataagaagataatcactcagtttcagagatatcaccagccgcatactctttcaccagatcaggaagactgtatgtattggtacaactttctggcctatcacatggccagtgccaagatgcacaaggaactttgtgctttaatgttttccctggattggattaaagcaaaaacagaacttgtaggccctgctcatctgattcatgaatttgtggaatacagacatatactagatgaaaaggattgtgcagtcagtgagaattttcaggagtttttatctttaaatggacaccttcttggacgacagccatttcctaatattgtacaactgggtctctgtgagccggaaacttcagaagtttatcagcaagctaagctgcaggccaagcaggaggtcgataatggaatgctttacctggaatggataaacaaaaaaaacatcacgaatctttcccgcttagttgtccgcccccacacagatgctgtttaccatgcctgcttttctgaggatggtcagagaatagcttcttgtggagctgataaaaccttacaggtgttcaaagctgaaacaggagagaaacttctagaaatcaaggctcatgaggatgaagtgctttgttgtgcattctctacagatgacagatttatagcaacctgctcagtggataaaaaagtgaagatttggaattctatgactggggaactagtacacacctatgatgagcactcagagcaagtcaattgctgccatttcaccaacagtagtcatcatcttctcttagccactgggtcaagtgactgcttcctcaaactttgggatttgaatcaaaaagaatgtcgaaataccatgtttggtcatacaaattcagtcaatcactgcagattttcaccagatgataagcttttggctagttgttcagctgatggaaccttaaagctttgggatgcgacatcagcaaatgagaggaaaagcattaatgtgaaacagttcttcctaaatttggaggaccctcaagaggatatggaagtgatagtgaagtgttgttcgtggtctgctgatggtgcaaggataatggtggcagcaaaaaataaaatctttttgtggaatacagactcacgttcaaaggtggctgattgcagaggacatttaagttgggttcatggtgtgatgttttctcctgatggatcatcatttttgacatcttctgatgaccagacaatcaggctctgggagacaaagaaagtatgtaagaactctgctgtaatgttaaagcaagaagtagatgttgtgtttcaagaaaatgaagtgatggtccttgcagttgaccatataagacgtctgcaactcattaatggaagaacaggtcagattgattatctgactgaagctcaagttagctgctgttgcttaagtccacatcttcagtacattgcatttggagatgaaaatggagccattgagattttagaacttgtaaacaatagaatcttccagtccaggtttcagcacaagaaaactgtatggcacatccagttcacagccgatgagaagactcttatttcaagttctgatgatgctgaaattcaggtatggaattggcaattggacaaatgtatctttctacgaggccatcaggaaacagtgaaagactttagactcttgaaaaattcaagactgctttcttggtcatttgatggaacagtgaaggtatggaatattattactggaaataaagaaaaagactttgtctgtcaccagggtacagtactttcttgtgacatttctcacgatgctaccaagttttcatctacctctgctgacaagactgcaaagatctggagttttgatctccttttgccacttcatgaattgaggggccacaacggctgtgtgcgctgctctgccttctctgtggacagtaccctgctggcaacgggagatgacaatggagaaatcaggatatggaatgtctcaaacggtgagcttcttcatttgtgtgctccgctttcagaagaaggagctgctacccatggaggctgggtgactgacctttgcttttctccagatggcaaaatgcttatctctgctggaggatatattaagtggtggaacgttgtcactggggaatcctcacagaccttctacacaaatggaaccaatcttaagaaaatacacgtgtcccctgacttcaaaacatatgtgactgtggataatcttggtattttatatattttacagactttagaataaaatagttaagcattaatgtagttgaactttttaaatttttgaattggaaaaaaattctaatgaaaccctgatatcaactttttataaagctcttaattgttgtgcagtattgcattcattacaaaagtgtttgtggttggatgaataatattaatgtagctttttcccaaatgaacatacctttaatcttgtttttcatgatcatcattaacagtttgtccttaggatgcaaatgaaaatgtgaatacataccttgttgtactgttggtaaaattctgtcttgatgcattcaaaatggttgacataattaatgagaagaatttggaagaaattggtattttaatactgtctgtatttattactgttatgcaggctgtgcctcagggtagcagtggcctgctttttgaaccacacttaccccaagggggttttgttctcctaaatacaatcttagaggttttttgcactctttaaatttgctttaaaaatattgtgtctgtgtgcatagtctgcagcatttcctttaattgactcaataagtgagtcttggatttagcaggcccccccaccttttttttttgtttttggagacagagtcttgctttgttgccaggctggagtgcagtggcgcgatctcggctcaccacaatcgctgcctcctgggttcaagcaattctcctgcctcagcctcccgagtagctgggactacaggtgtgcgcacatgccaggctaatttttgtatttttagtagagacggggtttcaccatgttggccgggatggtctcgatctcttgacctcatgatctacccgccttggcctcccaaagtgctgagattacaggcgtgagccaccgtgcctggccaggccccttctcttttaatggagacagggtcttgcactatcacccaggctggagtgcagtggcataatcatacctcattgcagcctcagactcctgggttcaagcaatcctcctgcctcagcctcccaagtagctgagactacaggcacgagccaccacacccagctaatttttaagttttcttgtagagacagggtctcactatgttgtctaggctggtcttgaactcttggcctcaagtaatcctcctgcctcagcctcccaaagtgttgggattgcagatatgagccactggcctggccttcagcagttctttttgtgaagtaaaacttgtatgttggaaagagtagattttattggtctacccttttctcactgtagctgctggcagccctgtgccatatctggactctagttgtcagtatctgagttggacactattcctgctccctcttgtttcttacatatcagacttcttacttgaatgaaacctgatctttcctaatcctcacttttttcttttttaaaaagcagtttctccactgctaaatgttagtcattgaggtggggccaattttaatcataagccttaataagatttttctaagaaatgtgaaatagaacaattttcatctaattccatttacttttagatgaatggcattgtgaatgccattcttttaatgaatttcaagagaattctctggttttctgtgtaattccagatgagtcactgtaactctagaagattaaccttccagccaacctattttcctttcccttgtctctctcatcctcttttccttccttctttcctttctcttcttttatctccaaggttaatcaggaaaaatagcttttgacaggggaaaaaactcaataactagctatttttgacctcctgatcaggaactttagttgaagcgtaaatctaaagaaacattttctctgaaatatattattaagggcaatggagataaattaatagtagatgtggttcccagaaaatataatcaaaattcaaagattttttttgtttctgtaactggaactaaatcaaatgattactagtgttaatagtagataacttgtttttattgttggtgcatattagtataactgtggggtaggtcggggagagggtaagggaatagatcactcagatgtattttagataagctatttagcctttgatggaatcataaatacagtgaatacaatcctttgcattgttaaggaggttttttgtttttaaatggtgggtcaaggagctagtttacaggcttactgtgatttaagcaaatgtgaaaagtgaaaccttaattttatcaaaagaaatttctgtaaatggtatgtctccttagaatacccaaatcataattttatttgtacacactgttaggggctcatctcatgtaggcagagtataaagtattaccttttggaattaaaagccactgactgttataaagtataacaacacacatcaggttttaaaaagccttgaatggcccttgtcttaaaaagaaattaggagccaggtgcggtggcacgtgcctgtaatcccagctccttgggaggctaagacaggaggattccttgagccctggagtttgagtccagcctgggtgacatagcaagaccctgtcttaaaagaaaaatgggaagaaagacaaggtaacatgaagaaagaagagatacctagtatgatggagctgcaaatttcatggcagttcatgcagtcggtcaagaggaggattttgttttgtagtttgcagatgagcatttctaaagcattttcccttgctgtatttttttgtattataaattacattggacttcatatatataatttttttttacattatatgtctcttgtatgttttgaaactcttgtatttatgatatagcttatatgatttttttgccttggtatacattttaaaatatgaatttaaaaaatttttgtaaaaataaaattcacaaaattgttttg

SEQ ID NO: 108347 - DNA, 7029 bp, Homo sapiens
  Payload ID: 1289
  Gene Symbol: APAF1
  Gene Name: apoptotic peptidase activating factor 1
  Uniprot ID: O14727
  ENST ID: ENST00000359972
  CDS Start-End: 578-4162
aagaagaggtagcgagtggacgtgactgctctatcccgggcaaaagggatagaaccagaggtggggagtctgggcagtcggcgacccgcgaagacttgaggtgccgcagcggcatccggagtagcgccgggctccctccggggtgcagccgccgtcgggggaagggcgccacaggccgggaagacctcctccctttgtgtccagtagtggggtccaccggagggcggcccgtgggccgggcctcaccgcggcgctccgggactgtggggtcaggctgcgttgggtggacgcccacctcgccaaccttcggaggtccctgggggtcttcgtgcgccccggggctgcagagatccaggggaggcgcctgtgaggcccggacctgccccggggcgaagggtatgtggcgagacagagccctgcacccctaattcccggtggaaaactcctgttgccgtttccctccaccggcctggagtctcccagtcttgtcccggcagtgccgccctccccactaagacctaggcgcaaaggcttggctcatggttgacagctcagagagagaaagatctgagggaagatggatgcaaaagctcgaaattgtttgcttcaacatagagaagctctggaaaaggacatcaagacatcctacatcatggatcacatgattagtgatggatttttaacaatatcagaagaggaaaaagtaagaaatgagcccactcaacagcaaagagcagctatgctgattaaaatgatacttaaaaaagataatgattcctacgtatcattctacaatgctctactacatgaaggatataaagatcttgctgcccttctccatgatggcattcctgttgtctcttcttccagtgtaaggacagtcctgtgtgaaggtggagtaccacagaggccagttgtttttgtcacaaggaagaagctggtgaatgcaattcagcagaagctctccaaattgaaaggtgaaccaggatgggtcaccatacatggaatggcaggctgtgggaagtctgtattagctgcagaagctgttagagatcattcccttttagaaggttgtttcccagggggagtgcattgggtttcagttgggaaacaagacaaatctgggcttctgatgaaactgcagaatctttgcacacggttggatcaggatgagagtttttcccagaggcttccacttaatattgaagaggctaaagaccgtctccgcattctgatgcttcgcaaacacccaaggtctctcttgatcttggatgatgtttgggactcttgggtgttgaaagcttttgacagtcagtgtcagattcttcttacaaccagagacaagagtgttacagattcagtaatgggtcctaaatatgtagtccctgtggagagttccttaggaaaggaaaaaggacttgaaattttatccctttttgttaatatgaagaaggcagatttgccagaacaagctcatagtattataaaagaatgtaaaggctctccccttgtagtatctttaattggtgcacttttacgtgattttcccaatcgctgggagtactacctcaaacagcttcagaataagcagtttaagagaataaggaaatcttcgtcttatgattatgaggctctagatgaagccatgtctataagtgttgaaatgctcagagaagacatcaaagattattacacagatctttccatccttcagaaggacgttaaggtgcctacaaaggtgttatgtattctctgggacatggaaactgaagaagttgaagacatactgcaggagtttgtaaataagtctcttttattctgtgatcggaatggaaagtcgtttcgttattatttacatgatcttcaagtagattttcttacagagaagaattgcagccagcttcaggatctacataagaagataatcactcagtttcagagatatcaccagccgcatactctttcaccagatcaggaagactgtatgtattggtacaactttctggcctatcacatggccagtgccaagatgcacaaggaactttgtgctttaatgttttccctggattggattaaagcaaaaacagaacttgtaggccctgctcatctgattcatgaatttgtggaatacagacatatactagatgaaaaggattgtgcagtcagtgagaattttcaggagtttttatctttaaatggacaccttcttggacgacagccatttcctaatattgtacaactgggtctctgtgagccggaaacttcagaagtttatcagcaagctaagctgcaggccaagcaggaggtcgataatggaatgctttacctggaatggataaacaaaaaaaacatcacgaatctttcccgcttagttgtccgcccccacacagatgctgtttaccatgcctgcttttctgaggatggtcagagaatagcttcttgtggagctgataaaaccttacaggtgttcaaagctgaaacaggagagaaacttctagaaatcaaggctcatgaggatgaagtgctttgttgtgcattctctacagatgacagatttatagcaacctgctcagtggataaaaaagtgaagatttggaattctatgactggggaactagtacacacctatgatgagcactcagagcaagtcaattgctgccatttcaccaacagtagtcatcatcttctcttagccactgggtcaagtgactgcttcctcaaactttgggatttgaatcaaaaagaatgtcgaaataccatgtttggtcatacaaattcagtcaatcactgcagattttcaccagatgataagcttttggctagttgttcagctgatggaaccttaaagctttgggatgcgacatcagcaaatgagaggaaaagcattaatgtgaaacagttcttcctaaatttggaggaccctcaagaggatatggaagtgatagtgaagtgttgttcgtggtctgctgatggtgcaaggataatggtggcagcaaaaaataaaatctttttgtggaatacagactcacgttcaaaggtggctgattgcagaggacatttaagttgggttcatggtgtgatgttttctcctgatggatcatcatttttgacatcttctgatgaccagacaatcaggctctgggagacaaagaaagtatgtaagaactctgctgtaatgttaaagcaagaagtagatgttgtgtttcaagaaaatgaagtgatggtccttgcagttgaccatataagacgtctgcaactcattaatggaagaacaggtcagattgattatctgactgaagctcaagttagctgctgttgcttaagtccacatcttcagtacattgcatttggagatgaaaatggagccattgagattttagaacttgtaaacaatagaatcttccagtccaggtttcagcacaagaaaactgtatggcacatccagttcacagccgatgagaagactcttatttcaagttctgatgatgctgaaattcaggtatggaattggcaattggacaaatgtatctttctacgaggccatcaggaaacagtgaaagactttagactcttgaaaaattcaagactgctttcttggtcatttgatggaacagtgaaggtatggaatattattactggaaataaagaaaaagactttgtctgtcaccagggtacagtactttcttgtgacatttctcacgatgctaccaagttttcatctacctctgctgacaagactgcaaagatctggagttttgatctccttttgccacttcatgaattgaggggccacaacggctgtgtgcgctgctctgccttctctgtggacagtaccctgctggcaacgggagatgacaatggagaaatcaggatatggaatgtctcaaacggtgagcttcttcatttgtgtgctccgctttcagaagaaggagctgctacccatggaggctgggtgactgacctttgcttttctccagatggcaaaatgcttatctctgctggaggatatattaagtggtggaacgttgtcactggggaatcctcacagaccttctacacaaatggaaccaatcttaagaaaatacacgtgtcccctgacttcaaaacatatgtgactgtggataatcttggtattttatatattttacagactttagaataaaatagttaagcattaatgtagttgaactttttaaatttttgaattggaaaaaaattctaatgaaaccctgatatcaactttttataaagctcttaattgttgtgcagtattgcattcattacaaaagtgtttgtggttggatgaataatattaatgtagctttttcccaaatgaacatacctttaatcttgtttttcatgatcatcattaacagtttgtccttaggatgcaaatgaaaatgtgaatacataccttgttgtactgttggtaaaattctgtcttgatgcattcaaaatggttgacataattaatgagaagaatttggaagaaattggtattttaatactgtctgtatttattactgttatgcaggctgtgcctcagggtagcagtggcctgctttttgaaccacacttaccccaagggggttttgttctcctaaatacaatcttagaggttttttgcactctttaaatttgctttaaaaatattgtgtctgtgtgcatagtctgcagcatttcctttaattgactcaataagtgagtcttggatttagcaggcccccccaccttttttttttgtttttggagacagagtcttgctttgttgccaggctggagtgcagtggcgcgatctcggctcaccacaatcgctgcctcctgggttcaagcaattctcctgcctcagcctcccgagtagctgggactacaggtgtgcgcacatgccaggctaatttttgtatttttagtagagacggggtttcaccatgttggccgggatggtctcgatctcttgacctcatgatctacccgccttggcctcccaaagtgctgagattacaggcgtgagccaccgtgcctggccaggccccttctcttttaatggagacagggtcttgcactatcacccaggctggagtgcagtggcataatcatacctcattgcagcctcagactcctgggttcaagcaatcctcctgcctcagcctcccaagtagctgagactacaggcacgagccaccacacccagctaatttttaagttttcttgtagagacagggtctcactatgttgtctaggctggtcttgaactcttggcctcaagtaatcctcctgcctcagcctcccaaagtgttgggattgcagatatgagccactggcctggccttcagcagttctttttgtgaagtaaaacttgtatgttggaaagagtagattttattggtctacccttttctcactgtagctgctggcagccctgtgccatatctggactctagttgtcagtatctgagttggacactattcctgctccctcttgtttcttacatatcagacttcttacttgaatgaaacctgatctttcctaatcctcacttttttcttttttaaaaagcagtttctccactgctaaatgttagtcattgaggtggggccaattttaatcataagccttaataagatttttctaagaaatgtgaaatagaacaattttcatctaattccatttacttttagatgaatggcattgtgaatgccattcttttaatgaatttcaagagaattctctggttttctgtgtaattccagatgagtcactgtaactctagaagattaaccttccagccaacctattttcctttcccttgtctctctcatcctcttttccttccttctttcctttctcttcttttatctccaaggttaatcaggaaaaatagcttttgacaggggaaaaaactcaataactagctatttttgacctcctgatcaggaactttagttgaagcgtaaatctaaagaaacattttctctgaaatatattattaagggcaatggagataaattaatagtagatgtggttcccagaaaatataatcaaaattcaaagattttttttgtttctgtaactggaactaaatcaaatgattactagtgttaatagtagataacttgtttttattgttggtgcatattagtataactgtggggtaggtcggggagagggtaagggaatagatcactcagatgtattttagataagctatttagcctttgatggaatcataaatacagtgaatacaatcctttgcattgttaaggaggttttttgtttttaaatggtgggtcaaggagctagtttacaggcttactgtgatttaagcaaatgtgaaaagtgaaaccttaattttatcaaaagaaatttctgtaaatggtatgtctccttagaatacccaaatcataattttatttgtacacactgttaggggctcatctcatgtaggcagagtataaagtattaccttttggaattaaaagccactgactgttataaagtataacaacacacatcaggttttaaaaagccttgaatggcccttgtcttaaaaagaaattaggagccaggtgcggtggcacgtgcctgtaatcccagctccttgggaggctaagacaggaggattccttgagccctggagtttgagtccagcctgggtgacatagcaagaccctgtcttaaaagaaaaatgggaagaaagacaaggtaacatgaagaaagaagagatacctagtatgatggagctgcaaatttcatggcagttcatgcagtcggtcaagaggaggattttgttttgtagtttgcagatgagcatttctaaagcattttcccttgctgtatttttttgtattataaattacattggacttcatatatataatttttttttacattatatgtctcttgtatgttttgaaactcttgtatttatgatatagcttatatgatttttttgccttggtatacattttaaaatatgaatttaaaaaatttttgtaaaaataaaattcacaaaattgttttgaaaaaca

SEQ ID NO: 108348 - DNA, 3492 bp, Homo sapiens
  Payload ID: 1289
  Gene Symbol: APAF1
  Gene Name: apoptotic peptidase activating factor 1
  ENST ID: ENST00000549007
  CDS Start-End: 1-3492
atggatgcaaaagctcgaaattgtttgcttcaacatagagaagctctggaaaaggacatcaagacatcctacatcatggatcacatgattagtgatggatttttaacaatatcagaagaggaaaaagtaagaaatgagcccactcaacagcaaagagcagctatgctgattaaaatgatacttaaaaaagataatgattcctacgtatcattctacaatgctctactacatgaaggatataaagatcttgctgcccttctccatgatggcattcctgttgtctcttcttccagtggtaaagattcagttagtggaataacttcgtatgtaaggacagtcctgtgtgaaggtggagtaccacagaggccagttgtttttgtcacaaggaagaagctggtgaatgcaattcagcagaagctctccaaattgaaaggtgaaccaggatgggtcaccatacatggaatggcaggctgtgggaagtctgtattagctgcagaagctgttagagatcattcccttttagaaggttgtttcccagggggagtgcattgggtttcagttgggaaacaagacaaatctgggcttctgatgaaactgcagaatctttgcacacggttggatcaggatgagagtttttcccagaggcttccacttaatattgaagaggctaaagaccgtctccgcattctgatgcttcgcaaacacccaaggtctctcttgatcttggatgatgtttgggactcttgggtgttgaaagcttttgacagtcagtgtcagattcttcttacaaccagagacaagagtgttacagattcagtaatgggtcctaaatatgtagtccctgtggagagttccttaggaaaggaaaaaggacttgaaattttatccctttttgttaatatgaagaaggcagatttgccagaacaagctcatagtattataaaagaatgtaaaggctctccccttgtagtatctttaattggtgcacttttacgtgattttcccaatcgctgggagtactacctcaaacagcttcagaataagcagtttaagagaataaggaaatcttcgtcttatgattatgaggctctagatgaagccatgtctataagtgttgaaatgctcagagaagacatcaaagattattacacagatctttccatccttcagaaggacgttaaggtgcctacaaaggtgttatgtattctctgggacatggaaactgaagaagttgaagacatactgcaggagtttgtaaataagtctcttttattctgtgatcggaatggaaagtcgtttcgttattatttacatgatcttcaagtagattttcttacagagaagaattgcagccagcttcaggatctacataagaagataatcactcagtttcagagatatcaccagccgcatactctttcaccagatcaggaagactgtatgtattggtacaactttctggcctatcacatggccagtgccaagatgcacaaggaactttgtgctttaatgttttccctggattggattaaagcaaaaacagaacttgtaggccctgctcatctgattcatgaatttgtggaatacagacatatactagatgaaaaggattgtgcagtcagtgagaattttcaggagtttttatctttaaatggacaccttcttggacgacagccatttcctaatattgtacaactgggtctctgtgagccggaaacttcagaagtttatcagcaagctaagctgcaggccaagcaggaggtcgataatggaatgctttacctggaatggataaacaaaaaaaacatcacgaatctttcccgcttagttgtccgcccccacacagatgctgtttaccatgcctgcttttctgaggatggtcagagaatagcttcttgtggagctgataaaaccttacaggtgttcaaagctgaaacaggagagaaacttctagaaatcaaggctcatgaggatgaagtgctttgttgtgcattctctacagatgacagatttatagcaacctgctcagtggataaaaaagtgaagatttggaattctatgactggggaactagtacacacctatgatgagcactcagagcaagtcaattgctgccatttcaccaacagtagtcatcatcttctcttagccactgggtcaagtgactgcttcctcaaactttgggatttgaatcaaaaagaatgtcgaaataccatgtttggtcatacaaattcagtcaatcactgcagattttcaccagatgataagcttttggctagttgttcagctgatggaaccttaaagctttgggatgcgacatcagcaaatgagaggaaaagcattaatgtgaaacagttcttcctaaatttggaggaccctcaagaggatatggaagtgatagtgaagtgttgttcgtggtctgctgatggtgcaaggataatggtggcagcaaaaaataaaatctttttgtggaatacagactcacgttcaaaggtggctgattgcagaggacatttaagttgggttcatggtgtgatgttttctcctgatggatcatcatttttgacatcttctgatgaccagacaatcaggctctgggagacaaagaaagtatgtaagaactctgctgtaatgttaaagcaagaagtagatgttgtgtttcaagaaaatgaagtgatggtccttgcagttgaccatataagacgtctgcaactcattaatggaagaacaggtcagattgattatctgactgaagctcaagttagctgctgttgcttaagtccacatcttcagtacattgcatttggagatgaaaatggagccattgagattttagaacttgtaaacaatagaatcttccagtccaggtttcagcacaagaaaactgtatggcacatccagttcacagccgatgagaagactcttatttcaagttctgatgatgctgaaattcaggtatggaattggcaattggacaaatgtatctttctacgaggccatcaggaaacagtgaaagactttagactcttgaaaaattcaagactgctttcttggtcatttgatggaacagtgaaggtatggaatattattactggaaataaagaaaaagactttgtctgtcaccagggtacagtactttcttgtgacatttctcacgatgctaccaagttttcatctacctctgctgacaagactgcaaagatatggaatgtctcaaacggtgagcttcttcatttgtgtgctccgctttcagaagaaggagctgctacccatggaggctgggtgactgacctttgcttttctccagatggcaaaatgcttatctctgctggaggatatattaagtggtggaacgttgtcactggggaatcctcacagaccttctacacaaatggaaccaatcttaagaaaatacacgtgtcccctgacttcaaaacatatgtgactgtggataatcttggtattttatatattttacagactttagaataa

SEQ ID NO: 108349 - DNA, 5444 bp, Homo sapiens
  Payload ID: 1289
  Gene Symbol: APAF1
  Gene Name: apoptotic peptidase activating factor 1
  Uniprot ID: O14727
  ENST ID: ENST00000551964
  CDS Start-End: 737-4483
acttctacgcgcgcgggcatgagccgtggcaggagtgcgcggcggcagcggtggccgccccttggggcttggggtgtgtttatttgcataagcgggcgcgcgccgtccgggctgggtggatccggcgggatttgactgctccgctgtccagaggcggagaagaagaggtagcgagtggacgtgactgctctatcccgggcaaaagggatagaaccagaggtggggagtctgggcagtcggcgacccgcgaagacttgaggtgccgcagcggcatccggagtagcgccgggctccctccggggtgcagccgccgtcgggggaagggcgccacaggccgggaagacctcctccctttgtgtccagtagtggggtccaccggagggcggcccgtgggccgggcctcaccgcggcgctccgggactgtggggtcaggctgcgttgggtggacgcccacctcgccaaccttcggaggtccctgggggtcttcgtgcgccccggggctgcagagatccaggggaggcgcctgtgaggcccggacctgccccggggcgaagggtatgtggcgagacagagccctgcacccctaattcccggtggaaaactcctgttgccgtttccctccaccggcctggagtctcccagtcttgtcccggcagtgccgccctccccactaagacctaggcgcaaaggcttggctcatggttgacagctcagagagagaaagatctgagggaagatggatgcaaaagctcgaaattgtttgcttcaacatagagaagctctggaaaaggacatcaagacatcctacatcatggatcacatgattagtgatggatttttaacaatatcagaagaggaaaaagtaagaaatgagcccactcaacagcaaagagcagctatgctgattaaaatgatacttaaaaaagataatgattcctacgtatcattctacaatgctctactacatgaaggatataaagatcttgctgcccttctccatgatggcattcctgttgtctcttcttccagtggtaaagattcagttagtggaataacttcgtatgtaaggacagtcctgtgtgaaggtggagtaccacagaggccagttgtttttgtcacaaggaagaagctggtgaatgcaattcagcagaagctctccaaattgaaaggtgaaccaggatgggtcaccatacatggaatggcaggctgtgggaagtctgtattagctgcagaagctgttagagatcattcccttttagaaggttgtttcccagggggagtgcattgggtttcagttgggaaacaagacaaatctgggcttctgatgaaactgcagaatctttgcacacggttggatcaggatgagagtttttcccagaggcttccacttaatattgaagaggctaaagaccgtctccgcattctgatgcttcgcaaacacccaaggtctctcttgatcttggatgatgtttgggactcttgggtgttgaaagcttttgacagtcagtgtcagattcttcttacaaccagagacaagagtgttacagattcagtaatgggtcctaaatatgtagtccctgtggagagttccttaggaaaggaaaaaggacttgaaattttatccctttttgttaatatgaagaaggcagatttgccagaacaagctcatagtattataaaagaatgtaaaggctctccccttgtagtatctttaattggtgcacttttacgtgattttcccaatcgctgggagtactacctcaaacagcttcagaataagcagtttaagagaataaggaaatcttcgtcttatgattatgaggctctagatgaagccatgtctataagtgttgaaatgctcagagaagacatcaaagattattacacagatctttccatccttcagaaggacgttaaggtgcctacaaaggtgttatgtattctctgggacatggaaactgaagaagttgaagacatactgcaggagtttgtaaataagtctcttttattctgtgatcggaatggaaagtcgtttcgttattatttacatgatcttcaagtagattttcttacagagaagaattgcagccagcttcaggatctacataagaagataatcactcagtttcagagatatcaccagccgcatactctttcaccagatcaggaagactgtatgtattggtacaactttctggcctatcacatggccagtgccaagatgcacaaggaactttgtgctttaatgttttccctggattggattaaagcaaaaacagaacttgtaggccctgctcatctgattcatgaatttgtggaatacagacatatactagatgaaaaggattgtgcagtcagtgagaattttcaggagtttttatctttaaatggacaccttcttggacgacagccatttcctaatattgtacaactgggtctctgtgagccggaaacttcagaagtttatcagcaagctaagctgcaggccaagcaggaggtcgataatggaatgctttacctggaatggataaacaaaaaaaacatcacgaatctttcccgcttagttgtccgcccccacacagatgctgtttaccatgcctgcttttctgaggatggtcagagaatagcttcttgtggagctgataaaaccttacaggtgttcaaagctgaaacaggagagaaacttctagaaatcaaggctcatgaggatgaagtgctttgttgtgcattctctacagatgacagatttatagcaacctgctcagtggataaaaaagtgaagatttggaattctatgactggggaactagtacacacctatgatgagcactcagagcaagtcaattgctgccatttcaccaacagtagtcatcatcttctcttagccactgggtcaagtgactgcttcctcaaactttgggatttgaatcaaaaagaatgtcgaaataccatgtttggtcatacaaattcagtcaatcactgcagattttcaccagatgataagcttttggctagttgttcagctgatggaaccttaaagctttgggatgcgacatcagcaaatgagaggaaaagcattaatgtgaaacagttcttcctaaatttggaggaccctcaagaggatatggaagtgatagtgaagtgttgttcgtggtctgctgatggtgcaaggataatggtggcagcaaaaaataaaatctttctttttgacattcatactagtggcctattgggagaaatccacacgggccatcacagcaccatccagtactgtgacttctccccacaaaaccatttggcagtggttgctttgtcccagtactgtgtagagttgtggaatacagactcacgttcaaaggtggctgattgcagaggacatttaagttgggttcatggtgtgatgttttctcctgatggatcatcatttttgacatcttctgatgaccagacaatcaggctctgggagacaaagaaagtatgtaagaactctgctgtaatgttaaagcaagaagtagatgttgtgtttcaagaaaatgaagtgatggtccttgcagttgaccatataagacgtctgcaactcattaatggaagaacaggtcagattgattatctgactgaagctcaagttagctgctgttgcttaagtccacatcttcagtacattgcatttggagatgaaaatggagccattgagattttagaacttgtaaacaatagaatcttccagtccaggtttcagcacaagaaaactgtatggcacatccagttcacagccgatgagaagactcttatttcaagttctgatgatgctgaaattcaggtatggaattggcaattggacaaatgtatctttctacgaggccatcaggaaacagtgaaagactttagactcttgaaaaattcaagactgctttcttggtcatttgatggaacagtgaaggtatggaatattattactggaaataaagaaaaagactttgtctgtcaccagggtacagtactttcttgtgacatttctcacgatgctaccaagttttcatctacctctgctgacaagactgcaaagatctggagttttgatctccttttgccacttcatgaattgaggggccacaacggctgtgtgcgctgctctgccttctctgtggacagtaccctgctggcaacgggagatgacaatggagaaatcaggatatggaatgtctcaaacggtgagcttcttcatttgtgtgctccgctttcagaagaaggagctgctacccatggaggctgggtgactgacctttgcttttctccagatggcaaaatgcttatctctgctggaggatatattaagtggtggaacgttgtcactggggaatcctcacagaccttctacacaaatggaaccaatcttaagaaaatacacgtgtcccctgacttcaaaacatatgtgactgtggataatcttggtattttatatattttacagactttagaataaaatagttaagcattaatgtagttgaactttttaaatttttgaattggaaaaaaattctaatgaaaccctgatatcaactttttataaagctcttaattgttgtgcagtattgcattcattacaaaagtgtttgtggttggatgaataatattaatgtagctttttcccaaatgaacatacctttaatcttgtttttcatgatcatcattaacagtttgtccttaggatgcaaatgaaaatgtgaatacataccttgttgtactgttggtaaaattctgtcttgatgcattcaaaatggttgacataattaatgagaagaatttggaagaaattggtattttaatactgtctgtatttattactgttatgcaggctgtgcctcagggtagcagtggcctgctttttgaaccacacttaccccaagggggttttgttctcctaaatacaatcttagaggttttttgcactctttaaatttgctttaaaaatattgtgtctgtgtgcatagtctgcagcatttcctttaattgactcaataagtgagtcttggatttagcaggcccccccaccttttttttttgtttttggagacagagtcttgctttgttgccaggctggagtgcagtggcgcgatctcggctcaccacaatcgctgcctcctgggttcaagcaattctcctgcctcagcctcccgagtagctgggactacaggtgtgcgcacatgccaggctaatttttgtatttttagtagagacggggtttcaccatgttggccgggatggtctcgatctcttgacctcatgatctacccgccttggcctcccaaagtgctgagattacaggcgtgagccaccgtgcctggccaggccccttctcttttaatggagacagggtcttgcactatcacccaggctggagtgcagtggcataatcatacctcattgcagcctcagactcctgg

SEQ ID NO: 108350 - DNA, 6581 bp, Homo sapiens
  Payload ID: 1289
  Gene Symbol: APAF1
  Gene Name: apoptotic peptidase activating factor 1
  Uniprot ID: O14727
  ENST ID: ENST00000550527
  CDS Start-End: 8-3721
agggaagatggatgcaaaagctcgaaattgtttgcttcaacatagagaagctctggaaaaggacatcaagacatcctacatcatggatcacatgattagtgatggatttttaacaatatcagaagaggaaaaagtaagaaatgagcccactcaacagcaaagagcagctatgctgattaaaatgatacttaaaaaagataatgattcctacgtatcattctacaatgctctactacatgaaggatataaagatcttgctgcccttctccatgatggcattcctgttgtctcttcttccagtgtaaggacagtcctgtgtgaaggtggagtaccacagaggccagttgtttttgtcacaaggaagaagctggtgaatgcaattcagcagaagctctccaaattgaaaggtgaaccaggatgggtcaccatacatggaatggcaggctgtgggaagtctgtattagctgcagaagctgttagagatcattcccttttagaaggttgtttcccagggggagtgcattgggtttcagttgggaaacaagacaaatctgggcttctgatgaaactgcagaatctttgcacacggttggatcaggatgagagtttttcccagaggcttccacttaatattgaagaggctaaagaccgtctccgcattctgatgcttcgcaaacacccaaggtctctcttgatcttggatgatgtttgggactcttgggtgttgaaagcttttgacagtcagtgtcagattcttcttacaaccagagacaagagtgttacagattcagtaatgggtcctaaatatgtagtccctgtggagagttccttaggaaaggaaaaaggacttgaaattttatccctttttgttaatatgaagaaggcagatttgccagaacaagctcatagtattataaaagaatgtaaaggctctccccttgtagtatctttaattggtgcacttttacgtgattttcccaatcgctgggagtactacctcaaacagcttcagaataagcagtttaagagaataaggaaatcttcgtcttatgattatgaggctctagatgaagccatgtctataagtgttgaaatgctcagagaagacatcaaagattattacacagatctttccatccttcagaaggacgttaaggtgcctacaaaggtgttatgtattctctgggacatggaaactgaagaagttgaagacatactgcaggagtttgtaaataagtctcttttattctgtgatcggaatggaaagtcgtttcgttattatttacatgatcttcaagtagattttcttacagagaagaattgcagccagcttcaggatctacataagaagataatcactcagtttcagagatatcaccagccgcatactctttcaccagatcaggaagactgtatgtattggtacaactttctggcctatcacatggccagtgccaagatgcacaaggaactttgtgctttaatgttttccctggattggattaaagcaaaaacagaacttgtaggccctgctcatctgattcatgaatttgtggaatacagacatatactagatgaaaaggattgtgcagtcagtgagaattttcaggagtttttatctttaaatggacaccttcttggacgacagccatttcctaatattgtacaactgggtctctgtgagccggaaacttcagaagtttatcagcaagctaagctgcaggccaagcaggaggtcgataatggaatgctttacctggaatggataaacaaaaaaaacatcacgaatctttcccgcttagttgtccgcccccacacagatgctgtttaccatgcctgcttttctgaggatggtcagagaatagcttcttgtggagctgataaaaccttacaggtgttcaaagctgaaacaggagagaaacttctagaaatcaaggctcatgaggatgaagtgctttgttgtgcattctctacagatgacagatttatagcaacctgctcagtggataaaaaagtgaagatttggaattctatgactggggaactagtacacacctatgatgagcactcagagcaagtcaattgctgccatttcaccaacagtagtcatcatcttctcttagccactgggtcaagtgactgcttcctcaaactttgggatttgaatcaaaaagaatgtcgaaataccatgtttggtcatacaaattcagtcaatcactgcagattttcaccagatgataagcttttggctagttgttcagctgatggaaccttaaagctttgggatgcgacatcagcaaatgagaggaaaagcattaatgtgaaacagttcttcctaaatttggaggaccctcaagaggatatggaagtgatagtgaagtgttgttcgtggtctgctgatggtgcaaggataatggtggcagcaaaaaataaaatctttctttttgacattcatactagtggcctattgggagaaatccacacgggccatcacagcaccatccagtactgtgacttctccccacaaaaccatttggcagtggttgctttgtcccagtactgtgtagagttgtggaatacagactcacgttcaaaggtggctgattgcagaggacatttaagttgggttcatggtgtgatgttttctcctgatggatcatcatttttgacatcttctgatgaccagacaatcaggctctgggagacaaagaaagtatgtaagaactctgctgtaatgttaaagcaagaagtagatgttgtgtttcaagaaaatgaagtgatggtccttgcagttgaccatataagacgtctgcaactcattaatggaagaacaggtcagattgattatctgactgaagctcaagttagctgctgttgcttaagtccacatcttcagtacattgcatttggagatgaaaatggagccattgagattttagaacttgtaaacaatagaatcttccagtccaggtttcagcacaagaaaactgtatggcacatccagttcacagccgatgagaagactcttatttcaagttctgatgatgctgaaattcaggtatggaattggcaattggacaaatgtatctttctacgaggccatcaggaaacagtgaaagactttagactcttgaaaaattcaagactgctttcttggtcatttgatggaacagtgaaggtatggaatattattactggaaataaagaaaaagactttgtctgtcaccagggtacagtactttcttgtgacatttctcacgatgctaccaagttttcatctacctctgctgacaagactgcaaagatctggagttttgatctccttttgccacttcatgaattgaggggccacaacggctgtgtgcgctgctctgccttctctgtggacagtaccctgctggcaacgggagatgacaatggagaaatcaggatatggaatgtctcaaacggtgagcttcttcatttgtgtgctccgctttcagaagaaggagctgctacccatggaggctgggtgactgacctttgcttttctccagatggcaaaatgcttatctctgctggaggatatattaagtggtggaacgttgtcactggggaatcctcacagaccttctacacaaatggaaccaatcttaagaaaatacacgtgtcccctgacttcaaaacatatgtgactgtggataatcttggtattttatatattttacagactttagaataaaatagttaagcattaatgtagttgaactttttaaatttttgaattggaaaaaaattctaatgaaaccctgatatcaactttttataaagctcttaattgttgtgcagtattgcattcattacaaaagtgtttgtggttggatgaataatattaatgtagctttttcccaaatgaacatacctttaatcttgtttttcatgatcatcattaacagtttgtccttaggatgcaaatgaaaatgtgaatacataccttgttgtactgttggtaaaattctgtcttgatgcattcaaaatggttgacataattaatgagaagaatttggaagaaattggtattttaatactgtctgtatttattactgttatgcaggctgtgcctcagggtagcagtggcctgctttttgaaccacacttaccccaagggggttttgttctcctaaatacaatcttagaggttttttgcactctttaaatttgctttaaaaatattgtgtctgtgtgcatagtctgcagcatttcctttaattgactcaataagtgagtcttggatttagcaggcccccccaccttttttttttgtttttggagacagagtcttgctttgttgccaggctggagtgcagtggcgcgatctcggctcaccacaatcgctgcctcctgggttcaagcaattctcctgcctcagcctcccgagtagctgggactacaggtgtgcgcacatgccaggctaatttttgtatttttagtagagacggggtttcaccatgttggccgggatggtctcgatctcttgacctcatgatctacccgccttggcctcccaaagtgctgagattacaggcgtgagccaccgtgcctggccaggccccttctcttttaatggagacagggtcttgcactatcacccaggctggagtgcagtggcataatcatacctcattgcagcctcagactcctgggttcaagcaatcctcctgcctcagcctcccaagtagctgagactacaggcacgagccaccacacccagctaatttttaagttttcttgtagagacagggtctcactatgttgtctaggctggtcttgaactcttggcctcaagtaatcctcctgcctcagcctcccaaagtgttgggattgcagatatgagccactggcctggccttcagcagttctttttgtgaagtaaaacttgtatgttggaaagagtagattttattggtctacccttttctcactgtagctgctggcagccctgtgccatatctggactctagttgtcagtatctgagttggacactattcctgctccctcttgtttcttacatatcagacttcttacttgaatgaaacctgatctttcctaatcctcacttttttcttttttaaaaagcagtttctccactgctaaatgttagtcattgaggtggggccaattttaatcataagccttaataagatttttctaagaaatgtgaaatagaacaattttcatctaattccatttacttttagatgaatggcattgtgaatgccattcttttaatgaatttcaagagaattctctggttttctgtgtaattccagatgagtcactgtaactctagaagattaaccttccagccaacctattttcctttcccttgtctctctcatcctcttttccttccttctttcctttctcttcttttatctccaaggttaatcaggaaaaatagcttttgacaggggaaaaaactcaataactagctatttttgacctcctgatcaggaactttagttgaagcgtaaatctaaagaaacattttctctgaaatatattattaagggcaatggagataaattaatagtagatgtggttcccagaaaatataatcaaaattcaaagattttttttgtttctgtaactggaactaaatcaaatgattactagtgttaatagtagataacttgtttttattgttggtgcatattagtataactgtggggtaggtcggggagagggtaagggaatagatcactcagatgtattttagataagctatttagcctttgatggaatcataaatacagtgaatacaatcctttgcattgttaaggaggttttttgtttttaaatggtgggtcaaggagctagtttacaggcttactgtgatttaagcaaatgtgaaaagtgaaaccttaattttatcaaaagaaatttctgtaaatggtatgtctccttagaatacccaaatcataattttatttgtacacactgttaggggctcatctcatgtaggcagagtataaagtattaccttttggaattaaaagccactgactgttataaagtataacaacacacatcaggttttaaaaagccttgaatggcccttgtcttaaaaagaaattaggagccaggtgcggtggcacgtgcctgtaatcccagctccttgggaggctaagacaggaggattccttgagccctggagtttgagtccagcctgggtgacatagcaagaccctgtcttaaaagaaaaatgggaagaaagacaaggtaacatgaagaaagaagagatacctagtatgatggagctgcaaatttcatggcagttcatgcagtcggtcaagaggaggattttgttttgtagtttgcagatgagcatttctaaagcattttcccttgctgtatttttttgtattataaattacattggacttcatatatataatttttttttacattatatgtctcttgtatgttttgaaactcttgtatttatgatatagcttatatgatttttttgccttggtatacattttaaaatatgaatttaaaaaatttttgtaaaaataaaattcacaaaattgttttg

SEQ ID NO: 108351 - DNA, 1143 bp, Homo sapiens
  Payload ID: 1289
  Gene Symbol: APAF1
  Gene Name: apoptotic peptidase activating factor 1
  Uniprot ID: O14727
  ENST ID: ENST00000552268
  CDS Start-End: 45-1061
tagctcatggttgacagctcagagagagaaagatctgagggaagatggatgcaaaagctcgaaattgtttgcttcaacatagagaagctctggaaaaggacatcaagacatcctacatcatggatcacatgattagtgatggatttttaacaatatcagaagaggaaaaagtaagaaatgagcccactcaacagcaaagagcagctatgctgattaaaatgatacttaaaaaagataatgattcctacgtatcattctacaatgctctactacatgaaggatataaagatcttgctgcccttctccatgatggcattcctgttgtctcttcttccagtggtaaagattcagttagtggaataacttcgtatgtaaggacagtcctgtgtgaaggtggagtaccacagaggccagttgtttttgtcacaaggaagaagctggtgaatgcaattcagcagaagctctccaaattgaaaggtgaaccaggatgggtcaccatacatggaatggcaggctgtgggaagtctgtattagctgcagaagctgttagagatcattcccttttagaaggttgtttcccagggggagtgcattgggtttcagttgggaaacaagacaaatctgggcttctgatgaaactgcagaatctttgcacacggttggatcaggatgagagtttttcccagaggcttccacttaatattgaagaggctaaagaccgtctccgcattctgatgcttcgcaaacacccaaggtctctcttgatcttggatgatgtttgggactcttgggtgttgaaagcttttgacagtcagtgtcagattcttcttacaaccagagacaagagtgttacagattcagtaatgggtcctaaatatgtagtccctgtggagagttccttaggaaaggaaaaaggacttgaaattttatccctttttgttaatatgaagaaggcagatttgccagaacaagctcatagtattataaaagaatgtaaagtggtggaacgttgtcactggggaatcctcacagaccttctacacaaatggaaccaatcttaagaaaatacacgtgtcccctgacttcaaaacatatgtgactgtggataatcttggtattttatatattttacagactttagaa

SEQ ID NO: 108352 - DNA, 3744 bp, Homo sapiens
  Payload ID: 1289
  Gene Symbol: APAF1
  Gene Name: apoptotic peptidase activating factor 1
  Uniprot ID: O14727
  ENST ID: ENST00000547045
  CDS Start-End: 6-3623
ggaagatggatgcaaaagctcgaaattgtttgcttcaacatagagaagctctggaaaaggacatcaagacatcctacatcatggatcacatgattagtgatggatttttaacaatatcagaagaggaaaaagtaagaaatgagcccactcaacagcaaagagcagctatgctgattaaaatgatacttaaaaaagataatgattcctacgtatcattctacaatgctctactacatgaaggatataaagatcttgctgcccttctccatgatggcattcctgttgtctcttcttccagtggtaaagattcagttagtggaataacttcgtatgtaaggacagtcctgtgtgaaggtggagtaccacagaggccagttgtttttgtcacaaggaagaagctggtgaatgcaattcagcagaagctctccaaattgaaaggtgaaccaggatgggtcaccatacatggaatggcaggctgtgggaagtctgtattagctgcagaagctgttagagatcattcccttttagaaggttgtttcccagggggagtgcattgggtttcagttgggaaacaagacaaatctgggcttctgatgaaactgcagaatctttgcacacggttggatcaggatgagagtttttcccagaggcttccacttaatattgaagaggctaaagaccgtctccgcattctgatgcttcgcaaacacccaaggtctctcttgatcttggatgatgtttgggactcttgggtgttgaaagcttttgacagtcagtgtcagattcttcttacaaccagagacaagagtgttacagattcagtaatgggtcctaaatatgtagtccctgtggagagttccttaggaaaggaaaaaggacttgaaattttatccctttttgttaatatgaagaaggcagatttgccagaacaagctcatagtattataaaagaatgtaaaggctctccccttgtagtatctttaattggtgcacttttacgtgattttcccaatcgctgggagtactacctcaaacagcttcagaataagcagtttaagagaataaggaaatcttcgtcttatgattatgaggctctagatgaagccatgtctataagtgttgaaatgctcagagaagacatcaaagattattacacagatctttccatccttcagaaggacgttaaggtgcctacaaaggtgttatgtattctctgggacatggaaactgaagaagttgaagacatactgcaggagtttgtaaataagtctcttttattctgtgatcggaatggaaagtcgtttcgttattatttacatgatcttcaagtagattttcttacagagaagaattgcagccagcttcaggatctacataagaagataatcactcagtttcagagatatcaccagccgcatactctttcaccagatcaggaagactgtatgtattggtacaactttctggcctatcacatggccagtgccaagatgcacaaggaactttgtgctttaatgttttccctggattggattaaagcaaaaacagaacttgtaggccctgctcatctgattcatgaatttgtggaatacagacatatactagatgaaaaggattgtgcagtcagtgagaattttcaggagtttttatctttaaatggacaccttcttggacgacagccatttcctaatattgtacaactgggtctctgtgagccggaaacttcagaagtttatcagcaagctaagctgcaggccaagcaggaggtcgataatggaatgctttacctggaatggataaacaaaaaaaacatcacgaatctttcccgcttagttgtccgcccccacacagatgctgtttaccatgcctgcttttctgaggatggtcagagaatagcttcttgtggagctgataaaaccttacaggtgttcaaagctgaaacaggagagaaacttctagaaatcaaggctcatgaggatgaagtgctttgttgtgcattctctacagatgacagatttatagcaacctgctcagtggataaaaaagtgaagatttggaattctatgactggggaactagtacacacctatgatgagcactcagagcaagtcaattgctgccatttcaccaacagtagtcatcatcttctcttagccactgggtcaagtgactgcttcctcaaactttgggatttgaatcaaaaagaatgtcgaaataccatgtttggtcatacaaattcagtcaatcactgcagattttcaccagatgataagcttttggctagttgttcagctgatggaaccttaaagctttgggatgcgacatcagcaaatgagaggaaaagcattaatgtgaaacagttcttcctaaatttggaggaccctcaagaggatatggaagtgatagtgaagtgttgttcgtggtctgctgatggtgcaaggataatggtggcagcaaaaaataaaatctttttgtggaatacagactcacgttcaaaggtggctgattgcagaggacatttaagttgggttcatggtgtgatgttttctcctgatggatcatcatttttgacatcttctgatgaccagacaatcaggctctgggagacaaagaaagtatgtaagaactctgctgtaatgttaaagcaagaagtagatgttgtgtttcaagaaaatgaagtgatggtccttgcagttgaccatataagacgtctgcaactcattaatggaagaacaggtcagattgattatctgactgaagctcaagttagctgctgttgcttaagtccacatcttcagtacattgcatttggagatgaaaatggagccattgagattttagaacttgtaaacaatagaatcttccagtccaggtttcagcacaagaaaactgtatggcacatccagttcacagccgatgagaagactcttatttcaagttctgatgatgctgaaattcaggtatggaattggcaattggacaaatgtatctttctacgaggccatcaggaaacagtgaaagactttagactcttgaaaaattcaagactgctttcttggtcatttgatggaacagtgaaggtatggaatattattactggaaataaagaaaaagactttgtctgtcaccagggtacagtactttcttgtgacatttctcacgatgctaccaagttttcatctacctctgctgacaagactgcaaagatctggagttttgatctccttttgccacttcatgaattgaggggccacaacggctgtgtgcgctgctctgccttctctgtggacagtaccctgctggcaacgggagatgacaatggagaaatcaggatatggaatgtctcaaacggtgagcttcttcatttgtgtgctccgctttcagaagaaggagctgctacccatggaggctgggtgactgacctttgcttttctccagatggcaaaatgcttatctctgctggaggatatattaagtggtggaacgttgtcactggggaatcctcacagaccttctacacaaatggaaccaatcttaagaaaatacacgtgtcccctgacttcaaaacatatgtgactgtggataatcttggtattttatatattttacagactttagaataaaatagttaagcattaatgtagttgaactttttaaatttttgaattggaaaaaaattctaatgaaaccctgatatcaactttttataaagctcttaattgttgtgcagtattgcattcatta

SEQ ID NO: 108353 - DNA, 651 bp, Homo sapiens
  Payload ID: 1289
  Gene Symbol: APAF1
  Gene Name: apoptotic peptidase activating factor 1
  ENST ID: ENST00000547743
  CDS Start-End: 207-599
gcccggacctgccccggggcgaagggtatgtggcgagacagagccctgcacccctaattcccggtggaaaactcctgttgccgtttccctccaccggcctggagtctcccagtcttgtcccggcagtgccgccctccccactaagacctaggcgcaaaggcttggctcatggttgacagctcagagagagaaagatctgagggaagatggatgcaaaagctcgaaattgtttgcttcaacatagagaagctctggaaaaggacatcaagacatcctacatcatggatcacatgattagtgatggatttttaacaatatcagaagaggaaaaagtaagaaatgagcccactcaacagcaaagagcagctatgctgattaaaatgatacttaaaaaagataatgattcctacgtatcattctacaatgctctactacatgaaggatataaagatcttgctgcccttctccatgatggcattcctgttgtctcttcttccagtggtaaagattcagttagtggaataacttcgtatggtttgtatccattataccttctatcactttgctatcaaaattgctttgggtttgtcttattgtagatgtaatcttttgaagagagtgtgaccagttcactgaaaactgcatgttaaa

SEQ ID NO: 108354 - DNA, 1859 bp, Homo sapiens
  Payload ID: 1290
  Gene Symbol: APTX
  Gene Name: aprataxin
  Uniprot ID: Q7Z2E3
  ENST ID: ENST00000309615
  CDS Start-End: 102-968
aggcacagatgagtaacgtgaatttgtccgtctccgacttctggaggtaaggcggtcgtcagcctatctcttctgctggctgggctcaatgccgcggagtgatgatgcgggtgtgctggttggtgagacaggacagccggcaccagcgaatcagacttccacatttggaagcagttgtgattgggcgtggcccagagaccaagatcactgataagaaatgttctcgacagcaagagtttgaggaagaggcaaagaaccctggcctggaaacacacaggaagagaaagagatcaggcaacagtgattctatagaaagggatgctgctcaggaagctgaggctgggacagggctggaacctgggagcaactctggccaatgctctgtgcccctaaagaagggaaaagatgcacctatcaaaaaggaatccctgggccactggagtcaaggcttgaagatttctatgcaggaccccaaaatgcaggtttacaaagatgagcaggtggtggtgataaaggataaatacccaaaggcccgttaccattggctggtcttaccgtggacctccatttccagtctgaaggctgtggccagggaacaccttgaactccttaagcatatgcacactgtgggggaaaaggtgattgtagattttgctgggtccagcaaactccgcttccgattgggctaccacgccattccgagtatgagccatgtacatcttcatgtgatcagccaggattttgattctccttgccttaaaaacaaaaaacattggaattctttcaatacagaatacttcctagaatcacaagctgtgatcgagatggtacaagaggctggtagagtaactgtccgagatgggatgcctgagctcttgaagctgccccttcgttgtcatgagtgccagcagctgctgccttccattcctcagctgaaagaacatctcaggaagcactggacacagtgattctgcagagcctgagctgctgctgtggtgtggcccactggagcaaactgctggcacctattctgggttgcttgtgaacttctactcatttcctaaattaaaacatgcagctttttcacaaatttattctattattgagtggccacaatgtagagtggctcaaagtacttcaggattaggaatttgggtttgtcatagatgtattctctggtgagggtggctgggatatacctgacccaccatcttcagaaggacccatgtcaggtctgaccattgggagcaaagccatgttcacactgacctaatgcagagtatggaagcattgggctggttatacatttctgtttcttagatttatcctccgcctctgtaggcatggacaacctttaatcagagcatctagagtggcctcttgtttatcctgaagatactgatgggtcttgttttctgttagtctgttttgtaatattcttttcccttccttcatggggaggcttagtttgtccagtccttccatgcccttctatcccagattacctaaatgttcccttctcaggaattctgtctcatcagttcttcacagtgagaaaagaggctagatgatggtgtggggggttggagttttcttctaataccgagggttcctggctgtgaggaaacagccacatgttcgtcatgattgagctgtgaagtcttcttggacctgttgtctgaaaataaagttaatttgtttgaggcatctctcttaagtaggtggaaactattgaagttcagctaacaatcacagcataggttctgatgcatggaaaggtggttggtgaatgaaaaagttgcgtagagccactactttctttttccctgagaataaatttggataaaacagttgtattc

SEQ ID NO: 108355 - DNA, 599 bp, Homo sapiens
  Payload ID: 1290
  Gene Symbol: APTX
  Gene Name: aprataxin
  ENST ID: ENST00000379812
  CDS Start-End: 4-599
cagatgagtaacgtgaatttgtccgtctccgacttctggagagtgatgatgcgggtgtgctggttggtgagacaggacagccggcaccagcgaatcagacttccacatttggaagcagttgtgattgggcgtggcccagagaccaagatcactgataagaaatgttctcgacagcaagtacagttgaaagcagagtgtaacaagggatatgtcaaggtaaagcaggtaggagtcaatcccaccagcattgactcagtcgtaattgggaaggaccaagaggtgaagctgcagcctggccaggttctccacatggaatccctgggccactggagtcaaggcttgaagatttctatgcaggaccccaaaatgcaggtttacaaagatgagcaggtggtggtgataaaggataaatacccaaaggcccgttaccattggctggtcttaccgtggacctccatttccagtctgaaggctgtggccagggaacaccttgaactccttaagcatatgcacactgtgggggaaaaggtgattgtagattttgctgggtccagcaaactccgcttccgattgggctaccacgccattccgagtatgag

SEQ ID NO: 108356 - DNA, 1121 bp, Homo sapiens
  Payload ID: 1290
  Gene Symbol: APTX
  Gene Name: aprataxin
  ENST ID: ENST00000379813
  CDS Start-End: 9-1019
aggcacagatgagtaacgtgaatttgtccgtctccgacttctggagagtgatgatgcgggtgtgctggttggtgagacaggacagccggcaccagcgaatcagacttccacatttggaagcagttgtgattgggcgtggcccagagaccaagatcactgataagaaatgttctcgacagcaagtacagttgaaagcagagtgtaacaagggatatgtcaaggtaaagcaggtaggagtcaatcccaccagcattgactcagtcgtaattgggaaggaccaagaggtgaagctgcagcctggccaggttctccacatggtgaatgaactttatccatatattgtagagtttgaggaagaggcaaagaaccctggcctggaaacacacaggaagagaaagagatcaggcaacagtgattctatagaaagggatgctgctcaggaagctgaggctgggacagggctggaacctgggagcaactctggccaatgctctgtgcccctaaagaagggaaaagatgcacctatcaaaaaggtttacaaagatgagcaggtggtggtgataaaggataaatacccaaaggcccgttaccattggctggtcttaccgtggacctccatttccagtctgaaggctgtggccagggaacaccttgaactccttaagcatatgcacactgtgggggaaaaggtgattgtagattttgctgggtccagcaaactccgcttccgattgggctaccacgccattccgagtatgagccatgtacatcttcatgtgatcagccaggattttgattctccttgccttaaaaacaaaaaacattggaattctttcaatacagaatacttcctagaatcacaagctgtgatcgagatggtacaagaggctggtagagtaactgtccgagatgggatgcctgagctcttgaagctgccccttcgttgtcatgagtgccagcagctgctgccttccattcctcagctgaaagaacatctcaggaagcactggacacagtgattctgcagagcctgagctgctgctgtggtgtggcccactggagcaaactgctggcacctattctgggttgcttgtgaacttctactcatttcctaaattaaa

SEQ ID NO: 108357 - DNA, 2106 bp, Homo sapiens
  Payload ID: 1290
  Gene Symbol: APTX
  Gene Name: aprataxin
  Uniprot ID: Q7Z2E3
  ENST ID: ENST00000379817
  CDS Start-End: 198-1226
attttcacaacagcctcctgagtcccatcattatcatggtttataggtgaggaaattgagactagggtggtgaagtcacttgcctcaagatgaacagctggtagatcacatgcgtggtggcaccgggtgtggccctggaggactcgtgctagtggatctgtttttctagtgattcttttgttttgtcccttagagtgatgatgcgggtgtgctggttggtgagacaggacagccggcaccagcgaatcagacttccacatttggaagcagttgtgattgggcgtggcccagagaccaagatcactgataagaaatgttctcgacagcaagtacagttgaaagcagagtgtaacaagggatatgtcaaggtaaagcaggtaggagtcaatcccaccagcattgactcagtcgtaattgggaaggaccaagaggtgaagctgcagcctggccaggttctccacatggtgaatgaactttatccatatattgtagagtttgaggaagaggcaaagaaccctggcctggaaacacacaggaagagaaagagatcaggcaacagtgattctatagaaagggatgctgctcaggaagctgaggctgggacagggctggaacctgggagcaactctggccaatgctctgtgcccctaaagaagggaaaagatgcacctatcaaaaaggaatccctgggccactggagtcaaggcttgaagatttctatgcaggaccccaaaatgcaggtttacaaagatgagcaggtggtggtgataaaggataaatacccaaaggcccgttaccattggctggtcttaccgtggacctccatttccagtctgaaggctgtggccagggaacaccttgaactccttaagcatatgcacactgtgggggaaaaggtgattgtagattttgctgggtccagcaaactccgcttccgattgggctaccacgccattccgagtatgagccatgtacatcttcatgtgatcagccaggattttgattctccttgccttaaaaacaaaaaacattggaattctttcaatacagaatacttcctagaatcacaagctgtgatcgagatggtacaagaggctggtagagtaactgtccgagatgggatgcctgagctcttgaagctgccccttcgttgtcatgagtgccagcagctgctgccttccattcctcagctgaaagaacatctcaggaagcactggacacagtgattctgcagagcctgagctgctgctgtggtgtggcccactggagcaaactgctggcacctattctgggttgcttgtgaacttctactcatttcctaaattaaaacatgcagctttttcacaaatttattctattattgagtggccacaatgtagagtggctcaaagtacttcaggattaggaatttgggtttgtcatagatgtattctctggtgagggtggctgggatatacctgacccaccatcttcagaaggacccatgtcaggtctgaccattgggagcaaagccatgttcacactgacctaatgcagagtatggaagcattgggctggttatacatttctgtttcttagatttatcctccgcctctgtaggcatggacaacctttaatcagagcatctagagtggcctcttgtttatcctgaagatactgatgggtcttgttttctgttagtctgttttgtaatattcttttcccttccttcatggggaggcttagtttgtccagtccttccatgcccttctatcccagattacctaaatgttcccttctcaggaattctgtctcatcagttcttcacagtgagaaaagaggctagatgatggtgtggggggttggagttttcttctaataccgagggttcctggctgtgaggaaacagccacatgttcgtcatgattgagctgtgaagtcttcttggacctgttgtctgaaaataaagttaatttgtttgaggcatctctcttaagtaggtggaaactattgaagttcagctaacaatcacagcataggttctgatgcatggaaaggtggttggtgaatgaaaaagttgcgtagagccactactttctttttccctgagaataaatttggataaaa

SEQ ID NO: 108358 - DNA, 1820 bp, Homo sapiens
  Payload ID: 1290
  Gene Symbol: APTX
  Gene Name: aprataxin
  Uniprot ID: Q7Z2E3
  ENST ID: ENST00000379819
  CDS Start-End: 1-1071
atgagtaacgtgaatttgtccgtctccgacttctggagagtgatgatgcgggtgtgctggttggtgagacaggacagccggcaccagcgaatcagacttccacatttggaagcagttgtgattgggcgtggcccagagaccaagatcactgataagaaatgttctcgacagcaagtacagttgaaagcagagtgtaacaagggatatgtcaaggtaaagcaggtaggagtcaatcccaccagcattgactcagtcgtaattgggaaggaccaagaggtgaagctgcagcctggccaggttctccacatggtgaatgaactttatccatatattgtagagtttgaggaagaggcaaagaaccctggcctggaaacacacaggaagagaaagagatcaggcaacagtgattctatagaaagggatgctgctcaggaagctgaggctgggacagggctggaacctgggagcaactctggccaatgctctgtgcccctaaagaagggaaaagatgcacctatcaaaaaggaatccctgggccactggagtcaaggcttgaagatttctatgcaggaccccaaaatgcaggtttacaaagatgagcaggtggtggtgataaaggataaatacccaaaggcccgttaccattggctggtcttaccgtggacctccatttccagtctgaaggctgtggccagggaacaccttgaactccttaagcatatgcacactgtgggggaaaaggtgattgtagattttgctgggtccagcaaactccgcttccgattgggctaccacgccattccgagtatgagccatgtacatcttcatgtgatcagccaggattttgattctccttgccttaaaaacaaaaaacattggaattctttcaatacagaatacttcctagaatcacaagctgtgatcgagatggtacaagaggctggtagagtaactgtccgagatgggatgcctgagctcttgaagctgccccttcgttgtcatgagtgccagcagctgctgccttccattcctcagctgaaagaacatctcaggaagcactggacacagtgattctgcagagcctgagctgctgctgtggtgtggcccactggagcaaactgctggcacctattctgggttgcttgtgaacttctactcatttcctaaattaaaacatgcagctttttcacaaatttattctattattgagtggccacaatgtagagtggctcaaagtacttcaggattaggaatttgggtttgtcatagatgtattctctggtgagggtggctgggatatacctgacccaccatcttcagaaggacccatgtcaggtctgaccattgggagcaaagccatgttcacactgacctaatgcagagtatggaagcattgggctggttatacatttctgtttcttagatttatcctccgcctctgtaggcatggacaacctttaatcagagcatctagagtggcctcttgtttatcctgaagatactgatgggtcttgttttctgttagtctgttttgtaatattcttttcccttccttcatggggaggcttagtttgtccagtccttccatgcccttctatcccagattacctaaatgttcccttctcaggaattctgtctcatcagttcttcacagtgagaaaagaggctagatgatggtgtggggggttggagttttcttctaataccgagggttcctggctgtgaggaaacagccacatgttcgtcatgattgagctgtgaagtcttcttggacctgttgtctgaaaataaagttaatttgtttgaggcatctctcttaa

SEQ ID NO: 108359 - DNA, 2023 bp, Homo sapiens
  Payload ID: 1290
  Gene Symbol: APTX
  Gene Name: aprataxin
  Uniprot ID: Q7Z2E3
  ENST ID: ENST00000379825
  CDS Start-End: 25-945
agcgccggaagcggtgaggcacagatgagtaacgtgaatttgtccgtctccgacttctggagagtgatgatgcgggtgtgctggttggtgagacaggacagccggcaccagcgaatcagacttccacatttggaagcagttgtgattgggcgtggcccagagaccaagatcactgataagaaatgttctcgacagcaagtacagttgaaagcagagtgtaacaagggatatgtcaaggtaaagcaggtaggagtcaatcccaccagcattgactcagtcgtaattgggaaggaccaagaggtgaagctgcagcctggccaggttctccacatggtgaatgaactttatccatatattgtagagtttgaggaagaggcaaagaaccctggcctggaaacacacaggaagagaaagagatcaggcaacagtgattctatagaaagggatgctgctcaggaagctgaggctgggacagggctggaacctgggagcaactctggccaatgctctgtgcccctaaagaagggaaaagatgcacctatcaaaaaggaatccctgggccactggagtcaaggcttgaagatttctatgcaggaccccaaaatgcaggtttacaaagatgagcaggtggtggtgataaaggataaatacccaaaggcccgttaccattggctggtcttaccgtggacctccatttccagtctgaaggctgtggccagggaacaccttgaactccttaagcatatgcacactgtgggggaaaaggtgattgtagattttgctgggtccagcaaactccgcttccgattgggctaccacgccattccgagtatgagccatgtacatcttcatgtgatcagccaggattttgattctccttgccttaaaaacaaaaaacattggaattctttcaatacagaatacttcctagaatcacaagagtagctgggatttgacttttcttccttgcctgcagctgtgatcgagatggtacaagaggctggtagagtaactgtccgagatgggatgcctgagctcttgaagctgccccttcgttgtcatgagtgccagcagctgctgccttccattcctcagctgaaagaacatctcaggaagcactggacacagtgattctgcagagcctgagctgctgctgtggtgtggcccactggagcaaactgctggcacctattctgggttgcttgtgaacttctactcatttcctaaattaaaacatgcagctttttcacaaatttattctattattgagtggccacaatgtagagtggctcaaagtacttcaggattaggaatttgggtttgtcatagatgtattctctggtgagggtggctgggatatacctgacccaccatcttcagaaggacccatgtcaggtctgaccattgggagcaaagccatgttcacactgacctaatgcagagtatggaagcattgggctggttatacatttctgtttcttagatttatcctccgcctctgtaggcatggacaacctttaatcagagcatctagagtggcctcttgtttatcctgaagatactgatgggtcttgttttctgttagtctgttttgtaatattcttttcccttccttcatggggaggcttagtttgtccagtccttccatgcccttctatcccagattacctaaatgttcccttctcaggaattctgtctcatcagttcttcacagtgagaaaagaggctagatgatggtgtggggggttggagttttcttctaataccgagggttcctggctgtgaggaaacagccacatgttcgtcatgattgagctgtgaagtcttcttggacctgttgtctgaaaataaagttaatttgtttgaggcatctctcttaagtaggtggaaactattgaagttcagctaacaatcacagcataggttctgatgcatggaaaggtggttggtgaatgaaaaagttgcgtagagccactactttctttttccctgagaataaatttggataaaacagttgtattca

SEQ ID NO: 108360 - DNA, 1740 bp, Homo sapiens
  Payload ID: 1290
  Gene Symbol: APTX
  Gene Name: aprataxin
  Uniprot ID: Q7Z2E3
  ENST ID: ENST00000397172
  CDS Start-End: 4-858
cagatgagtaacgtgaatttgtccgtctccgacttctggagagtgatgatgcgggtgtgctggttggtgagacaggacagccggcaccagcgaatcagacttccacatttggaagcagttgtgattgggcgtggcccagagaccaagatcactgataagaaatgttctcgacagcaagtacagttgaaagcagagtgtaacaagggatatgtcaaggtaaagcaggtaggagtcaatcccaccagcattgactcagtcgtaattgggaaggaccaagaggtgaagctgcagcctggccaggttctccacatggaatccctgggccactggagtcaaggcttgaagatttctatgcaggaccccaaaatgcaggtttacaaagatgagcaggtggtggtgataaaggataaatacccaaaggcccgttaccattggctggtcttaccgtggacctccatttccagtctgaaggctgtggccagggaacaccttgaactccttaagcatatgcacactgtgggggaaaaggtgattgtagattttgctgggtccagcaaactccgcttccgattgggctaccacgccattccgagtatgagccatgtacatcttcatgtgatcagccaggattttgattctccttgccttaaaaacaaaaaacattggaattctttcaatacagaatacttcctagaatcacaagctgtgatcgagatggtacaagaggctggtagagtaactgtccgagatgggatgcctgagctcttgaagctgccccttcgttgtcatgagtgccagcagctgctgccttccattcctcagctgaaagaacatctcaggaagcactggacacagtgattctgcagagcctgagctgctgctgtggtgtggcccactggagcaaactgctggcacctattctgggttgcttgtgaacttctactcatttcctaaattaaaacatgcagctttttcacaaatttattctattattgagtggccacaatgtagagtggctcaaagtacttcaggattaggaatttgggtttgtcatagatgtattctctggtgagggtggctgggatatacctgacccaccatcttcagaaggacccatgtcaggtctgaccattgggagcaaagccatgttcacactgacctaatgcagagtatggaagcattgggctggttatacatttctgtttcttagatttatcctccgcctctgtaggcatggacaacctttaatcagagcatctagagtggcctcttgtttatcctgaagatactgatgggtcttgttttctgttagtctgttttgtaatattcttttcccttccttcatggggaggcttagtttgtccagtccttccatgcccttctatcccagattacctaaatgttcccttctcaggaattctgtctcatcagttcttcacagtgagaaaagaggctagatgatggtgtggggggttggagttttcttctaataccgagggttcctggctgtgaggaaacagccacatgttcgtcatgattgagctgtgaagtcttcttggacctgttgtctgaaaataaagttaatttgtttgaggcatctctcttaagtaggtggaaactattgaagttcagctaacaatcacagcataggttctgatgcatggaaaggtggttggtgaatgaaaaagttgcgtagagccactactttctttttccctgagaataaatttggataaaaca

SEQ ID NO: 108361 - DNA, 2168 bp, Homo sapiens
  Payload ID: 1290
  Gene Symbol: APTX
  Gene Name: aprataxin
  Uniprot ID: Q7Z2E3
  ENST ID: ENST00000436040
  CDS Start-End: 249-1277
acttctggaggtaaggcggtcgtcagcctatctcttctgctggctgggctcaatgccgcgggtgagcgttcggccgaggctgctcctacccttgagtgatgtgccttgaatgacgctgctttcatgcgctgctctcacggctgctttctccgtcctcccctgttactaccttgggctgtttcagcgggcgctcgcgttggtcttcgacccactttgcgtttgttcacgtgtgctcccgacacctagtgatgatgcgggtgtgctggttggtgagacaggacagccggcaccagcgaatcagacttccacatttggaagcagttgtgattgggcgtggcccagagaccaagatcactgataagaaatgttctcgacagcaagtacagttgaaagcagagtgtaacaagggatatgtcaaggtaaagcaggtaggagtcaatcccaccagcattgactcagtcgtaattgggaaggaccaagaggtgaagctgcagcctggccaggttctccacatggtgaatgaactttatccatatattgtagagtttgaggaagaggcaaagaaccctggcctggaaacacacaggaagagaaagagatcaggcaacagtgattctatagaaagggatgctgctcaggaagctgaggctgggacagggctggaacctgggagcaactctggccaatgctctgtgcccctaaagaagggaaaagatgcacctatcaaaaaggaatccctgggccactggagtcaaggcttgaagatttctatgcaggaccccaaaatgcaggtttacaaagatgagcaggtggtggtgataaaggataaatacccaaaggcccgttaccattggctggtcttaccgtggacctccatttccagtctgaaggctgtggccagggaacaccttgaactccttaagcatatgcacactgtgggggaaaaggtgattgtagattttgctgggtccagcaaactccgcttccgattgggctaccacgccattccgagtatgagccatgtacatcttcatgtgatcagccaggattttgattctccttgccttaaaaacaaaaaacattggaattctttcaatacagaatacttcctagaatcacaagctgtgatcgagatggtacaagaggctggtagagtaactgtccgagatgggatgcctgagctcttgaagctgccccttcgttgtcatgagtgccagcagctgctgccttccattcctcagctgaaagaacatctcaggaagcactggacacagtgattctgcagagcctgagctgctgctgtggtgtggcccactggagcaaactgctggcacctattctgggttgcttgtgaacttctactcatttcctaaattaaaacatgcagctttttcacaaatttattctattattgagtggccacaatgtagagtggctcaaagtacttcaggattaggaatttgggtttgtcatagatgtattctctggtgagggtggctgggatatacctgacccaccatcttcagaaggacccatgtcaggtctgaccattgggagcaaagccatgttcacactgacctaatgcagagtatggaagcattgggctggttatacatttctgtttcttagatttatcctccgcctctgtaggcatggacaacctttaatcagagcatctagagtggcctcttgtttatcctgaagatactgatgggtcttgttttctgttagtctgttttgtaatattcttttcccttccttcatggggaggcttagtttgtccagtccttccatgcccttctatcccagattacctaaatgttcccttctcaggaattctgtctcatcagttcttcacagtgagaaaagaggctagatgatggtgtggggggttggagttttcttctaataccgagggttcctggctgtgaggaaacagccacatgttcgtcatgattgagctgtgaagtcttcttggacctgttgtctgaaaataaagttaatttgtttgaggcatctctcttaagtaggtggaaactattgaagttcagctaacaatcacagcataggttctgatgcatggaaaggtggttggtgaatgaaaaagttgcgtagagccactactttctttttccctgagaataaatttggataaaacagttgtattc

SEQ ID NO: 108362 - DNA, 2099 bp, Homo sapiens
  Payload ID: 1290
  Gene Symbol: APTX
  Gene Name: aprataxin
  Uniprot ID: Q7Z2E3
  ENST ID: ENST00000494649
  CDS Start-End: 194-343
ccgcgggtgagcgttcggccgaggctgctcctacccttgagtgatgtgccttgaatgacgctgctttcatgcgctgctctcacggctgctttctccgtcctcccctgttactaccttgggctgtttcagcgggcgctcgcgttggtcttcgacccactttgcgtttgttcacgtgtgctcccgacacctagtgatgatgcgggtgtgctggttggtgagacaggacagccggcaccagcgaatcagacttccacatttggaagcagttgtgattgggcgtggcccagagaccaagatcactgataagaaatgttctcgacagcaagttgaaagcagagtgtaacaagggatatgtcaaggtaaagcaggtaggagtcaatcccaccagcattgactcagtcgtaattgggaaggaccaagaggtgaagctgcagcctggccaggttctccacatggtgaatgaactttatccatatattgtagagtttgaggaagaggcaaagaaccctggcctggaaacacacaggaagagaaagagatcaggcaacagtgattctatagaaagggatgctgctcaggaagctgaggctgggacagggctggaacctgggagcaactctggccaatgctctgtgcccctaaagaagggaaaagatgcacctatcaaaaaggaatccctgggccactggagtcaaggcttgaagatttctatgcaggaccccaaaatgcaggtttacaaagatgagcaggtggtggtgataaaggataaatacccaaaggcccgttaccattggctggtcttaccgtggacctccatttccagtctgaaggctgtggccagggaacaccttgaactccttaagcatatgcacactgtgggggaaaaggtgattgtagattttgctgggtccagcaaactccgcttccgattgggctaccacgccattccgagtatgagccatgtacatcttcatgtgatcagccaggattttgattctccttgccttaaaaacaaaaaacattggaattctttcaatacagaatacttcctagaatcacaagctgtgatcgagatggtacaagaggctggtagagtaactgtccgagatgggatgcctgagctcttgaagctgccccttcgttgtcatgagtgccagcagctgctgccttccattcctcagctgaaagaacatctcaggaagcactggacacagtgattctgcagagcctgagctgctgctgtggtgtggcccactggagcaaactgctggcacctattctgggttgcttgtgaacttctactcatttcctaaattaaaacatgcagctttttcacaaatttattctattattgagtggccacaatgtagagtggctcaaagtacttcaggattaggaatttgggtttgtcatagatgtattctctggtgagggtggctgggatatacctgacccaccatcttcagaaggacccatgtcaggtctgaccattgggagcaaagccatgttcacactgacctaatgcagagtatggaagcattgggctggttatacatttctgtttcttagatttatcctccgcctctgtaggcatggacaacctttaatcagagcatctagagtggcctcttgtttatcctgaagatactgatgggtcttgttttctgttagtctgttttgtaatattcttttcccttccttcatggggaggcttagtttgtccagtccttccatgcccttctatcccagattacctaaatgttcccttctcaggaattctgtctcatcagttcttcacagtgagaaaagaggctagatgatggtgtggggggttggagttttcttctaataccgagggttcctggctgtgaggaaacagccacatgttcgtcatgattgagctgtgaagtcttcttggacctgttgtctgaaaataaagttaatttgtttgaggcatctctcttaagtaggtggaaactattgaagttcagctaacaatcacagcataggttctgatgcatggaaaggtggttggtgaatgaaaaagttgcgtagagccactactttctttttccctgagaataaatttggataaaaca

SEQ ID NO: 108363 - DNA, 568 bp, Homo sapiens
  Payload ID: 1290
  Gene Symbol: APTX
  Gene Name: aprataxin
  ENST ID: ENST00000477119
  CDS Start-End: 102-568
aggcacagatgagtaacgtgaatttgtccgtctccgacttctggaggtaaggcggtcgtcagcctatctcttctgctggctgggctcaatgccgcggagtgatgatgcgggtgtgctggttggtgagacaggacagccggcaccagcgaatcagacttccacatttggaagcagttgtgattgggcgtggcccagagaccaagatcactgataagaaatgttctcgacagcaagagtttgaggaagaggcaaagaaccctggcctggaaacacacaggaagagaaagagatcaggcaacagtgattctatagaaagggatgctgctcaggaagctgaggctgggacagggctggaacctgggagcaactctggccaatgctctgtgcccctaaagaagggaaaagatgcacctatcaaaaaggaatccctgggccactggagtcaaggcttgaagatttctatgcaggaccccaaaatgcaggtttacaaagatgagcaggtggtggtgataaaggataaatacccaaaggcccgttaccattggctggtcttaccgtggacctccat

SEQ ID NO: 108364 - DNA, 674 bp, Homo sapiens
  Payload ID: 1290
  Gene Symbol: APTX
  Gene Name: aprataxin
  ENST ID: ENST00000480031
  CDS Start-End: 36-194
acgtgaatttgtccgtctccgacttctggagagtgatgatgcgggtgtgctggttggtgagacaggacagccggcaccagcgaatcagacttccacatttggaagcagttgtgattgggcgtggcccagagaccaagatcactgataagaaatgttctcgacagcaaggtaggagtcaatcccaccagcattgactcagtcgtaattgggaaggaccaagaggtgaagctgcagcctggccaggttctccacatggtgaatgaactttatccatatattgtagagtttgaggaagaggcaaagaaccctggcctggaaacacacaggaagagaaagagatcaggcaacagtgattctatagaaagggatgctgctcaggaagctgaggctgggacagggctggaacctgggagcaactctggccaatgctctgtgcccctaaagaagggaaaagatgcacctatcaaaaaggaatccctgggccactggagtcaaggcttgaagatttctatgcaggaccccaaaatgcaggtttacaaagatgagcaggtggtggtgataaaggataaatacccaaaggcccgttaccattggctggtcttaccgtggacctccatttccagtctgaaggctgtggccagggaacaccttgaactccttaagcatatgcacac

SEQ ID NO: 108365 - DNA, 952 bp, Homo sapiens
  Payload ID: 1290
  Gene Symbol: APTX
  Gene Name: aprataxin
  ENST ID: ENST00000474658
  CDS Start-End: 1-224
ccgacttctggagagtgatgatgcgggtgtgctggttggtgagacaggacagccggcaccagcgaatcagacttccacatttggaagcagttgtgattgggcgtggcccagagaccaagatcactgataagaaatgttctcgacagcaaggaatccctgggccactggagtcaaggcttgaagatttctatgcaggaccccaaaatgcaggtttacaaagatgagcaggtggtggtgataaaggataaatacccaaaggcccgttaccattggctggtcttaccgtggacctccatttccagtctgaaggctgtggccagggaacaccttgaactccttaagcatatgcacactgtgggggaaaaggtgattgtagattttgctgggtccagcaaactccgcttccgattgggctaccacgccattccgagtatgagccatgtacatcttcatgtgatcagccaggattttgattctccttgccttaaaaacaaaaaacattggaattctttcaatacagaatacttcctagaatcacaagctgtgatcgagatggtacaagaggctggtagagtaactgtccgagatgggatgcctgagctcttgaagctgccccttcgttgtcatgagtgccagcagctgctgccttccattcctcagctgaaagaacatctcaggaagcactggacacagtgattctgcagagcctgagctgctgctgtggtgtggcccactggagcaaactgctggcacctattctgggttgcttgtgaacttctactcatttcctaaattaaaacatgcagctttttcacaaatttattctattattgagtggccacaatgtagagtggctcaaagtacttcaggattaggaatttgggtttgtcatagatgtattctctggtgagggtggctgggatatacctgacccaccatcttcagaaggacc

SEQ ID NO: 108366 - DNA, 1759 bp, Homo sapiens
  Payload ID: 1290
  Gene Symbol: APTX
  Gene Name: aprataxin
  Uniprot ID: Q7Z2E3
  ENST ID: ENST00000472896
  CDS Start-End: 198-347
attttcacaacagcctcctgagtcccatcattatcatggtttataggtgaggaaattgagactagggtggtgaagtcacttgcctcaagatgaacagctggtagatcacatgcgtggtggcaccgggtgtggccctggaggactcgtgctagtggatctgtttttctagtgattcttttgttttgtcccttagagtgatgatgcgggtgtgctggttggtgagacaggacagccggcaccagcgaatcagacttccacatttggaagcagttgtgattgggcgtggcccagagaccaagatcactgataagaaatgttctcgacagcaagttgaaagcagagtgtaacaagggatatgtcaaggtaaagcagagtttgaggaagaggcaaagaaccctggcctggaaacacacaggaagagaaagagatcaggcaacagtgattctatagaaagggatgctgctcaggaagctgaggctgggacagggctggaacctgggagcaactctggccaatgctctgtgcccctaaagaagggaaaagatgcacctatcaaaaaggaatccctgggccactggagtcaaggcttgaagatttctatgcaggaccccaaaatgcagccatgtacatcttcatgtgatcagccaggattttgattctccttgccttaaaaacaaaaaacattggaattctttcaatacagaatacttcctagaatcacaagctgtgatcgagatggtacaagaggctggtagagtaactgtccgagatgggatgcctgagctcttgaagctgccccttcgttgtcatgagtgccagcagctgctgccttccattcctcagctgaaagaacatctcaggaagcactggacacagtgattctgcagagcctgagctgctgctgtggtgtggcccactggagcaaactgctggcacctattctgggttgcttgtgaacttctactcatttcctaaattaaaacatgcagctttttcacaaatttattctattattgagtggccacaatgtagagtggctcaaagtacttcaggattaggaatttgggtttgtcatagatgtattctctggtgagggtggctgggatatacctgacccaccatcttcagaaggacccatgtcaggtctgaccattgggagcaaagccatgttcacactgacctaatgcagagtatggaagcattgggctggttatacatttctgtttcttagatttatcctccgcctctgtaggcatggacaacctttaatcagagcatctagagtggcctcttgtttatcctgaagatactgatgggtcttgttttctgttagtctgttttgtaatattcttttcccttccttcatggggaggcttagtttgtccagtccttccatgcccttctatcccagattacctaaatgttcccttctcaggaattctgtctcatcagttcttcacagtgagaaaagaggctagatgatggtgtggggggttggagttttcttctaataccgagggttcctggctgtgaggaaacagccacatgttcgtcatgattgagctgtgaagtcttcttggacctgttgtctgaaaataaagttaatttgtttgaggcatctctcttaagtaggtggaaactattgaagttcagctaacaatcacagcataggttctgatgcatggaaaggtggttggtgaatgaaaaagttgcgtagagccactactttctttttccctgagaataaatttggataaaa

SEQ ID NO: 108367 - DNA, 679 bp, Homo sapiens
  Payload ID: 1290
  Gene Symbol: APTX
  Gene Name: aprataxin
  ENST ID: ENST00000464632
  CDS Start-End: 16-207
agcggtgaggcacagatgagtaacgtgaatttgtccgtctccgacttctggagagtgatgatgcgggtgtgctggttggtgagacaggacagccggcaccagcgaatcagacttccacatttggaagcagttgtgattgggcgtggcccagagaccaagatcactgataagaaatgttctcgacagcaagttgaaagcagagtgtaacaagggatatgtcaaggtaaagcagagtttgaggaagaggcaaagaaccctggcctggaaacacacaggaagagaaagagatcaggcaacagtgattctatagaaagggatgctgctcaggaagctgaggctgggacagggctggaacctgggagcaactctggccaatgctctgtgcccctaaagaagggaaaagatgcacctatcaaaaaggaatccctgggccactggagtcaaggcttgaagatttctatgcaggaccccaaaatgcaggtttacaaagatgagcaggtggtggtgataaaggataaatacccaaaggcccgttaccattggctggtcttaccgtggacctccatttccagtctgaaggctgtggccagggaacaccttgaactccttaagcatatgcacactgtgggggaaaaggtgattgtagattttgctgggtccagcaaactccgcttccgat

SEQ ID NO: 108368 - DNA, 1986 bp, Homo sapiens
  Payload ID: 1290
  Gene Symbol: APTX
  Gene Name: aprataxin
  Uniprot ID: Q7Z2E3
  ENST ID: ENST00000485479
  CDS Start-End: 198-347
attttcacaacagcctcctgagtcccatcattatcatggtttataggtgaggaaattgagactagggtggtgaagtcacttgcctcaagatgaacagctggtagatcacatgcgtggtggcaccgggtgtggccctggaggactcgtgctagtggatctgtttttctagtgattcttttgttttgtcccttagagtgatgatgcgggtgtgctggttggtgagacaggacagccggcaccagcgaatcagacttccacatttggaagcagttgtgattgggcgtggcccagagaccaagatcactgataagaaatgttctcgacagcaagttgaaagcagagtgtaacaagggatatgtcaaggtaaagcagagtttgaggaagaggcaaagaaccctggcctggaaacacacaggaagagaaagagatcaggcaacagtgattctatagaaagggatgctgctcaggaagctgaggctgggacagggctggaacctgggagcaactctggccaatgctctgtgcccctaaagaagggaaaagatgcacctatcaaaaaggaatccctgggccactggagtcaaggcttgaagatttctatgcaggaccccaaaatgcaggtttacaaagatgagcaggtggtggtgataaaggataaatacccaaaggcccgttaccattggctggtcttaccgtggacctccatttccagtctgaaggctgtggccagggaacaccttgaactccttaagcatatgcacactgtgggggaaaaggtgattgtagattttgctgggtccagcaaactccgcttccgattgggctaccacgccattccgagtatgagccatgtacatcttcatgtgatcagccaggattttgattctccttgccttaaaaacaaaaaacattggaattctttcaatacagaatacttcctagaatcacaagctgtgatcgagatggtacaagaggctggtagagtaactgtccgagatgggatgcctgagctcttgaagctgccccttcgttgtcatgagtgccagcagctgctgccttccattcctcagctgaaagaacatctcaggaagcactggacacagtgattctgcagagcctgagctgctgctgtggtgtggcccactggagcaaactgctggcacctattctgggttgcttgtgaacttctactcatttcctaaattaaaacatgcagctttttcacaaatttattctattattgagtggccacaatgtagagtggctcaaagtacttcaggattaggaatttgggtttgtcatagatgtattctctggtgagggtggctgggatatacctgacccaccatcttcagaaggacccatgtcaggtctgaccattgggagcaaagccatgttcacactgacctaatgcagagtatggaagcattgggctggttatacatttctgtttcttagatttatcctccgcctctgtaggcatggacaacctttaatcagagcatctagagtggcctcttgtttatcctgaagatactgatgggtcttgttttctgttagtctgttttgtaatattcttttcccttccttcatggggaggcttagtttgtccagtccttccatgcccttctatcccagattacctaaatgttcccttctcaggaattctgtctcatcagttcttcacagtgagaaaagaggctagatgatggtgtggggggttggagttttcttctaataccgagggttcctggctgtgaggaaacagccacatgttcgtcatgattgagctgtgaagtcttcttggacctgttgtctgaaaataaagttaatttgtttgaggcatctctcttaagtaggtggaaactattgaagttcagctaacaatcacagcataggttctgatgcatggaaaggtggttggtgaatgaaaaagttgcgtagagccactactttctttttccctgagaataaatttggataaaa

SEQ ID NO: 108369 - DNA, 1874 bp, Homo sapiens
  Payload ID: 1290
  Gene Symbol: APTX
  Gene Name: aprataxin
  Uniprot ID: Q7Z2E3
  ENST ID: ENST00000460940
  CDS Start-End: 198-347
attttcacaacagcctcctgagtcccatcattatcatggtttataggtgaggaaattgagactagggtggtgaagtcacttgcctcaagatgaacagctggtagatcacatgcgtggtggcaccgggtgtggccctggaggactcgtgctagtggatctgtttttctagtgattcttttgttttgtcccttagagtgatgatgcgggtgtgctggttggtgagacaggacagccggcaccagcgaatcagacttccacatttggaagcagttgtgattgggcgtggcccagagaccaagatcactgataagaaatgttctcgacagcaagttgaaagcagagtgtaacaagggatatgtcaaggtaaagcaggtaggagtcaatcccaccagcattgactcagtcgtaattgggaaggaccaagaggtgaagctgcagcctggccaggttctccacatggtgaatgaactttatccatatattgtagagtttgaggaagaggcaaagaaccctggcctggaaacacacaggaagagaaagagatcaggcaacagtgattctatagaaagggatgctgctcaggaagctgaggctgggacagggctggaacctgggagcaactctggccaatgctctgtgcccctaaagaagggaaaagatgcacctatcaaaaaggaatccctgggccactggagtcaaggcttgaagatttctatgcaggaccccaaaatgcagccatgtacatcttcatgtgatcagccaggattttgattctccttgccttaaaaacaaaaaacattggaattctttcaatacagaatacttcctagaatcacaagctgtgatcgagatggtacaagaggctggtagagtaactgtccgagatgggatgcctgagctcttgaagctgccccttcgttgtcatgagtgccagcagctgctgccttccattcctcagctgaaagaacatctcaggaagcactggacacagtgattctgcagagcctgagctgctgctgtggtgtggcccactggagcaaactgctggcacctattctgggttgcttgtgaacttctactcatttcctaaattaaaacatgcagctttttcacaaatttattctattattgagtggccacaatgtagagtggctcaaagtacttcaggattaggaatttgggtttgtcatagatgtattctctggtgagggtggctgggatatacctgacccaccatcttcagaaggacccatgtcaggtctgaccattgggagcaaagccatgttcacactgacctaatgcagagtatggaagcattgggctggttatacatttctgtttcttagatttatcctccgcctctgtaggcatggacaacctttaatcagagcatctagagtggcctcttgtttatcctgaagatactgatgggtcttgttttctgttagtctgttttgtaatattcttttcccttccttcatggggaggcttagtttgtccagtccttccatgcccttctatcccagattacctaaatgttcccttctcaggaattctgtctcatcagttcttcacagtgagaaaagaggctagatgatggtgtggggggttggagttttcttctaataccgagggttcctggctgtgaggaaacagccacatgttcgtcatgattgagctgtgaagtcttcttggacctgttgtctgaaaataaagttaatttgtttgaggcatctctcttaagtaggtggaaactattgaagttcagctaacaatcacagcataggttctgatgcatggaaaggtggttggtgaatgaaaaagttgcgtagagccactactttctttttccctgagaataaatttggataaaa

SEQ ID NO: 108370 - DNA, 2101 bp, Homo sapiens
  Payload ID: 1290
  Gene Symbol: APTX
  Gene Name: aprataxin
  Uniprot ID: Q7Z2E3
  ENST ID: ENST00000467331
  CDS Start-End: 198-347
attttcacaacagcctcctgagtcccatcattatcatggtttataggtgaggaaattgagactagggtggtgaagtcacttgcctcaagatgaacagctggtagatcacatgcgtggtggcaccgggtgtggccctggaggactcgtgctagtggatctgtttttctagtgattcttttgttttgtcccttagagtgatgatgcgggtgtgctggttggtgagacaggacagccggcaccagcgaatcagacttccacatttggaagcagttgtgattgggcgtggcccagagaccaagatcactgataagaaatgttctcgacagcaagttgaaagcagagtgtaacaagggatatgtcaaggtaaagcaggtaggagtcaatcccaccagcattgactcagtcgtaattgggaaggaccaagaggtgaagctgcagcctggccaggttctccacatggtgaatgaactttatccatatattgtagagtttgaggaagaggcaaagaaccctggcctggaaacacacaggaagagaaagagatcaggcaacagtgattctatagaaagggatgctgctcaggaagctgaggctgggacagggctggaacctgggagcaactctggccaatgctctgtgcccctaaagaagggaaaagatgcacctatcaaaaaggaatccctgggccactggagtcaaggcttgaagatttctatgcaggaccccaaaatgcaggtttacaaagatgagcaggtggtggtgataaaggataaatacccaaaggcccgttaccattggctggtcttaccgtggacctccatttccagtctgaaggctgtggccagggaacaccttgaactccttaagcatatgcacactgtgggggaaaaggtgattgtagattttgctgggtccagcaaactccgcttccgattgggctaccacgccattccgagtatgagccatgtacatcttcatgtgatcagccaggattttgattctccttgccttaaaaacaaaaaacattggaattctttcaatacagaatacttcctagaatcacaagctgtgatcgagatggtacaagaggctggtagagtaactgtccgagatgggatgcctgagctcttgaagctgccccttcgttgtcatgagtgccagcagctgctgccttccattcctcagctgaaagaacatctcaggaagcactggacacagtgattctgcagagcctgagctgctgctgtggtgtggcccactggagcaaactgctggcacctattctgggttgcttgtgaacttctactcatttcctaaattaaaacatgcagctttttcacaaatttattctattattgagtggccacaatgtagagtggctcaaagtacttcaggattaggaatttgggtttgtcatagatgtattctctggtgagggtggctgggatatacctgacccaccatcttcagaaggacccatgtcaggtctgaccattgggagcaaagccatgttcacactgacctaatgcagagtatggaagcattgggctggttatacatttctgtttcttagatttatcctccgcctctgtaggcatggacaacctttaatcagagcatctagagtggcctcttgtttatcctgaagatactgatgggtcttgttttctgttagtctgttttgtaatattcttttcccttccttcatggggaggcttagtttgtccagtccttccatgcccttctatcccagattacctaaatgttcccttctcaggaattctgtctcatcagttcttcacagtgagaaaagaggctagatgatggtgtggggggttggagttttcttctaataccgagggttcctggctgtgaggaaacagccacatgttcgtcatgattgagctgtgaagtcttcttggacctgttgtctgaaaataaagttaatttgtttgaggcatctctcttaagtaggtggaaactattgaagttcagctaacaatcacagcataggttctgatgcatggaaaggtggttggtgaatgaaaaagttgcgtagagccactactttctttttccctgagaataaatttggataaaa

SEQ ID NO: 108371 - DNA, 687 bp, Homo sapiens
  Payload ID: 1290
  Gene Symbol: APTX
  Gene Name: aprataxin
  ENST ID: ENST00000473221
  CDS Start-End: 38-687
gacgtcatcccgcagcgccggaagcggtgaggcacagatgagtaacgtgaatttgtccgtctccgacttctggagagtgatgatgcgggtgtgctggttggtgagacaggacagccggcaccagcgaatcagacttccacatttggaagcagttgtgattgggcgtggcccagagaccaagatcactgataagaaatgttctcgacagcaagagtttgaggaagaggcaaagaaccctggcctggaaacacacaggaagagaaagagatcaggcaacagtgattctatagaaagggatgctgctcaggaagctgaggctgggacagggctggaacctgggagcaactctggccaatgctctgtgcccctaaagaagggaaaagatgcacctatcaaaaaggaatccctgggccactggagtcaaggcttgaagatttctatgcaggaccccaaaatgcaggtttacaaagatgagcaggtggtggtgataaaggataaatacccaaaggcccgttaccattggctggtcttaccgtggacctccatttccagtctgaaggctgtggccagggaacaccttgaactccttaagcatatgcacactgtgggggaaaaggtgattgtagattttgctgggtccagcaaactccgcttccgattgggctaccacgccattccgagtatgag

SEQ ID NO: 108372 - DNA, 1068 bp, Homo sapiens
  Payload ID: 1290
  Gene Symbol: APTX
  Gene Name: aprataxin
  Uniprot ID: Q7Z2E3
  ENST ID: ENST00000476858
  CDS Start-End: 38-946
gacgtcatcccgcagcgccggaagcggtgaggcacagatgagtaacgtgaatttgtccgtctccgacttctggagagtgatgatgcgggtgtgctggttggtgagacaggacagccggcaccagcgaatcagacttccacatttggaagcagttgtgattgggcgtggcccagagaccaagatcactgataagaaatgttctcgacagcaagagtttgaggaagaggcaaagaaccctggcctggaaacacacaggaagagaaagagatcaggcaacagtgattctatagaaagggatgctgctcaggaagctgaggctgggacagggctggaacctgggagcaactctggccaatgctctgtgcccctaaagaagggaaaagatgcacctatcaaaaaggaatccctgggccactggagtcaaggcttgaagatttctatgcaggaccccaaaatgcaggtttacaaagatgagcaggtggtggtgataaaggataaatacccaaaggcccgttaccattggctggtcttaccgtggacctccatttccagtctgaaggctgtggccagggaacaccttgaactccttaagcatatgcacactgtgggggaaaaggtgattgtagattttgctgggtccagcaaactccgcttccgattgggctaccacgccattccgagtatgagccatgtacatcttcatgtgatcagccaggattttgattctccttgccttaaaaacaaaaaacattggaattctttcaatacagaatacttcctagaatcacaagctgtgatcgagatggtacaagaggctggtagagtaactgtccgagatgggatgcctgagctcttgaagctgccccttcgttgtcatgagtgccagcagctgctgccttccattcctcagctgaaagaacatctcaggaagcactggacacagtgattctgcagagcctgagctgctgctgtggtgtggcccactggagcaaactgctggcacctattctgggttgcttgtgaacttctactcatttcctaaattaaaacatgcagctttttcacaaa

SEQ ID NO: 108373 - DNA, 1879 bp, Homo sapiens
  Payload ID: 1290
  Gene Symbol: APTX
  Gene Name: aprataxin
  Uniprot ID: Q7Z2E3
  ENST ID: ENST00000482687
  CDS Start-End: 198-776
attttcacaacagcctcctgagtcccatcattatcatggtttataggtgaggaaattgagactagggtggtgaagtcacttgcctcaagatgaacagctggtagatcacatgcgtggtggcaccgggtgtggccctggaggactcgtgctagtggatctgtttttctagtgattcttttgttttgtcccttagagtgatgatgcgggtgtgctggttggtgagacaggacagccggcaccagcgaatcagacttccacatttggaagcagttgtgattgggcgtggcccagagaccaagatcactgataagaaatgttctcgacagcaagtacagttgaaagcagagtgtaacaagggatatgtcaaggtaaagcaggtaggagtcaatcccaccagcattgactcagtcgtaattgggaaggaccaagaggtgaagctgcagcctggccaggttctccacatggtgaatgaactttatccatatattgtagagtttgaggaagaggcaaagaaccctggcctggaaacacacaggaagagaaagagatcaggcaacagtgattctatagaaagggatgctgctcaggaagctgaggctgggacagggctggaacctgggagcaactctggccaatgctctgtgcccctaaagaagggaaaagatgcacctatcaaaaaggaatccctgggccactggagtcaaggcttgaagatttctatgcaggaccccaaaatgcagccatgtacatcttcatgtgatcagccaggattttgattctccttgccttaaaaacaaaaaacattggaattctttcaatacagaatacttcctagaatcacaagctgtgatcgagatggtacaagaggctggtagagtaactgtccgagatgggatgcctgagctcttgaagctgccccttcgttgtcatgagtgccagcagctgctgccttccattcctcagctgaaagaacatctcaggaagcactggacacagtgattctgcagagcctgagctgctgctgtggtgtggcccactggagcaaactgctggcacctattctgggttgcttgtgaacttctactcatttcctaaattaaaacatgcagctttttcacaaatttattctattattgagtggccacaatgtagagtggctcaaagtacttcaggattaggaatttgggtttgtcatagatgtattctctggtgagggtggctgggatatacctgacccaccatcttcagaaggacccatgtcaggtctgaccattgggagcaaagccatgttcacactgacctaatgcagagtatggaagcattgggctggttatacatttctgtttcttagatttatcctccgcctctgtaggcatggacaacctttaatcagagcatctagagtggcctcttgtttatcctgaagatactgatgggtcttgttttctgttagtctgttttgtaatattcttttcccttccttcatggggaggcttagtttgtccagtccttccatgcccttctatcccagattacctaaatgttcccttctcaggaattctgtctcatcagttcttcacagtgagaaaagaggctagatgatggtgtggggggttggagttttcttctaataccgagggttcctggctgtgaggaaacagccacatgttcgtcatgattgagctgtgaagtcttcttggacctgttgtctgaaaataaagttaatttgtttgaggcatctctcttaagtaggtggaaactattgaagttcagctaacaatcacagcataggttctgatgcatggaaaggtggttggtgaatgaaaaagttgcgtagagccactactttctttttccctgagaataaatttggataaaa

SEQ ID NO: 108374 - DNA, 1991 bp, Homo sapiens
  Payload ID: 1290
  Gene Symbol: APTX
  Gene Name: aprataxin
  ENST ID: ENST00000465003
  CDS Start-End: 198-455
attttcacaacagcctcctgagtcccatcattatcatggtttataggtgaggaaattgagactagggtggtgaagtcacttgcctcaagatgaacagctggtagatcacatgcgtggtggcaccgggtgtggccctggaggactcgtgctagtggatctgtttttctagtgattcttttgttttgtcccttagagtgatgatgcgggtgtgctggttggtgagacaggacagccggcaccagcgaatcagacttccacatttggaagcagttgtgattgggcgtggcccagagaccaagatcactgataagaaatgttctcgacagcaagtacagttgaaagcagagtgtaacaagggatatgtcaaggtaaagcagagtttgaggaagaggcaaagaaccctggcctggaaacacacaggaagagaaagagatcaggcaacagtgattctatagaaagggatgctgctcaggaagctgaggctgggacagggctggaacctgggagcaactctggccaatgctctgtgcccctaaagaagggaaaagatgcacctatcaaaaaggaatccctgggccactggagtcaaggcttgaagatttctatgcaggaccccaaaatgcaggtttacaaagatgagcaggtggtggtgataaaggataaatacccaaaggcccgttaccattggctggtcttaccgtggacctccatttccagtctgaaggctgtggccagggaacaccttgaactccttaagcatatgcacactgtgggggaaaaggtgattgtagattttgctgggtccagcaaactccgcttccgattgggctaccacgccattccgagtatgagccatgtacatcttcatgtgatcagccaggattttgattctccttgccttaaaaacaaaaaacattggaattctttcaatacagaatacttcctagaatcacaagctgtgatcgagatggtacaagaggctggtagagtaactgtccgagatgggatgcctgagctcttgaagctgccccttcgttgtcatgagtgccagcagctgctgccttccattcctcagctgaaagaacatctcaggaagcactggacacagtgattctgcagagcctgagctgctgctgtggtgtggcccactggagcaaactgctggcacctattctgggttgcttgtgaacttctactcatttcctaaattaaaacatgcagctttttcacaaatttattctattattgagtggccacaatgtagagtggctcaaagtacttcaggattaggaatttgggtttgtcatagatgtattctctggtgagggtggctgggatatacctgacccaccatcttcagaaggacccatgtcaggtctgaccattgggagcaaagccatgttcacactgacctaatgcagagtatggaagcattgggctggttatacatttctgtttcttagatttatcctccgcctctgtaggcatggacaacctttaatcagagcatctagagtggcctcttgtttatcctgaagatactgatgggtcttgttttctgttagtctgttttgtaatattcttttcccttccttcatggggaggcttagtttgtccagtccttccatgcccttctatcccagattacctaaatgttcccttctcaggaattctgtctcatcagttcttcacagtgagaaaagaggctagatgatggtgtggggggttggagttttcttctaataccgagggttcctggctgtgaggaaacagccacatgttcgtcatgattgagctgtgaagtcttcttggacctgttgtctgaaaataaagttaatttgtttgaggcatctctcttaagtaggtggaaactattgaagttcagctaacaatcacagcataggttctgatgcatggaaaggtggttggtgaatgaaaaagttgcgtagagccactactttctttttccctgagaataaatttggataaaa

SEQ ID NO: 108375 - DNA, 684 bp, Homo sapiens
  Payload ID: 1290
  Gene Symbol: APTX
  Gene Name: aprataxin
  ENST ID: ENST00000478279
  CDS Start-End: 16-315
agcggtgaggcacagatgagtaacgtgaatttgtccgtctccgacttctggagagtgatgatgcgggtgtgctggttggtgagacaggacagccggcaccagcgaatcagacttccacatttggaagcagttgtgattgggcgtggcccagagaccaagatcactgataagaaatgttctcgacagcaagtacagttgaaagcagagtgtaacaagggatatgtcaaggtaaagcagagtttgaggaagaggcaaagaaccctggcctggaaacacacaggaagagaaagagatcaggcaacagtgattctatagaaagggatgctgctcaggaagctgaggctgggacagggctggaacctgggagcaactctggccaatgctctgtgcccctaaagaagggaaaagatgcacctatcaaaaaggaatccctgggccactggagtcaaggcttgaagatttctatgcaggaccccaaaatgcaggtttacaaagatgagcaggtggtggtgataaaggataaatacccaaaggcccgttaccattggctggtcttaccgtggacctccatttccagtctgaaggctgtggccagggaacaccttgaactccttaagcatatgcacactgtgggggaaaaggtgattgtagattttgctgggtccagcaaactccgcttccgat

SEQ ID NO: 108376 - DNA, 1313 bp, Homo sapiens
  Payload ID: 1290
  Gene Symbol: APTX
  Gene Name: aprataxin
  Uniprot ID: Q7Z2E3
  ENST ID: ENST00000495360
  CDS Start-End: 314-463
tggtgctagcgcggcttcccggcgctcgtggaatcttctggagcccttttctccactcagcgagcctgagagtgcggaagtctccggctggtggggcatggcccaggagcactgcaagtcctagggttcccaaacctgtggggtggccgcctgggcccgcgagggcgggaagggctcgagtacagtgacccagcgggagctgtgtgtgaacgggaaagctcttggaacagtcttgcccccccccccccccctcttacgggcgcctcttctctttttgggaacgtggcgagcaaaaaatgcttgagccagagtgatgatgcgggtgtgctggttggtgagacaggacagccggcaccagcgaatcagacttccacatttggaagcagttgtgattgggcgtggcccagagaccaagatcactgataagaaatgttctcgacagcaagttgaaagcagagtgtaacaagggatatgtcaaggtaaagcagagtttgaggaagaggcaaagaaccctggcctggaaacacacaggaagagaaagagatcaggcaacagtgattctatagaaagggatgctgctcaggaagctgaggctgggacagggctggaacctgggagcaactctggccaatgctctgtgcccctaaagaagggaaaagatgcacctatcaaaaaggaatccctgggccactggagtcaaggcttgaagatttctatgcaggaccccaaaatgcaggtttacaaagatgagcaggtggtggtgataaaggataaatacccaaaggcccgttaccattggctggtcttaccgtggacctccatttccagtctgaaggctgtggccagggaacaccttgaactccttaagcatatgcacactgtgggggaaaaggtgattgtagattttgctgggtccagcaaactccgcttccgattgggctaccacgccattccgagtatgagccatgtacatcttcatgtgatcagccaggattttgattctccttgccttaaaaacaaaaaacattggaattctttcaatacagaatacttcctagaatcacaagctgtgatcgagatggtacaagaggctggtagagtaactgtccgagatgggatgcctgagctcttgaagctgccccttcgttgtcatgagtgccagcagctgctgccttccattcctcagctgaaagaacatctcaggaagcactggacacagtgattctgcagagcctgagctgctgctgtggtgtggcccactggagcaaactgctggcacctattctgggttgcttgtgaacttctactcattt

SEQ ID NO: 108377 - DNA, 1764 bp, Homo sapiens
  Payload ID: 1290
  Gene Symbol: APTX
  Gene Name: aprataxin
  ENST ID: ENST00000483148
  CDS Start-End: 198-455
attttcacaacagcctcctgagtcccatcattatcatggtttataggtgaggaaattgagactagggtggtgaagtcacttgcctcaagatgaacagctggtagatcacatgcgtggtggcaccgggtgtggccctggaggactcgtgctagtggatctgtttttctagtgattcttttgttttgtcccttagagtgatgatgcgggtgtgctggttggtgagacaggacagccggcaccagcgaatcagacttccacatttggaagcagttgtgattgggcgtggcccagagaccaagatcactgataagaaatgttctcgacagcaagtacagttgaaagcagagtgtaacaagggatatgtcaaggtaaagcagagtttgaggaagaggcaaagaaccctggcctggaaacacacaggaagagaaagagatcaggcaacagtgattctatagaaagggatgctgctcaggaagctgaggctgggacagggctggaacctgggagcaactctggccaatgctctgtgcccctaaagaagggaaaagatgcacctatcaaaaaggaatccctgggccactggagtcaaggcttgaagatttctatgcaggaccccaaaatgcagccatgtacatcttcatgtgatcagccaggattttgattctccttgccttaaaaacaaaaaacattggaattctttcaatacagaatacttcctagaatcacaagctgtgatcgagatggtacaagaggctggtagagtaactgtccgagatgggatgcctgagctcttgaagctgccccttcgttgtcatgagtgccagcagctgctgccttccattcctcagctgaaagaacatctcaggaagcactggacacagtgattctgcagagcctgagctgctgctgtggtgtggcccactggagcaaactgctggcacctattctgggttgcttgtgaacttctactcatttcctaaattaaaacatgcagctttttcacaaatttattctattattgagtggccacaatgtagagtggctcaaagtacttcaggattaggaatttgggtttgtcatagatgtattctctggtgagggtggctgggatatacctgacccaccatcttcagaaggacccatgtcaggtctgaccattgggagcaaagccatgttcacactgacctaatgcagagtatggaagcattgggctggttatacatttctgtttcttagatttatcctccgcctctgtaggcatggacaacctttaatcagagcatctagagtggcctcttgtttatcctgaagatactgatgggtcttgttttctgttagtctgttttgtaatattcttttcccttccttcatggggaggcttagtttgtccagtccttccatgcccttctatcccagattacctaaatgttcccttctcaggaattctgtctcatcagttcttcacagtgagaaaagaggctagatgatggtgtggggggttggagttttcttctaataccgagggttcctggctgtgaggaaacagccacatgttcgtcatgattgagctgtgaagtcttcttggacctgttgtctgaaaataaagttaatttgtttgaggcatctctcttaagtaggtggaaactattgaagttcagctaacaatcacagcataggttctgatgcatggaaaggtggttggtgaatgaaaaagttgcgtagagccactactttctttttccctgagaataaatttggataaaa

SEQ ID NO: 108378 - DNA, 1345 bp, Homo sapiens
  Payload ID: 1290
  Gene Symbol: APTX
  Gene Name: aprataxin
  Uniprot ID: Q7Z2E3
  ENST ID: ENST00000463596
  CDS Start-End: 195-1223
gccgcgggtgagcgttcggccgaggctgctcctacccttgagtgatgtgccttgaatgacgctgctttcatgcgctgctctcacggctgctttctccgtcctcccctgttactaccttgggctgtttcagcgggcgctcgcgttggtcttcgacccactttgcgtttgttcacgtgtgctcccgacacctagtgatgatgcgggtgtgctggttggtgagacaggacagccggcaccagcgaatcagacttccacatttggaagcagttgtgattgggcgtggcccagagaccaagatcactgataagaaatgttctcgacagcaagtacagttgaaagcagagtgtaacaagggatatgtcaaggtaaagcaggtaggagtcaatcccaccagcattgactcagtcgtaattgggaaggaccaagaggtgaagctgcagcctggccaggttctccacatggtgaatgaactttatccatatattgtagagtttgaggaagaggcaaagaaccctggcctggaaacacacaggaagagaaagagatcaggcaacagtgattctatagaaagggatgctgctcaggaagctgaggctgggacagggctggaacctgggagcaactctggccaatgctctgtgcccctaaagaagggaaaagatgcacctatcaaaaaggaatccctgggccactggagtcaaggcttgaagatttctatgcaggaccccaaaatgcaggtttacaaagatgagcaggtggtggtgataaaggataaatacccaaaggcccgttaccattggctggtcttaccgtggacctccatttccagtctgaaggctgtggccagggaacaccttgaactccttaagcatatgcacactgtgggggaaaaggtgattgtagattttgctgggtccagcaaactccgcttccgattgggctaccacgccattccgagtatgagccatgtacatcttcatgtgatcagccaggattttgattctccttgccttaaaaacaaaaaacattggaattctttcaatacagaatacttcctagaatcacaagctgtgatcgagatggtacaagaggctggtagagtaactgtccgagatgggatgcctgagctcttgaagctgccccttcgttgtcatgagtgccagcagctgctgccttccattcctcagctgaaagaacatctcaggaagcactggacacagtgattctgcagagcctgagctgctgctgtggtgtggcccactggagcaaactgctggcacctattctgggttgcttgtgaacttctactcatttcctaaattaaaacatgcagctttttcacaaa

SEQ ID NO: 108379 - DNA, 1881 bp, Homo sapiens
  Payload ID: 1290
  Gene Symbol: APTX
  Gene Name: aprataxin
  Uniprot ID: Q7Z2E3
  ENST ID: ENST00000479656
  CDS Start-End: 123-272
ctcctccacaagatttattttttttagatgaggtgttgctgtgttgcccaagctggacttgaacccctaggctcaagcaatccttccacctcagtctcccaagtagcagggactacagagtgatgatgcgggtgtgctggttggtgagacaggacagccggcaccagcgaatcagacttccacatttggaagcagttgtgattgggcgtggcccagagaccaagatcactgataagaaatgttctcgacagcaagttgaaagcagagtgtaacaagggatatgtcaaggtaaagcaggtaggagtcaatcccaccagcattgactcagtcgtaattgggaaggaccaagaggtgaagctgcagcctggccaggttctccacatggtgaatgaactttatccatatattgtagagtttgaggaagaggcaaagaaccctggcctggaaacacacaggaagagaaagagatcaggcaacagtgattctatagaaagggatgctgctcaggaagctgaggctgggacagggctggaacctgggagcaactctggccaatgctctgtgcccctaaagaagggaaaagatgcacctatcaaaaaggaatccctgggccactggagtcaaggcttgaagatttctatgcaggaccccaaaatgcaggtttacaaagatgagcaggtggtggtgataaaggataaatacccaaaggcccgttaccattggctggtcttaccgtggacctccatttccagtctgaaggctgtggccagggaacaccttgaactccttaagcatatgcacactgtgggggaaaaggtgattgtagattttgctgggtccagcaaactccgcttccgattgggctaccacgccattccgagtatgagccatgtacatcttcatgtgatcagccaggattttgattctccttgccttaaaaacaaaaaacattggaattctttcaatacagaatacttcctagaatcacaagctgtgatcgagatggtacaagaggctggtagagtaactgtccgagatgggatgcctgagctcttgaagctgccccttcgttgtcatgagtgccagcagctgctgccttccattcctcagctgaaagaacatctcaggaagcactggacacagtgattctgcagagcctgagctgctgctgtggtgtggcccactggagcaaactgctggcacctattctgggttgcttgtgaacttctactcatttcctaaattaaaacatgcagctttttcacaaatttattctattattgagtggccacaatgtagagtggctcaaagtacttcaggattaggaatttgggtttgtcatagatgtattctctggtgagggtggctgggatatacctgacccaccatcttcagaaggacccatgtcaggtctgaccattgggagcaaagccatgttcacactgacctaatgcagagtatggaagcattgggctggttatacatttctgtttcttagatttatcctccgcctctgtaggcatggacaacctttaatcagagcatctagagtggcctcttgtttatcctgaagatactgatgggtcttgttttctgttagtctgttttgtaatattcttttcccttccttcatggggaggcttagtttgtccagtccttccatgcccttctatcccagattacctaaatgttcccttctcaggaattctgtctcatcagttcttcacagtgagaaaagaggctagatgatggtgtggggggttggagttttcttctaataccgagggttcctggctgtgaggaaacagccacatgttcgtcatgattgagctgtgaagtcttcttggacctgttgtctgaaaataaagttaatttgtttga

SEQ ID NO: 108380 - DNA, 1455 bp, Homo sapiens
  Payload ID: 1290
  Gene Symbol: APTX
  Gene Name: aprataxin
  Uniprot ID: Q7Z2E3
  ENST ID: ENST00000468275
  CDS Start-End: 94-1122
gaggtgttgctgtgttgcccaagctggacttgaacccctaggctcaagcaatccttccacctcagtctcccaagtagcagggactacagagtgatgatgcgggtgtgctggttggtgagacaggacagccggcaccagcgaatcagacttccacatttggaagcagttgtgattgggcgtggcccagagaccaagatcactgataagaaatgttctcgacagcaagtacagttgaaagcagagtgtaacaagggatatgtcaaggtaaagcaggtaggagtcaatcccaccagcattgactcagtcgtaattgggaaggaccaagaggtgaagctgcagcctggccaggttctccacatggtgaatgaactttatccatatattgtagagtttgaggaagaggcaaagaaccctggcctggaaacacacaggaagagaaagagatcaggcaacagtgattctatagaaagggatgctgctcaggaagctgaggctgggacagggctggaacctgggagcaactctggccaatgctctgtgcccctaaagaagggaaaagatgcacctatcaaaaaggaatccctgggccactggagtcaaggcttgaagatttctatgcaggaccccaaaatgcaggtttacaaagatgagcaggtggtggtgataaaggataaatacccaaaggcccgttaccattggctggtcttaccgtggacctccatttccagtctgaaggctgtggccagggaacaccttgaactccttaagcatatgcacactgtgggggaaaaggtgattgtagattttgctgggtccagcaaactccgcttccgattgggctaccacgccattccgagtatgagccatgtacatcttcatgtgatcagccaggattttgattctccttgccttaaaaacaaaaaacattggaattctttcaatacagaatacttcctagaatcacaagctgtgatcgagatggtacaagaggctggtagagtaactgtccgagatgggatgcctgagctcttgaagctgccccttcgttgtcatgagtgccagcagctgctgccttccattcctcagctgaaagaacatctcaggaagcactggacacagtgattctgcagagcctgagctgctgctgtggtgtggcccactggagcaaactgctggcacctattctgggttgcttgtgaacttctactcatttcctaaattaaaacatgcagctttttcacaaatttattctattattgagtggccacaatgtagagtggctcaaagtacttcaggattaggaatttgggtttgtcatagatgtattctctggtgagggtggctgggatatacctgacccaccatcttcagaaggacccatgtcaggtctgaccattgggagcaaagccatgttcacactgacctaatgcagagtatggaagcattgggctggtt

SEQ ID NO: 108381 - DNA, 3847 bp, Homo sapiens
  Payload ID: 1291
  Gene Symbol: APLF
  Gene Name: aprataxin and PNKP like factor
  Uniprot ID: Q8IW19
  ENST ID: ENST00000303795
  CDS Start-End: 172-1707
gaagctgcgctggggccgggctctgagaggaccggcgcagccgcggggagcctttgaggccctccctcggtgttttttcccagggcgtgggcttgccccgcgcgtgtctgtggagggcggaaacagcggaggggccagtctcctggcgaaggggcctaatccttgcccgccatgtccgggggcttcgagctgcagccgcgggacggcggtccccgggtggccctggcgcccggggagacggtgatcggccgcgggccgctgctgggaataacagacaagagagtatccagaagacatgccattcttgaggtggcaggtggtcagctgcgaatcaaaccgatacacacaaatccatgtttttaccagtcttcagagaagagtcagctcttaccattgaagccaaatctatggtgctatttgaatcctggagacagcttttctttgttagttgacaaatacattttccgcattctctctataccctctgaagtggaaatgcaatgtaccttaagaaacagtcaagtgcttgatgaagataatatattgaatgaaacaccaaaatcccccgtgattaatttacctcatgagactactggtgcctcacaactggaaggaagcacagaaatagccaagacccagatgactcccacaaatagtgtgtctttcctaggtgaaaatagagactgcaataagcagcagccaatccttgccgagaggaaaagaatccttccaacttggatgttagcagaacatttaagtgatcaaaacctttcagtaccagcaatcagtggaggtaatgtaatccagggaagtggaaaagaagaaatctgcaaagataaatcccagctaaacacaacccagcaaggaagaaggcaattaatttcatcaggaagttcagaaaatacatcagcagaacaagacacaggagaagagtgcaaaaatactgatcaggaagagtctaccatttcatccaaggaaatgccacaatcattttctgcaatcacattaagtaacacagagatgaataatattaagactaatgcacagagaaacaaacttccaatagaggaacttggtaaagtttctaaacataaaattgccactaaaagaacaccacataaagaagatgaggcaatgagctgttctgaaaattgttcgagtgcccagggcgactcacttcaggatgagtctcaagggtctcattctgagtccagctctaatccctccaatcctgaaactttgcatgcaaaggcaactgattcagttctacaaggttctgaaggaaacaaggtcaagaggacatcctgcatgtatggggcaaactgctataggaagaatcctgttcattttcaacattttagccatcctggtgatagtgattatggaggtgtacaaatcgtgggccaagatgagactgatgaccggcctgaatgtccctatggaccatcctgttataggaagaatccccagcacaagatagaatatagacataatacgcttccagtgagaaatgttttagatgaagataatgataatgttgggcaacccaatgagtatgacctgaacgacagctttctagatgatgaggaagaagactatgagccaacagatgaagattctgactgggaaccaggaaaggaagatgaagagaaggaagatgtggaagagcttttgaaagaagcaaaaaggtttatgaaaagaaaatagtaactaacttctgtagtcatatctgccttacatttactttttctttgtgggaaaacatttatgaactaaggaggtacttaagtgacagttattttccttcttttgatagttaatgacttttactactgactctttacaaatgagacattgaaacgtcagccttcagtataatagatggaattttttgttgccttgccttttctttcctacttaaagcatctggaaataggaagacagagaaggtagagtaaaaatggatattttttatgtactttgtatattggtaataaaaagtaaaagccataggttgcataaaactttggtctttttaaatttttttccaaagattatggagtactctgcaagtataaccaggcaaagtacatgaaaacatgcctcttttcattgttactgaagtaattctgtaagcagaaccaggctttaaaaaatgcagccattacataatggcgttttttttctagtaccttagatgtgagctttgcaatttcacttactacttttatccttcaaaacttgggaagattggttccaaatgggtactgaaaatagattcaactaggctgtagaagagaaatgttcaccatgtagggaatgttattttgtgttccacatctgcaatttactgtatgtttgaatttaaaagtaaaaaaactcaaaaaacttgaccttttttttcaaactaaagtcctagctgattattttaactctcagtgtgctgtctttatattaagaatagagaaacgacataactttctcaaatggcattagttttgccttagtttttttgacctcagatgaaagtagcaagttgtttgccagttgaaagttcaagattctggcctcccatatcaagaagaaaccacttattctccagttttacaaagtatctttctgtatttctgttctaaaactactttaagccctataatgctcttcatattacgtgactttgaattgttaaaatgtagtttagaatctttaataacagttgggttgtgtacacagagcaggagatatttattgaaatcataaatcactaagccaaaagaatctttgttaaatgctattattttctactctaaaggaacctaaaaatttatatcttaaaagatcaaaacatatttataataatattttctcattgctttaaaatatatctcccagtaattatacaatatttaatatttacttaaactggaacaagaataagataaacatttctctagactataacctattattctgatttttatctcttattgttatttgggaactatttttccccttataatgtccctttagccttggtagtataacaaatctacgaatgtaatatttaacttattctcatccctgccactaacttaatccttgaagtgttacataatctactcctaggtatatacccagaggaattgaaaacatttccacataaaaactgtacacaatgtcaatagaagcattattcttaacagccaaaaagtataaacacccaaagtctatcaactatcaactgggtgaatggataagcaaaacgtggtatatctgtgcaatggaatattatttggtcataaaaaggaataaagtactgatacatgctacaagatagatgaaccttgaaggcaagtaaaagaagccagacacaaaaggccacatactgtatgaactcatttatatgaaatttccaaaacaggcaaatccataaagacagaaagcaaatttgtggttgccagggacttggggaggaagaatggggagtgactgctaatgagtataggatttccttttgagtgataaaaatgttctaagattagatggcagtgatggttgcacaactctgtaaatatattacaaacaatgcattgtacactttcaaagggtagatttcattgcacgtgaactatatatttcaataaatctgtcacaaaaaagtaatgcaaagggtaataccagtcttttagaaggaaaaaaatatttaatatcaaaggatattcttcgtagtaatgtaatagttcatggtagctgcttttaacgatacagttttaatgcaactttcataatcatcctgaagacacttttgagtataactattgtataaataaatgtatagcttaattga

SEQ ID NO: 108382 - DNA, 1182 bp, Homo sapiens
  Payload ID: 1291
  Gene Symbol: APLF
  Gene Name: aprataxin and PNKP like factor
  ENST ID: ENST00000394342
  CDS Start-End: 1-1182
atggagaccaccatggggttcatggatgacaatgccaccaacacttccaccagcttcctttctgtgctcaaccctcatggagcccatgccacttccttcccattcaacttcagctacagcgactatgatatgcctttggatgaagatgaggatgtgaccaattccaggacgttctttgctgccaagattgtcattgggatggccctggtgggcatcatgctggtctgcggcattggaaacttcatctttatcgctgccctggtccgctacaagaaactgcgcaacctcaccaacctgctcatcgccaacctggccatctctgacttcctggtggccattgtctgctgcccctttgagatggactactatgtggtgcgccagctctcctgggagcacggccacgtcctgtgcacctctgtcaactacctgcgcactgtctctctctatgtctccaccaatgccctgctggccatcgccattgacaggtatctggctattgtccatccgctgagaccacggatgaagtgccaaacagccactggcctgattgccttggtgtggacggtgtccatcctgatcgccatcccttccgcctacttcaccaccgagacggtcctcgtcattgtcaagagccaggaaaagatcttctgcggccagatctggcctgtggaccagcagctctactacaagtcctacttcctctttatctttggcatagaattcgtgggccccgtggtcaccatgaccctgtgctatgccaggatctcccgggagctctggttcaaggcggtccctggattccagacagagcagatccgcaagaggctgcgctgccgcaggaagacggtcctggtgctcatgtgcatcctcaccgcctacgtgctatgctgggcgcccttctacggcttcaccatcgtgcgcgacttcttccccaccgtgtttgtgaaggagaagcactacctcactgccttctacatcgtcgagtgcatcgccatgagcaacagcatgatcaacactctgtgcttcgtgaccgtcaagaacgacaccgtcaagtacttcaaaaagatcatgttgctccactggaaggcttcttacaatggcggtaagtccagtgcagacctggacctcaagacaattgggatgcctgccaccgaagaggtggactgcatcagactaaaataa

SEQ ID NO: 108383 - DNA, 3906 bp, Homo sapiens
  Payload ID: 1291
  Gene Symbol: APLF
  Gene Name: aprataxin and PNKP like factor
  ENST ID: ENST00000445692
  CDS Start-End: 130-972
gcggggagcctttgaggccctccctcggtgttttttcccagggcgtgggcttgccccgcgcgtgtctgtggagggcggaaacagcggaggggccagtctcctggcgaaggggcctaatccttgcccgccatgtccgggggcttcgagctgcagccgcgggacggcggtccccgggtggccctggcgcccggggagacggtgatcggccgcgggccgctgctgggaataacagacaagagagtatccagaagacatgccattcttgaggtggcaggtggtcagctgcgaatcaaaccgatacacacaaatccatgtttttaccagtcttcagagaagagtcagctcttaccattgaagccaaatctatggtgctatttgaatcctggagacagcttttctttgttagttgacaaatacattttccgcattctctctataccctctgaagtggaaatgcaatgtaccttaagaaacagtcaagtgcttgatgaagataatatattgaatgaaacaccaaaatcccccgtgattaatttacctcatgagactactggtgcctcacaactggaaggaagcacagaaatagccaagacccagatgactcccacaaatagtgtgtctttcctaggtgaaaatagagactgcaataagcagcagccaatccttgccgagaggaaaagaatccttccaacttggatgttagcagaacatttaagtgatcaaaacctttcagtaccagcaatcagtggaggtaatgtaatccagggaagtggaaaagaagaaatctgcaaagataaatcccagctaaacacaacccagcaaggaagaaggcaattaatttcatcaggaagttcagaaaatacatcagcagaacaagacacaggagaagagtgcaaaaatactgatcaggaagagtctaccatttcatccaagatgcttattgtcaaaaatggaagtatcagaagcatttgaagtaaataatgaaaacctccatttgcctcatccttcgacctcattgcgttactaattttttggaaatgccacaatcattttctgcaatcacattaagtaacacagagatgaataatattaagactaatgcacagagaaacaaacttccaatagaggaacttggtaaagtttctaaacataaaattgccactaaaagaacaccacataaagaagatgaggcaatgagctgttctgaaaattgttcgagtgcccagggcgactcacttcaggatgagtctcaagggtctcattctgagtccagctctaatccctccaatcctgaaactttgcatgcaaaggcaactgattcagttctacaaggttctgaaggaaacaaggtcaagaggacatcctgcatgtatggggcaaactgctataggaagaatcctgttcattttcaacattttagccatcctggtgatagtgattatggaggtgtacaaatcgtgggccaagatgagactgatgaccggcctgaatgtccctatggaccatcctgttataggaagaatccccagcacaagatagaatatagacataatacgcttccagtgagaaatgttttagatgaagataatgataatgttgggcaacccaatgagtatgacctgaacgacagctttctagatgatgaggaagaagactatgagccaacagatgaagattctgactgggaaccaggaaaggaagatgaagagaaggaagatgtggaagagcttttgaaagaagcaaaaaggtttatgaaaagaaaatagtaactaacttctgtagtcatatctgccttacatttactttttctttgtgggaaaacatttatgaactaaggaggtacttaagtgacagttattttccttcttttgatagttaatgacttttactactgactctttacaaatgagacattgaaacgtcagccttcagtataatagatggaattttttgttgccttgccttttctttcctacttaaagcatctggaaataggaagacagagaaggtagagtaaaaatggatattttttatgtactttgtatattggtaataaaaagtaaaagccataggttgcataaaactttggtctttttaaatttttttccaaagattatggagtactctgcaagtataaccaggcaaagtacatgaaaacatgcctcttttcattgttactgaagtaattctgtaagcagaaccaggctttaaaaaatgcagccattacataatggcgttttttttctagtaccttagatgtgagctttgcaatttcacttactacttttatccttcaaaacttgggaagattggttccaaatgggtactgaaaatagattcaactaggctgtagaagagaaatgttcaccatgtagggaatgttattttgtgttccacatctgcaatttactgtatgtttgaatttaaaagtaaaaaaactcaaaaaacttgaccttttttttcaaactaaagtcctagctgattattttaactctcagtgtgctgtctttatattaagaatagagaaacgacataactttctcaaatggcattagttttgccttagtttttttgacctcagatgaaagtagcaagttgtttgccagttgaaagttcaagattctggcctcccatatcaagaagaaaccacttattctccagttttacaaagtatctttctgtatttctgttctaaaactactttaagccctataatgctcttcatattacgtgactttgaattgttaaaatgtagtttagaatctttaataacagttgggttgtgtacacagagcaggagatatttattgaaatcataaatcactaagccaaaagaatctttgttaaatgctattattttctactctaaaggaacctaaaaatttatatcttaaaagatcaaaacatatttataataatattttctcattgctttaaaatatatctcccagtaattatacaatatttaatatttacttaaactggaacaagaataagataaacatttctctagactataacctattattctgatttttatctcttattgttatttgggaactatttttccccttataatgtccctttagccttggtagtataacaaatctacgaatgtaatatttaacttattctcatccctgccactaacttaatccttgaagtgttacataatctactcctaggtatatacccagaggaattgaaaacatttccacataaaaactgtacacaatgtcaatagaagcattattcttaacagccaaaaagtataaacacccaaagtctatcaactatcaactgggtgaatggataagcaaaacgtggtatatctgtgcaatggaatattatttggtcataaaaaggaataaagtactgatacatgctacaagatagatgaaccttgaaggcaagtaaaagaagccagacacaaaaggccacatactgtatgaactcatttatatgaaatttccaaaacaggcaaatccataaagacagaaagcaaatttgtggttgccagggacttggggaggaagaatggggagtgactgctaatgagtataggatttccttttgagtgataaaaatgttctaagattagatggcagtgatggttgcacaactctgtaaatatattacaaacaatgcattgtacactttcaaagggtagatttcattgcacgtgaactatatatttcaataaatctgtcacaaaaaagtaatgcaaagggtaataccagtcttttagaaggaaaaaaatatttaatatcaaaggatattcttcgtagtaatgtaatagttcatggtagctgcttttaacgatacagttttaatgcaactttcataatcatcctgaagacacttttgagtataactattgtataaataaatgtatagcttaattga

SEQ ID NO: 108384 - DNA, 2863 bp, Homo sapiens
  Payload ID: 1291
  Gene Symbol: APLF
  Gene Name: aprataxin and PNKP like factor
  ENST ID: ENST00000529851
  CDS Start-End: 161-718
ggggccgggctctgagaggaccggcgcagccgcggggagcctttgaggccctccctcggtgttttttcccagggcgtgggcttgccccgcgcgtgtctgtggagggcggaaacagcggaggggccagtctcctggcgaaggggcctaatccttgcccgccatgtccgggggcttcgagctgcagccgcgggacggcggtccccgggtggccctggcgcccggggagacggtgatcggccgcgggccgctgctgggaatacacacaaatccatgtttttaccagtcttcagagaagagtcagctcttaccattgaagccaaatctatggtgctatttgaatcctggagacagcttttctttgttagttgacaaatacattttccgcattctctctataccctctgaagtggaaatgcaatgtaccttaagaaacagtcaagtgcttgatgaagataatatattgaatgaaacaccaaaatcccccgtgattaatttacctcatgagactactggtgcctcacaactggaaggaagcacagaaatagccaagacccagatgactcccacaaatagtgtgtctttcctaggtgaaaatagagactgcaataagcagcagccaatccttgccgagaggaaaagaatccttccaacttggatgttagcagaacatttaagtgatcaaaacctttcagtaccagcaatcagtggaggtaggtaatgtaatccagggaagtggaaaagaagaaatctgcaaagataaatcccagctaaacacaacccagcaaggaagaaggcaattaatttcatcaggaagttcagaaaatacatcagcagaacaagacacaggagaagagtgcaaaaatactgatcaggaagagtctaccatttcatccaaggaaatgccacaatcattttctgcaatcacattaagtaacacagagatgaataatattaagactaatgcacagagaaacaaacttccaatagaggaacttggtaaagtttctaaacataaaattgccactaaaagaacaccacataaagaagatgaggcaatgagctgttctgaaaattgttcgagtgcccagggcgactcacttcaggatgagtctcaagggtctcattctgagtccagctctaatccctccaatcctgaaactttgcatgcaaaggcaactgattcagttctacaaggttctgaaggaaacaaggtcaagaggacatcctgcatgtatggggcaaactgctataggaagaatcctgttcattttcaacattttagccatcctggtgatagtgattatggaggtgtacaaatcgtgggccaagatgagactgatgaccggcctgaatgtccctatggaccatcctgttataggaagaatccccagcacaagatagaatatagacataatacgcttccagtgagaaatgttttagatgaagataatgataatgttgggcaacccaatgagtatgacctgaacgacagctttctagatgatgaggaagaagactatgagccaacagatgaagattctgactgggaaccaggaaaggaagatgaagagaaggaagatgtggaagagcttttgaaagaagcaaaaaggtttatgaaaagaaaatagtaactaacttctgtagtcatatctgccttacatttactttttctttgtgggaaaacatttatgaactaaggaggtacttaagtgacagttattttccttcttttgatagttaatgacttttactactgactctttacaaatgagacattgaaacgtcagccttcagtataatagatggaattttttgttgccttgccttttctttcctacttaaagcatctggaaataggaagacagagaaggtagagtaaaaatggatattttttatgtactttgtatattggtaataaaaagtaaaagccataggttgcataaaactttggtctttttaaatttttttccaaagattatggagtactctgcaagtataaccaggcaaagtacatgaaaacatgcctcttttcattgttactgaagtaattctgtaagcagaaccaggctttaaaaaatgcagccattacataatggcgttttttttctagtaccttagatgtgagctttgcaatttcacttactacttttatccttcaaaacttgggaagattggttccaaatgggtactgaaaatagattcaactaggctgtagaagagaaatgttcaccatgtagggaatgttattttgtgttccacatctgcaatttactgtatgtttgaatttaaaagtaaaaaaactcaaaaaacttgaccttttttttcaaactaaagtcctagctgattattttaactctcagtgtgctgtctttatattaagaatagagaaacgacataactttctcaaatggcattagttttgccttagtttttttgacctcagatgaaagtagcaagttgtttgccagttgaaagttcaagattctggcctcccatatcaagaagaaaccacttattctccagttttacaaagtatctttctgtatttctgttctaaaactactttaagccctataatgctcttcatattacgtgactttgaattgttaaaatgtagtttagaatctttaataacagttgggttgtgtacacagagcaggagatatttattgaaatcataaatcactaagccaaaagaatctttgttaaatgctattattttctactctaaaggaacctaaaaatttatatcttaaaagatcaaaacatatttataataatattttctcattgctttaaaatatatctcccagtaattatacaatatttaatatttacttaaactggaacaagaataagataa

SEQ ID NO: 108385 - DNA, 2752 bp, Homo sapiens
  Payload ID: 1292
  Gene Symbol: AQP1
  Gene Name: aquaporin 1 (Colton blood group)
  Uniprot ID: P29972
  ENST ID: ENST00000311813
  CDS Start-End: 56-865
ctctcagagggaattgagcacccggcagcggtctcaggccaagccccctgccagcatggccagcgagttcaagaagaagctcttctggagggcagtggtggccgagttcctggccacgaccctctttgtcttcatcagcatcggttctgccctgggcttcaaatacccggtggggaacaaccagacggcggtccaggacaacgtgaaggtgtcgctggccttcgggctgagcatcgccacgctggcgcagagtgtgggccacatcagcggcgcccacctcaacccggctgtcacactggggctgctgctcagctgccagatcagcatcttccgtgccctcatgtacatcatcgcccagtgcgtgggggccatcgtcgccaccgccatcctctcaggcatcacctcctccctgactgggaactcgcttggccgcaatgacctggctgatggtgtgaactcgggccagggcctgggcatcgagatcatcgggaccctccagctggtgctatgcgtgctggctactaccgaccggaggcgccgtgaccttggtggctcagccccccttgccatcggcctctctgtagcccttggacacctcctggctattgactacactggctgtgggattaaccctgctcggtcctttggctccgcggtgatcacacacaacttcagcaaccactggattttctgggtggggccattcatcgggggagccctggctgtactcatctacgacttcatcctggccccacgcagcagtgacctcacagaccgcgtgaaggtgtggaccagcggccaggtggaggagtatgacctggatgccgacgacatcaactccagggtggagatgaagcccaaatagaaggggtctggcccgggcatccacgtagggggcaggggcaggggcgggcggagggaggggaggggtgaaatccatactgtagacactctgacaagctggccaaagtcacttccccaagatctgccagacctgcatggtcaagcctcttatgggggtgtttctatctctttctttctctttctgtttcctggcctcagagcttcctggggaccaagatttaccaattcacccactcccttgaagttgtggaggaggtgaaagaaagggacccacctgctagtcgcccctcagagcatgatgggaggtgtgccagaaagtcccccctcgccccaaagttgctcaccgactcacctgcgcaagtgcctgggattctaccgtaattgctttgtgcctttgggcacggccctccttcttttcctaacatgcaccttgctcccaatggtgcttggagggggaagagatcccaggaggtgcagtggagggggcaagctttgctccttcagttctgcttgctcccaagcccctgacccgctcggacttactgcctgaccttggaatcgtccctatatcagggcctgagtgacctccttctgcaaagtggcagggaccggcagagctctacaggcctgcagcccctaagtgcaaacacagcatgggtccagaagacgtggtctagaccagggctgctctttccacttgccctgtgttctttccccaggggcatgactgtcgccacacgcctctgtgtacatgtgtgcagagcagacaggctacaaagcagagatcgacagacagccaggtagttggaactttctgttccctatggagaggcttccctacacagggcctgctattgcagaatgaagccatttagagggtgaaggagaaatacccatgttacttctctgagttttagttggtctttccatctatcactgcattatcttgctcattcttcagttctctactccctcttgtcagtgtagacacaggtcaccattatgctggtgtatgtttatcaaagagcacttgagctgtctgaagcccaaagcctgaggacagaaagaccctgatgcaggtcagcccatggaggcagatgcccttgctgggcctgggggttttccaagccctcagctggtcctgaccaggatggagcaagctcttcccttgctcatgagctcctgatcagaggcatttgagcagctgaataacctgcacaggcttgctgtatgacccctggccacagccttccctctgcattgacctggaggggagaggtcagccttgacctaatgaggtagctatagttgcagcccaaggacagttcagagatcaggatcagctttgaaggctggattctatctacataagtcctttcaattccaccagggccagagcagctccaccactgtgcacttagccatgatggcaacagaaaccaagagacacaattacgcaggtatttagaagcagagggacaaccagaaggcccttaactatcaccagtgcatcacatctgcacactctcttctccattccctagcaggaacttctagctcatttaacagataaagaaactgaggcccacggtttcagctagacaatgatttggccaggcctagtaaccaaggccctgtctctggctactccctggaccacgaggctgattcctctcatttccagcttctcagtttctgcctgggcaatggccaggggccaggagtggggagagttgtgatggaggggagaggggtcacacccaccccctgcctggttctaggctgctgcacaccaaggccctgcatctgtctgctctgcatatatgtctctttggagttggaatttcattatatgttaagaaaataaaggaaaatgacttgtaaggtc

SEQ ID NO: 108386 - DNA, 1009 bp, Homo sapiens
  Payload ID: 1292
  Gene Symbol: AQP1
  Gene Name: aquaporin 1 (Colton blood group)
  Uniprot ID: P29972
  ENST ID: ENST00000409899
  CDS Start-End: 153-617
aagcaatgggagacaggccttggaccaaggaaagagacggggtggagaaggagagagagagggtggagacaatagggaggcaggcacagaggagaaagaggggtggagggagccaggacctcaccgaaggcctcctcagccctggaatttagatgcagtcgggcatggggtggaatgttctggacttttggctggctgatggtgtgaactcgggccagggcctgggcatcgagatcatcgggaccctccagctggtgctatgcgtgctggctactaccgaccggaggcgccgtgaccttggtggctcagccccccttgccatcggcctctctgtagcccttggacacctcctggctattgactacactggctgtgggattaaccctgctcggtcctttggctccgcggtgatcacacacaacttcagcaaccactggattttctgggtggggccattcatcgggggagccctggctgtactcatctacgacttcatcctggccccacgcagcagtgacctcacagaccgcgtgaaggtgtggaccagcggccaggtggaggagtatgacctggatgccgacgacatcaactccagggtggagatgaagcccaaatagaaggggtctggcccgggcatccacgtagggggcaggggcaggggcgggcggagggaggggaggggtgaaatccatactgtagacactctgacaagctggccaaagtcacttccccaagatctgccagacctgcatggtcaagcctcttatgggggtgtttctatctctttctttctctttctgtttcctggcctcagagcttcctggggaccaagatttaccaattcacccactcccttgaagttgtggaggaggtgaaagaaagggacccacctgctagtcgcccctcagagcatgatgggaggtgtgccagaaagtcccccctcgccccaaagttgctcaccgactcacctgcgcaagtgcctgggattctaccgtaattgctttgtgcc

SEQ ID NO: 108387 - DNA, 1140 bp, Homo sapiens
  Payload ID: 1292
  Gene Symbol: AQP1
  Gene Name: aquaporin 1 (Colton blood group)
  Uniprot ID: P29972
  ENST ID: ENST00000409611
  CDS Start-End: 119-775
gagagggtggagacaatagggaggcaggcacagaggagaaagaggggtggagggagccaggacctcaccgaaggcctcctcagccctggaatttagatgcagtcgggcatggggtggaatgttctggacttttgggtatgaagccgtgtcccctgctgggccttcccacctttttgcatctcttctcctaggagtgctcctgaccatcaccttcatgcctggggctcgccccttgcctctggtcttggtaccccagaataccctggcctggatgcagctggatgcaaaggccccagctcaccccaggcctctccagcttctaggcagagtggggcctgggtctaggcagctggctgatggtgtgaactcgggccagggcctgggcatcgagatcatcgggaccctccagctggtgctatgcgtgctggctactaccgaccggaggcgccgtgaccttggtggctcagccccccttgccatcggcctctctgtagcccttggacacctcctggctattgactacactggctgtgggattaaccctgctcggtcctttggctccgcggtgatcacacacaacttcagcaaccactggattttctgggtggggccattcatcgggggagccctggctgtactcatctacgacttcatcctggccccacgcagcagtgacctcacagaccgcgtgaaggtgtggaccagcggccaggtggaggagtatgacctggatgccgacgacatcaactccagggtggagatgaagcccaaatagaaggggtctggcccgggcatccacgtagggggcaggggcaggggcgggcggagggaggggaggggtgaaatccatactgtagacactctgacaagctggccaaagtcacttccccaagatctgccagacctgcatggtcaagcctcttatgggggtgtttctatctctttctttctctttctgtttcctggcctcagagcttcctggggaccaagatttaccaattcacccactcccttgaagttgtggaggaggtgaaagaaagggacccacctgctagtcgcccctcagagcatgatgggaggtgtgccagaaagtcccccctcgccccaaagttgctcaccgactcacctgcgcaagtgcct

SEQ ID NO: 108388 - DNA, 2487 bp, Homo sapiens
  Payload ID: 1292
  Gene Symbol: AQP1
  Gene Name: aquaporin 1 (Colton blood group)
  Uniprot ID: P29972
  ENST ID: ENST00000441328
  CDS Start-End: 40-600
taaaagtggcccaggagagtgctcctgaccatcaccttcatgcctggggctcgccccttgcctctggtcttggtaccccagaataccctggcctggatgcagctggatgcaaaggccccagctcaccccaggcctctccagcttctaggcagagtggggcctgggtctaggcagctggctgatggtgtgaactcgggccagggcctgggcatcgagatcatcgggaccctccagctggtgctatgcgtgctggctactaccgaccggaggcgccgtgaccttggtggctcagccccccttgccatcggcctctctgtagcccttggacacctcctggctattgactacactggctgtgggattaaccctgctcggtcctttggctccgcggtgatcacacacaacttcagcaaccactggattttctgggtggggccattcatcgggggagccctggctgtactcatctacgacttcatcctggccccacgcagcagtgacctcacagaccgcgtgaaggtgtggaccagcggccaggtggaggagtatgacctggatgccgacgacatcaactccagggtggagatgaagcccaaatagaaggggtctggcccgggcatccacgtagggggcaggggcaggggcgggcggagggaggggaggggtgaaatccatactgtagacactctgacaagctggccaaagtcacttccccaagatctgccagacctgcatggtcaagcctcttatgggggtgtttctatctctttctttctctttctgtttcctggcctcagagcttcctggggaccaagatttaccaattcacccactcccttgaagttgtggaggaggtgaaagaaagggacccacctgctagtcgcccctcagagcatgatgggaggtgtgccagaaagtcccccctcgccccaaagttgctcaccgactcacctgcgcaagtgcctgggattctaccgtaattgctttgtgcctttgggcacggccctccttcttttcctaacatgcaccttgctcccaatggtgcttggagggggaagagatcccaggaggtgcagtggagggggcaagctttgctccttcagttctgcttgctcccaagcccctgacccgctcggacttactgcctgaccttggaatcgtccctatatcagggcctgagtgacctccttctgcaaagtggcagggaccggcagagctctacaggcctgcagcccctaagtgcaaacacagcatgggtccagaagacgtggtctagaccagggctgctctttccacttgccctgtgttctttccccaggggcatgactgtcgccacacgcctctgtgtacatgtgtgcagagcagacaggctacaaagcagagatcgacagacagccaggtagttggaactttctgttccctatggagaggcttccctacacagggcctgctattgcagaatgaagccatttagagggtgaaggagaaatacccatgttacttctctgagttttagttggtctttccatctatcactgcattatcttgctcattcttcagttctctactccctcttgtcagtgtagacacaggtcaccattatgctggtgtatgtttatcaaagagcacttgagctgtctgaagcccaaagcctgaggacagaaagaccctgatgcaggtcagcccatggaggcagatgcccttgctgggcctgggggttttccaagccctcagctggtcctgaccaggatggagcaagctcttcccttgctcatgagctcctgatcagaggcatttgagcagctgaataacctgcacaggcttgctgtatgacccctggccacagccttccctctgcattgacctggaggggagaggtcagccttgacctaatgaggtagctatagttgcagcccaaggacagttcagagatcaggatcagctttgaaggctggattctatctacataagtcctttcaattccaccagggccagagcagctccaccactgtgcacttagccatgatggcaacagaaaccaagagacacaattacgcaggtatttagaagcagagggacaaccagaaggcccttaactatcaccagtgcatcacatctgcacactctcttctccattccctagcaggaacttctagctcatttaacagataaagaaactgaggcccacggtttcagctagacaatgatttggccaggcctagtaaccaaggccctgtctctggctactccctggaccacgaggctgattcctctcatttccagcttctcagtttctgcctgggcaatggccaggggccaggagtggggagagttgtgatggaggggagaggggtcacacccaccccctgcctggttctaggctgctgcacaccaaggccctgcatctgtctgctctgcatatatgtctctttggagttggaatttcattatatgttaagaaaataaaggaaaatgacttgtaaggtc

SEQ ID NO: 108389 - DNA, 1791 bp, Homo sapiens
  Payload ID: 1293
  Gene Symbol: AQP10
  Gene Name: aquaporin 10
  Uniprot ID: Q96PS8
  ENST ID: ENST00000324978
  CDS Start-End: 41-946
agacagagggagcagtgaatagcaatagggtgtttccaccatggtcttcactcaggccccggctgaaatcatgggccacctccggatacgcagcctcctggcccggcagtgcctggcagagtttctgggtgtgtttgtactcatgctcctcacccaaggagctgtggcccaggctgtcaccagtggagaaaccaaaggcaacttcttcaccatgtttctggctggctctctggccgttacgatagccatctacgtgggtggtaacgtctcaggggcccacctgaatccagccttctccctggccatgtgcatcgttggacgcctcccctgggtcaagctccccatttacatcttggtgcagttgctgtctgctttctgtgcttcgggagccacctatgttctctaccatgatgccctacagaactatacaggtgggaacctgacagtgactggccccaaggagacagcctccatttttgccacctatcctgccccctatctgtccctgaacaatggcttcctggatcaggttctgggcactgggatgctgattgtggggctcttggccatcctggacagacggaacaagggagtccctgcgggtctggagcctgtggtggtggggatgctgatcctggccctcgggttatccatgggtgccaactgcgggattccactcaaccctgcccgggacctgggcccacgtctcttcacctacgtggctggctggggtcctgaagtcttcagtgctggtaatggctggtggtgggtgcctgtggtggcccctctggtgggggccaccgttggcacagccacttaccagctgttggtggctctgcaccaccctgagggcccagagccagctcaggatctggtgtctgctcaacacaaagcctcagagttggaaactcctgcctcagctcagatgctggagtgtaagctatgattaggacaaccctcacttcactcatggaccctggagccagccactgaccccgcctgggaacaacagtcattcttcctctttgttaatgtgccagaacctgggaggcttctctgtttatctgtttggcatcccttcctcctaaactaagaaggatcctggacagggagaagtggaggaggataaggtaccaggactcaggcttctcatcccctcctcccgcaaagcggttttctgaccctcagggcctctcggaatgtagttgctcgaggtaaccgctagagggtgcgcacctggatgctggatggggacggctgcgggcatctgcagggtggagggggccaccatccagtgtagggcacaaccctggggactgccctccatagcctgtcccgactgccgactcctagctctcatcgcctcggcgcctcccaccttcaccctctcggggatgcctccccaagagggtagttaggggtggggaagccgcctccacccagggggcgtggtgggggcggagggaaggagggcggcggggcacagagacagagagcaaggctgtgaaactgaggcaccgttcctagacatctcggtgctgtgtcgttcattcaaggagagttgagatacagtgaaatgagccagggcgaggagggagggtgaaggaacggagggcgggcggctccgaggagcgagagtcgggctgagggcaacctggcgccagggaaaattctggttattcaccacttctacagctctcctgccgctccctgcagaggatgctcgttttgcagagaaggcagtgttcctctattcccttcttccgaattaaaaataccccctcagagcga

SEQ ID NO: 108390 - DNA, 2262 bp, Homo sapiens
  Payload ID: 1293
  Gene Symbol: AQP10
  Gene Name: aquaporin 10
  Uniprot ID: Q96PS8
  ENST ID: ENST00000484864
  CDS Start-End: 37-831
agagggagcagtgaatagcaatagggtgtttccaccatggtcttcactcaggccccggctgaaatcatgggccacctccggatacgcagcctcctggcccggcagtgcctggcagagtttctgggtgtgtttgtactcatgctcctcacccaaggagctgtggcccaggctgtcaccagtggagaaaccaaaggcaacttcttcaccatgtttctggctggctctctggccgttacgatagccatctacgtgggtggtaacgtctcaggggcccacctgaatccagccttctccctggccatgtgcatcgttggacgcctcccctgggtcaagctccccatttacatcttggtgcagttgctgtctgctttctgtgcttcgggagccacctatgttctctaccatgatgccctacagaactatacaggtgggaacctgacagtgactggccccaaggagacagcctccatttttgccacctatcctgccccctatctgtccctgaacaatggcttcctggatcaggttctgggcactgggatgctgattgtggggctcttggccatcctggacagacggaacaagggagtccctgcgggtctggagcctgtggtggtggggatgctgatcctggccctcgggttatccatgggtgccaactgcgggattccactcaaccctgcccgggacctgggcccacgtctcttcacctacgtggctggctggggtcctgaagtcttcaggtgggagacagactctcctggtgctggcctccactcaccttcctctgctaagggctctgtccctgggtccacagcactctgcctttaaaatagctctcttggcttcttaggacagtgttctttctccaagtcatattctccccctttctcccttgcttccctcccaacttttcactgaaacagtaagatttagaggttgtgttcttaggcatgccacattacttccatgcacattagtgacttcatcagcaaaattaatatattcagataattccctaaggcaagaggctggaccaagctctcctggggttccctcttctaaatactatgctttggtgacaaggcaatcctcttcctggtgtctaccaccctgggaacaactttagggcactctcttgttactgccccccgtccttggagaggggaaggctaagggagtcactcctgataccttcccactgtccttcttttgcagtgctggtaatggctggtggtgggtgcctgtggtggcccctctggtgggggccaccgttggcacagccacttaccagctgttggtggctctgcaccaccctgagggcccagagccagctcaggatctggtgtctgctcaacacaaagcctcagagttggaaactcctgcctcagctcagatgctggagtgtaagctatgattaggacaaccctcacttcactcatggaccctggagccagccactgaccccgcctgggaacaacagtcattcttcctctttgttaatgtgccagaacctgggaggcttctctgtttatctgtttggcatcccttcctcctaaactaagaaggatcctggacagggagaagtggaggaggataaggtaccaggactcaggcttctcatcccctcctcccgcaaagcggttttctgaccctcagggcctctcggaatgtagttgctcgaggtaaccgctagagggtgcgcacctggatgctggatggggacggctgcgggcatctgcagggtggagggggccaccatccagtgtagggcacaaccctggggactgccctccatagcctgtcccgactgccgactcctagctctcatcgcctcggcgcctcccaccttcaccctctcggggatgcctccccaagagggtagttaggggtggggaagccgcctccacccagggggcgtggtgggggcggagggaaggagggcggcggggcacagagacagagagcaaggctgtgaaactgaggcaccgttcctagacatctcggtgctgtgtcgttcattcaaggagagttgagatacagtgaaatgagccagggcgaggagggagggtgaaggaacggagggcgggcggctccgaggagcgagagtcgggctgagggcaacctggcgccagggaaaattctggttattcaccacttctacagctctcctgccgctccctgcagaggatgctcgttttgcagagaaggcagtgttcctctattcccttcttccgaattaaaaataccccctcagagcga

SEQ ID NO: 108391 - DNA, 2152 bp, Homo sapiens
  Payload ID: 1294
  Gene Symbol: AQP11
  Gene Name: aquaporin 11
  Uniprot ID: Q8NBQ7
  ENST ID: ENST00000313578
  CDS Start-End: 359-1174
tccgccgccgcgcccgcctacaaggccctgagggagactgcggagggtgagtgcgcggtgggctcggctgaccgttggccctgcggccggcgccctaggctacctcccttcgcctccccgcgcctccccgcgcctccccgcctccccgcctccccgcctcctcggctctggttccaacaccccagcgccaagccggggaggcggggaggacttcttaagtgtgccgctcgggagcctcccgctcgtcccgccccgaggggcgtgaggaggggaggggctgcggacttcggactcgggcctggagaccgcctcctacccagagccggagcccgcaacccgctcaggcggcgacggagccatgtcgccgctgctggggctccggtccgagctgcaggacacctgcacctcgctgggactgatgctgtcggtggtgctgctcatggggctggcccgcgtagtcgcccggcagcagctgcacaggccggtggcccacgccttcgtcctggagtttctagccaccttccagctctgctgctgcacccacgagctgcaactgctgagcgaacagcaccccgcgcaccccacctggacgctgacgctcgtctacttcttctcgcttgtgcatggcctgactctggtgggcacgtccagcaacccgtgcggcgtgatgatgcagatgatgctggggggcatgtcccccgagacgggtgcggtgaggctattggctcagctggttagtgccctgtgcagcaggtactgcacaagcgccttgtggagcttgggtctgacccagtatcacgtcagcgagaggagcttcgcttgcaagaatcccatccgagtcgacttgctcaaagcggtcatcacagaggccgtctgctcctttctcttccacagcgctctgctgcacttccaggaagtccgaaccaagcttcgtatccacctgctggctgcactcatcacctttttggtctatgcaggaggaagtctaacaggagctgtatttaatccagctttggcactttcgctacatttcatgtgttttgatgaagcattccctcagttttttatagtatactggctggctccttctttaggtatattgttgatgattttgatgttcagctttttccttccatggctgcataacaaccatacaattaataaaaaggaataactgttccaaagactcagactaacatacaggacagtccagctggatgtgataaagattttatcacctcatatggaaaacaccggctgcactggattcatcagtgttaacttcctttgaggaagctgccttatagttttcatcactgggactttaaaaaaaaattactgtgaaaatgaggtattctgtacttctcagttaagacttgttctttgagtgatgtattaaatgctgctagaaaagcctcattacattaaatataaatcaatcttaaatgataattgttaactttgatgaaaaacgagtacaggatgagaagggaagtaaaggtgatagtaagatcaacgaatttgtgtatcaagtgtcacccaaatgaacagaatttttaactataaaagtacaaggcgtcaacttacagaactggggagaggatactttcagccaccacctcacaaaatgataccatcaagcagtgtcatctttcaacaggaaagttgcttttagaagtagaatatatattcactcacatgcaagcgatttcctacattttaagtacattaaaatctaatacctaaaatagtttctctaaatagacaatctcactagctccagccaagtggttattctttaatagaatataataaaacaaaacacccatacaaagtcaggatttaagcttttcacattctcctttgaaccaacagctagctaccttatgaagtagggagggcatgtatttttaatctccattttacagataaggaaactaagcctagatgggtttgctgccctggcttagatcacatagagccaaataccatctctagtcttcaacttcaatccaaaaattcttctcggtcacgattatgactaaagggaaatcaagggttcatagaaacattaaatactttataataacgttaaaacttgtttagaaattaactagtattttttgaggtttaaagaaccttccagttttac

SEQ ID NO: 108392 - DNA, 1084 bp, Homo sapiens
  Payload ID: 1295
  Gene Symbol: AQP12A
  Gene Name: aquaporin 12A
  Uniprot ID: Q8IXF9
  ENST ID: ENST00000337801
  CDS Start-End: 70-957
gaaccagccagctcctgctctgtcccctcaggtgtcctgcaggcacagctcctcggggggcccaggccgatggcaggtcttaacgtgtccctctccttcttctttgccaccttcgccctctgtgaggcggccaggcgggcctccaaggccctgctcccagtgggcgcctatgaagtcttcgcccgggaggcgatgaggacgctggtcgagctcgggccctgggctggggactttgggcctgacctgctgctcaccctgctcttcctgctcttcctggcgcacggggtcaccttggacggggcctcggccaaccccactgtgtccctgcaggagttcctcatggccgagcagtctctgcctggcacgctgttgaagctggcggcacaggggctgggcatgcaggccgcctgcaccctgatgcgcctctgctgggcctgggagctcagtgacctgcacctgctgcagagcctcatggcccagagctgcagctcggccctgcgcacatccgtgccccacggggcgcttgtggaggccgcctgcgccttttgtttccatctgaccctcctgcacctgcggcacagtcctcccgcctacagcgggcccgctgtggctctgttggtcaccgtcacggcctacacggccgggcccttcacgtctgccttcttcaaccctgccctggccgcctctgtgacctttgcctgctcgggacacaccttactggagtacgtgcaggtgtactggctgggccctctgacagggatggtcctggctgtgctgctgcaccagggccgccttccccaccttttccagaggaacctgttctacggccagaagaacaagtaccgagcaccccgagggaagccggccccggcctcaggggacacccagacccctgcaaaggggtccagtgtccgggagcctgggcgcagtggtgttgaggggccacattccagctgagtggccttgctctgtgtgagccccgtgcgagggccctgcttgtagctggaccctggaaccttctgtagctaagagggaatcctggccccctccccagaagccatttgtcaataaaccatttctaaga

SEQ ID NO: 108393 - DNA, 1110 bp, Homo sapiens
  Payload ID: 1295
  Gene Symbol: AQP12A
  Gene Name: aquaporin 12A
  ENST ID: ENST00000429564
  CDS Start-End: 64-987
gccagctcctgctctgtcccctcaggtgtcctgcaggcacagctcctcggggggcccaggccgatggcaggtcttaacgtgtccctctccttcttctttgccaccttcgccctctgtgaggcggccaggcgggcctccaaggccctgctcccagtgggcgcctatgaagtcttcgcccgggaggcggtgggtgcggtgcagctcgggccctgctgcctggagatgaggacgctggtcgagctcgggccctgggctggggactttgggcctgacctgctgctcaccctgctcttcctgctcttcctggcgcacggggtcaccttggacggggcctcggccaaccccactgtgtccctgcaggagttcctcatggccgagcagtctctgcctggcacgctgttgaagctggcggcacaggggctgggcatgcaggccgcctgcaccctgatgcgcctctgctgggcctgggagctcagtgacctgcacctgctgcagagcctcatggcccagagctgcagctcggccctgcgcacatccgtgccccacggggcgcttgtggaggccgcctgcgccttttgtttccatctgaccctcctgcacctgcggcacagtcctcccgcctacagcgggcccgctgtggctctgttggtcaccgtcacggcctacacggccgggcccttcacgtctgccttcttcaaccctgccctggccgcctctgtgacctttgcctgctcgggacacaccttactggagtacgtgcaggtgtactggctgggccctctgacagggatggtcctggctgtgctgctgcaccagggccgccttccccaccttttccagaggaacctgttctacggccagaagaacaagtaccgagcaccccgagggaagccggccccggcctcaggggacacccagacccctgcaaaggggtccagtgtccgggagcctgggcgcagtggtgttgaggggccacattccagctgagtggccttgctctgtgtgagccccgtgcgagggccctgcttgtagctggaccctggaaccttctgtagctaagagggaatcctggccccctccccagaagccatttgtcaataaaccatttct

SEQ ID NO: 108394 - DNA, 1094 bp, Homo sapiens
  Payload ID: 1296
  Gene Symbol: AQP12B
  Gene Name: aquaporin 12B
  Uniprot ID: A6NM10
  ENST ID: ENST00000407834
  CDS Start-End: 64-987
gccagctcctgctctgtcccctcaggtgtcctgcaggcacagcatctcggggggcccaggccgatggcaggtcttaacgtgtccctctccttcttctttgccaccttcaccctctgtgaggcagccaggcgggcctccaaggccctgctcccagtgggcgcctatgaagtcttcgcccgggaggcggtgggcgcggtgcagctcggggcctgcttcctggagatgaggacgctggtcgagctcgggccctgggctggggactttgggcctgacctgctgctcaccctgctcttcctgctcttcctggcgcacggggtcaccttggacggggcctcggccaaccccaccgtgtccctgcaggagttcctcatggccgaggagtctctgcctggcacgctgctgaagctggcggcacaggggctgggcatgcaggccgcctgcaccctgacgcgcctctgctgggcctgggagctcagtgacctgcacctgctgcagagcctcatggcccagagctgcagctcggccctgcgcacatccgtgccccacggggcgcttgtggaggccgcctgcgccttttgtttccatctgaccctcctgcacctgcggcacagtcctcccgcctacagcgggcccgctgtggctctgttggtcaccgtcacggcctacacggccgggcccttcacgtctgccttcttcaaccctgccctggccgcctctgtgacctttgcctgctcgggacacaccttactggagtacgtgcaggtgtactggctgggccctctgacagggatggtcctggctgtgctgctgcaccagggccgccttccccaccttttccagaggaacctgttctacggccagaagaacaagtaccgagcaccccgagggaagccggccccggcctcaggggacacccagacccctgcaaaggggtccagtgtccgggagcctgggcgcagtggtgttgaggggccacattccagctgagtggccttgctctgtgtgagccccgtgcgagggccctgcttgtagctggaccctggaaccttctgtagctaagagggaatcctggccccctccccagaagccatttg

SEQ ID NO: 108395 - DNA, 3013 bp, Homo sapiens
  Payload ID: 1296
  Gene Symbol: AQP12B
  Gene Name: aquaporin 12B
  ENST ID: ENST00000414322
  CDS Start-End: 70-195
gaaccggccagctcctgctctgtcccctcaggtgtcctgcaggcacagcatctcggggggcccaggccgatggcaggagttcctcatggccgaggagtctctgcctggcacgctgctgaagctggcggcacaggggctgggcatgcaggccgcctgcaccctgacgcgcctctgctgggcctgggagctcagtgacctgcacctgctgcagagcctcatggcccagagctgcagctcggccctgcgcacatccgtgccccacggggcgcttgtggaggccgcctgcgccttttgtttccatctgaccctcctgcacctgcggcacagtcctcccgcctacagcgggcccgctgtggctctgttggtcaccgtcacggcctacacggccgggcccttcacgtctgccttcttcaaccctgccctggccgcctctgtgacctttgcctgctcgggacacaccttactggagtacgtgcaggtgtactggctgggccctctgacagaggagcagcatggggaggtcatggagccccctcttggacctagatctggggattctggcccctggcttcagaggcccaggtggagcccacaccttctcctgcacctgctctcagacactcggctccacctcactgaggtaccagaagggcagctgggttcctatggaattctggaagcttttttcagcttctgctggctctacactggggaggtctcaggggcaatgcctcagcctccccttggggggaaagacaggagctgggggtctctcaggcacctggccctgcgatggtgacactgacgtcatcgtgatttgtcgccatggttctgatgtggtcacagtctctcaggcatgtgcagggtcctaggaagcatacgaagtgcatcaggaaccccctcctgcccccgttgccgaggcagcactgccctctgctaggaacagctccgtgttggcctctctgtccccacacactgggcctgcagggcttctccgagactcttcagttcaggtatcaaccctgggctgtctcctgggatgtggggggcggatgttctttccttgcctccccacgctcctcctgcggatccttcactccgggtgggtcggcctcttcctcctgatcagctccagagccccctctagttccctggcatggaaacacggcccgggtgagctgtggtggccccggaggcctctccgctcctgcacaggccttgcttcctgcgggtgacgaggtcctggactctctcctgcccaggcttctgggtgctttccttagttcagcaccagtgctctgtgtgggcagcgtctcccccgaggatccgcagctccgggttacccgcaggcgtccatctccggtatggtgctgcccttcactgatcctggttgtatttctgtttcctgctttcctcatcgcctcctgtttcggttgattccttctttttgctggtgcccgtctcacagtagcttcctgagaacggggacctggcaggtacacttcagacctcctgtgtctgaaatagtgtcctggttctgacctgcacttgagtgtcggtgaggcctgggcagggttccgggtgggagctcagtttcgtcctgagtttctcaggccccaaccatggcctgtggtggcttcacgggctacaaggcaaaggacgcaaacgaagaggcttcacgtgacagggttgtatgctcagccagctctggaggctggagtctgagctggcagcactgacagggtcagctctcctcggaggctgctggggaggagcctcctgcctcttccgggctccgggggcctctggcacccccggtgtccccgggcttggagacgcagcactcccatgtctgccggttcccctggccgcctcctctgtgtcattgtctgttctcttcatatagggacaccagtcatcgaattggaggttcactctactcaagtatgacgtcaccgtgatttcactgattttatgtcccaggccgtattctaacaagggcacatcctgtgttctgggaagggcgtgtcgctggggaaatactcttcacccggctgcaacctctcactgtagaactgcctctgtggagaagcccaaagggcatttgcggcttctaggagccaagtaggaggaggctgggatccgtgtttcaggcgggactccaggcttgggcgggcctgatactcgagtccacatgccccctctagagaggaacctgtctcctgccagggccagggaggggggcactggctgcttctgtattttggggtttggggccctggagcttcccatgcggaattgccgtccctcctcctaggcgagtcccagggccaccccatcccacagggacccgggcgccagcttctgaaagcatggggcatctgcggaagaactgggttgtttcccagctttcgtccctgcggaggggcgatccggcccctccatgtcagcagtgtttggtcgtccacatgcttgtcagccccacgctgtgctcctgcgtctcttcccgtctcatccatctggatgcttgacacctctgacagcatccctttcctgtcatcttagggcagcttcaggaaaccgaaaaacaggcttgtgtccttccattaacccctttatccacaagttcagtatcagcatgagccctggggagctccaaggctgcagccaggagccccgtagccagggatggtcctggctgtgctgctgcaccagggccgccttccccaccttttccagaggaacctgttctacggccagaagaacaagtaccgagcaccccgagggaagccggccccggcctcaggggacacccagacccctgcaaaggggtccagtgtccgggagcctgggcgcagtggtgttgaggggccacattccagctgagtggccttgctctgtgtgagccccgtgcgagggccctgcttgtagctggaccctggaaccttctgtagctaagagggaatcctggccccctccccagaagccatttgtcaataaaccatttctaaga

SEQ ID NO: 108396 - DNA, 644 bp, Homo sapiens
  Payload ID: 1296
  Gene Symbol: AQP12B
  Gene Name: aquaporin 12B
  ENST ID: ENST00000452886
  CDS Start-End: 44-169
ctcaggtgtcctgcaggcacagcatctcggggggcccaggccgatggcaggagttcctcatggccgaggagtctctgcctggcacgctgctgaagctggcggcacaggggctgggcatgcaggccgcctgcaccctgacgcgcctctgctgggcctgggagctcagtgacctgcacctgctgcagagcctcatggcccagagctgcagctcggccctgcgcacatccgtgccccacggggcgcttgtggaggccgcctgcgccttttgtttccatctgaccctcctgcacctgcggcacagtcctcccgcctacagcgggcccgctgtggctctgttggtcaccgtcacggcctacacggccgggcccttcacgtctgccttcttcaaccctgccctggccgcctctgtgacctttgcctgctcgggacacaccttactggagtacgtgcaggtgtactggctgggccctctgacagtctctcaggcatgtgcagggtcctaggaagcatacgaagtgcatcaggaaccccctcctgcccccgttgccgaggcagcactgccctctgctaggaacagctccgtgttggcctctctgtccccacacactgggcctgcagggcttctccgagactcttcagttcag

SEQ ID NO: 108397 - DNA, 751 bp, Homo sapiens
  Payload ID: 1296
  Gene Symbol: AQP12B
  Gene Name: aquaporin 12B
  ENST ID: ENST00000413999
  CDS Start-End: 28-153
gcacagcatctcggggggcccaggccgatggcaggagttcctcatggccgaggagtctctgcctggcacgctgctgaagctggcggcacaggggctgggcatgcaggccgcctgcaccctgacgcgcctctgctgggcctgggagctcagtgacctgcacctgctgcagagcctcatggcccagagctgcagctcggccctgcgcacatccgtgccccacggggcgcttgtggaggccgcctgcgccttttgtttccatctgaccctcctgcacctgcggcacagtcctcccgcctacagcgggcccgctgtggctctgttggtcaccgtcacggcctacacggccgggcccttcacgtctgccttcttcaaccctgccctggccgcctctgtgacctttgcctgctcgggacacaccttactggagtacgtgcaggtgtactggctgggccctctgacagggatggtcctggctgtgctgctgcaccagggccgccttccccaccttttccagaggaacctgttctacggccagaagaacaagtaccgagcaccccgagggaagccggccccggcctcaggggacacccagacccctgcaaaggggtccagtgtccgggagcctgggcgcagtggtgttgaggggccacattccagctgagtggccttgctctgtgtgagccccgtgcgagggccctgcttgtagctggaccctggaaccttctgtagctaagagggaatcctggccccc

SEQ ID NO: 108398 - DNA, 1080 bp, Homo sapiens
  Payload ID: 1296
  Gene Symbol: AQP12B
  Gene Name: aquaporin 12B
  Uniprot ID: A6NM10
  ENST ID: ENST00000621682
  CDS Start-End: 70-957
gaaccggccagctcctgctctgtcccctcaggtgtcctgcaggcacagcatctcggggggcccaggccgatggcaggtcttaacgtgtccctctccttcttctttgccaccttcaccctctgtgaggcagccaggcgggcctccaaggccctgctcccagtgggcgcctatgaagtcttcgcccgggaggcgatgaggacgctggtcgagctcgggccctgggctggggactttgggcctgacctgctgctcaccctgctcttcctgctcttcctggcgcacggggtcaccttggacggggcctcggccaaccccaccgtgtccctgcaggagttcctcatggccgaggagtctctgcctggcacgctgctgaagctggcggcacaggggctgggcatgcaggccgcctgcaccctgacgcgcctctgctgggcctgggagctcagtgacctgcacctgctgcagagcctcatggcccagagctgcagctcggccctgcgcacatccgtgccccacggggcgcttgtggaggccgcctgcgccttttgtttccatctgaccctcctgcacctgcggcacagtcctcccgcctacagcgggcccgctgtggctctgttggtcaccgtcacggcctacacggccgggcccttcacgtctgccttcttcaaccctgccctggccgcctctgtgacctttgcctgctcgggacacaccttactggagtacgtgcaggtgtactggctgggccctctgacagggatggtcctggctgtgctgctgcaccagggccgccttccccaccttttccagaggaacctgttctacggccagaagaacaagtaccgagcaccccgagggaagccggccccggcctcaggggacacccagacccctgcaaaggggtccagtgtccgggagcctgggcgcagtggtgttgaggggccacattccagctgagtggccttgctctgtgtgagccccgtgcgagggccctgcttgtagctggaccctggaaccttctgtagctaagagggaatcctggccccctccccagaagccatttgtcaataaaccatttct

SEQ ID NO: 108399 - DNA, 4174 bp, Homo sapiens
  Payload ID: 1297
  Gene Symbol: AQP2
  Gene Name: aquaporin 2 (collecting duct)
  Uniprot ID: P41181
  ENST ID: ENST00000199280
  CDS Start-End: 86-901
gaaagagagcgatagagtgcgagagcgagtgcccggagcatcctggccctgagacagctgggccagccccgcagggctctgcagcatgtgggagctccgctccatagccttctccagggctgtgttcgcagagttcctggccacactcctcttcgtcttctttggcctcggctctgccctcaactggccacaggccctgccctctgtgctacagattgccatggcgtttggcttgggtattggcaccctggtacaggctctgggccacataagcggggcccacatcaaccctgccgtgactgtggcctgcctggtgggctgccacgtctccgttctccgagccgccttctacgtggctgcccagctgctgggggctgtggccggagccgctctgctccatgagatcacgccagcagacatccgcggggacctggctgtcaatgctctcagcaacagcacgacggctggccaggcggtgactgtggagctcttcctgacactgcagctggtgctctgcatcttcgcctccaccgatgagcgccgcggagagaacccgggcacccctgctctctccataggcttctctgtggccctgggccacctccttgggatccattacaccggctgctctatgaatcctgcccgctccctggctccagctgtcgtcactggcaaatttgatgaccactgggtcttctggatcggacccctggtgggcgccatcctgggctccctcctctacaactacgtgctgtttccgccagccaagagcctgtcggagcgcctggcagtgctgaagggcctggagccggacaccgattgggaggagcgcgaggtgcgacggcggcagtcggtggagctgcactcgccgcagagcctgccacggggtaccaaggcctgagggccgccagcggcctctacggccccgacggacgcttgtgaggcccgaggcagaagggcccaccccgtccctcctctcccgcaggtctgaagttggccccccagcgcagagtagctgcttcctggacgtgcgcgcccaggccagtgctgtgagcaggcggggaggaggctgccggagggagccctgagcctggcaggtcccctgccctgaggctgtgagcagctagtggtggcttctccagcctttttcagggaactgggaacttaggggactgagctggggagggaggcaggtgggtggtaagagggaaactctggagagcctgcacccaggtactgagtggggagtgtacagacccctgccttgggggttccgggaatgatgcaactggttttactagtgtgcaagtgtgttcatccccaagttctcttttgtcctcacatgcagagttgtgcatgcccctgagtgtgaacaggtttgcctacgttggtgcaagtgtgcatggctggggacttctcacttccccttgcaccccttcctccccaacctgcaataaatccgcttctcctgcagtggatgagtgtgggtgccagtcctcctcaggagaaggggaagggaaggaggccactttgagagggctgaagggagggccttgatttccagccgcaatctggctcctcctggaaaatttcccccacctgcagcgctgggccccaaggcttgccaagactcattgctggaggtagagaggtgtcaaccagagaacagctcccctagacatggcctctggaaaaaggaaatctttggtggccaaagatttcctttctgtggtgagggagaacctctccaaagaggaagcaggcatatgagtgcgcacgccttcacgtgtgtgtatgctgtgtgtgcccgggacccccgtctccaggggtgccccagacccagagattagcctcccacttcggcgcagaaaacaaaagccctttgtgggacccgggcctttgtcttgggtgaggggagatttgcacctagacacttcttgaaaggagacactcagtttcacaagtgagccctcttgcccagcacacacctatggctggctgggcaaggcgctcaggcatgcaaccatgggcaccaggcaatacccatccatcacccatctcactctccccagtcctcaggcagcagcttttccaccccaggaatctctgttccttctctgtctgcctctccacagcccgtgatcccctgcttctggctcctaccactggacagtcattgtggatagagcagcctgctgctctcaggaccagagaagggaaatgacttctccaggcagaggcagatctgagtctagaacccaggcttctaaatttctaggccagtactactgctctcaaaagagattaactgggattaagtgagatgacgcatgtaaagatgctgtgtaaactgtaattcttaataccattatcacgcattactagaatcatttcattatttctgcttcctgggggaaggatgcagaaggagtctgatgctcaacatcccttacctcctttcgttgatggccaaagcaaaggagagtcctgggagcccacaagatccaggcagaaggagatgggtttggggctggccccatcctggcccagcctcttaacctcttcttaccctgaatgtgtgccctatcttttctcccacctccttcctcctaccacccagccctatccattctctccttccctctccagcctgctgtataagtaacatgtgggtcataccttgaacccccctccgcccccatgctctctgtggcctccatgccttcaagacttctgtctgtatctatctcacactgcaccaagcacccactgtgcaccaggcactaagtctctagcctctttctcccttctgctcccatccaagaaagacagtgtataaggaacatctctgtaattgtgtcccctctcatctatgctctttcctgtcttccttgaccaaagctctctttgaggtccaaaaaaggctgccctgggccatatgtgctatggagaggactctcccaaacccccaatagctagtgacagccacttggcctcactaccagaagaagggtggagtcagaaaccaaagtgacctccagagctgtcctcctggcacctgagtgtccttgctctagaggttcaaaggcagcaaggcagtgagctatgagcccagcatggatgtgtctcaggcacctcatccccaccccacctcaccccaacaaactcctctagaagaagccaagaatttctctctatgtctgtttcactttttggattgcatctccccaaaaactaaatgtgaaatccctaccatttctagcctctattgcccagattggagtcagaggtcaaaaaaggattccaagtgatggaactccaggggtggagggaaattggcagttcctggcatctcttgtgtaccagctgctgtgctgggtgccttgcatgcacggacttatctgatcttcctcaaacttcagataggttagggaaggacaaaggcccccagccatgaagggttttgctatttccaaagcttccccttatcgtcccctgtgattatctcccaaccccgtgacaaaggtagagcaaatattgttcttcccattttacagattcagaaaccaaggctaagggactggtctaaagtctcacaggtagtatatggtggagccaacacttgaactcagacctttttacacaaaatcccatgatttttccactgagacaaatcctaggctcctgggaggccctggcagaagccagaacacatggctgggcctttccagcccaacccactgtcttgcagtggacggagagccttggcgagggcagcagggtagagaggacaaagaatgtggggctggtttctgccctttaagagcacccggtcagtcagagaacagagatcacacacaccaaaccagacagaggcagggcagcatggagacaggtagacagacctccaggtccctaagctggggacagagaaggttctgagctgtcccatactcccactttgtgccaaatgactttgcacctgcaaatggtgcttcaatgtcgttttgtatctttaagctgtgatgttgtatatatacaatgcctcccagctagactgtaagccctttggggacaagggctgcttccagttcttggatggcgttctcctatctaccttccttcaactgctctgcatataataagcactcaataaatgctcatttgccaataa

SEQ ID NO: 108400 - DNA, 1762 bp, Homo sapiens
  Payload ID: 1297
  Gene Symbol: AQP2
  Gene Name: aquaporin 2 (collecting duct)
  ENST ID: ENST00000551526
  CDS Start-End: 91-762
cttgagaaagagagcgatagagtgcgagagcgagtgcccggagcatcctggccctgagacagctgggccagccccgcagggctctgcagcatgtgggagctccgctccatagccttctccagggctgtgttcgcagagttcctggccacactcctcttcgtcttctttggcctcggctctgccctcaactggccacaggccctgccctctgtgctacagattgccatggcgtttggcttgggtattggcaccctggtacaggctctgggccacataagcggggcccacatcaaccctgccgtgactgtggcctgcctggtgggctgccacgtctccgttctccgagccgccttctacgtggctgcccagctgctgggggctgtggccggagccgctctgctccatgagatcacgccagcagacatccgcggggacctggctgtcaatgctctcagcaacagcacgacggctggccaggcggtgactgtggagctcttcctgacactgcagctggtgctctgcatcttcgcctccaccgatgagcgccgcggagagaacccgggcacccctgctctctccataggcttctctgtggccctgggccacctccttgggatccattacaccggctgctctatgaatcctgcccgctccctggctccagctgtcgtcactggcaaatttgatgaccactgggtcttctggatcggacccctggtggggagccctgagcctggcaggtcccctgccctgaggctgtgagcagctagtggtggcttctccagcctttttcagggaactgggaacttaggggactgagctggggagggaggcaggtgggtggtaagagggaaactctggagagcctgcacccaggcactaagtctctagcctctttctcccttctgctcccatccaagaaagacagtgtataaggaacatctctgtaattgtgtcccctctcatctatgctctttcctgtcttccttgaccaaagctctctttgaggtccaaaaaaggctgccctgggccatatgtgctatggagaggactctcccaaacccccaatagctagtgacagccacttggcctcactaccagaagaagggtggagtcagaaaccaaagtgacctccagagctgtcctcctggcacctgagtgtccttgctctagaggttcaaaggcagcaaggcagtgagctatgagcccagcatggatgtgtctcaggcacctcatccccaccccacctcaccccaacaaactcctctagaagaagccaagaatttctctctatgtctgtttcactttttggattgcatctccccaaaaactaaatgtgaaatccctaccatttctagcctctattgcccagattggagtcagaggtcaaaaaaggattccaagtgatggaactccaggggtggagggaaattggcagttcctggcatctcttgtgtaccagctgctgtgctgggtgccttgcatgcacggacttatctgatcttcctcaaacttcagataggttagggaaggacaaaggcccccagccatgaagggttttgctatttccaaagcttccccttatcgtcccctgtgattatctcccaaccccgtgacaaaggtagagcaaatattgttcttcccattttacagattcagaaaccaaggctaagggactggtctaaagtctcacaggtagtatatggtggagccaacacttgaactcagacctttttacacaaaatcccatgatttttccact

SEQ ID NO: 108401 - DNA, 809 bp, Homo sapiens
  Payload ID: 1297
  Gene Symbol: AQP2
  Gene Name: aquaporin 2 (collecting duct)
  ENST ID: ENST00000550862
  CDS Start-End: 78-809
gcgatagagtgcgagagcgagtgcccggagcatcctggccctgagacagctgggccagccccgcagggctctgcagcatgtgggagctccgctccatagccttctccagggctgtgttcgcagagttcctggccacactcctcttcgtcttctttggcctcggctctgccctcaactggccacaggccctgccctctgtgctacagattgccatggcgtttggcttgggtattggcaccctggtacaggctctgggccacataagcggggcccacatcaaccctgccgtgactgtggcctgcctggtgggctgccacgtctccgttctccgagccgccttctacgtggctgcccagctgctgggggctgtggccggagccgctctgctccatgagatcacgccagcagacatccgcggggacctggctgtcaatgctctcagcaacagcacgacggctggccaggcggtgactgtggagctcttcctgacactgcagctggtgctctgcatcttcgcctccaccgatgagcgccgcggagagaacccgggcacccctgctctctccataggcttctctgtggccctgggccacctccttggggtaggtcatggccatgggttccagcctccctggaggaacagacacacagaccactccagagacagacacagagaccccaagagggacacatacacagaactctcaagaggaacagacaccccagagatccattacaccggctgctctatgaatcctgcccgctccctggctccagctgtcgtcactggcaaatttgatgaccactgg

SEQ ID NO: 108402 - DNA, 1849 bp, Homo sapiens
  Payload ID: 1298
  Gene Symbol: AQP3
  Gene Name: aquaporin 3 (Gill blood group)
  Uniprot ID: Q92482
  ENST ID: ENST00000297991
  CDS Start-End: 82-960
ccagcgctggaggccgctgctcgctgcgccaccgcctcccgccacccctgcccgcccgacagcgccgccgcctgccccgccatgggtcgacagaaggagctggtgtcccgctgcggggagatgctccacatccgctaccggctgctccgacaggcgctggccgagtgcctggggaccctcatcctggtgatgtttggctgtggctccgtggcccaggttgtgctcagccggggcacccacggtggtttcctcaccatcaacctggcctttggctttgctgtcactctgggcatcctcatcgctggccaggtctctggggcccacctgaaccctgccgtgacctttgccatgtgcttcctggctcgtgagccctggatcaagctgcccatctacaccctggcacagacgctgggagccttcttgggtgctggaatagtttttgggctgtattatgatgcaatctggcacttcgccgacaaccagctttttgtttcgggccccaatggcacagccggcatctttgctacctacccctctggacacttggatatgatcaatggcttctttgaccagttcataggcacagcctcccttatcgtgtgtgtgctggccattgttgacccctacaacaaccccgtcccccgaggcctggaggccttcaccgtgggcctggtggtcctggtcattggcacctccatgggcttcaactccggctatgccgtcaaccctgcccgggactttggcccccgcctttttacagcccttgcgggctggggctctgcagtcttcacgaccggccagcattggtggtgggtgcccatcgtgtccccactcctgggctccattgcgggtgtcttcgtgtaccagctgatgatcggctgccacctggagcagcccccaccctccaacgaggaagagaatgtgaagctggcccatgtgaagcacaaggagcagatctgagtgggcaggggccatctccccactccgctgccctggccttgagcatccactgactgtccaagggccactcccaagaagcccccttcacgatccaccctttcaggctaaggagctccctatctaccctcaccccacgagacagccccttcaggatttccactggaccttgcccaaatagcaccttaggccactgcccctaagctggggtggaaccggaatttgggtcaatacatccttttgtctcccaagggaagagaatgggcagcaggtatgtgtgtgtgtgcatgtgtgtgcatgtgtgtgcatgtgtgtgcaggggtgtgtgtgtgtggggggggttcccagatattcagggcaagggaccagtcggaagggattctggctattgggggagcccagagacaggggaaggcagcctgtccatctgtgcataaggagaggaaagttccagggtgtgtatgtttcaggggcttcacatggaggagctgcagatagatatgtgtttctgtgtatgtgtatgtctgcctttttttctaagtgggggcttctacaggcttttgggaagtagggtggatgtgggtagggctgggaggagggggccacagcttaggtttggagctctggatgtacatacataagtaggagcagtgggacgtgtttctgtcataatgcaggcatgaagggtggagtgaagtcaggtcataagtttcatgtttgcttttgttttgttttgtttttaatgtatgtagcagatgttacagtcttagggatccgggatgggagaccccactttagaaagggtcgtcactcctttaatcctctactcaacaatgtactcttttacttttatattaaaaaaaataaaataaatatgtgcctaaaacctcca

SEQ ID NO: 108403 - DNA, 5274 bp, Homo sapiens
  Payload ID: 1299
  Gene Symbol: AQP4
  Gene Name: aquaporin 4
  Uniprot ID: P55087
  ENST ID: ENST00000383168
  CDS Start-End: 130-1101
cacatggtgcagaatctttccacccctaacactccaaaaacccaatcagacaagtggccgtaatctgactcccagcacacagggagctgcggggcaggcaatgagagctgcactctggctggggaaggcatgagtgacagacccacagcaaggcggtggggtaagtgtggacctttgtgtaccagagagaacatcatggtggctttcaaaggggtctggactcaagctttctggaaagcagtcacagcggaatttctggccatgcttatttttgttctcctcagcctgggatccaccatcaactggggtggaacagaaaagcctttaccggtcgacatggttctcatctccctttgctttggactcagcattgcaaccatggtgcagtgctttggccatatcagcggtggccacatcaaccctgcagtgactgtggccatggtgtgcaccaggaagatcagcatcgccaagtctgtcttctacatcgcagcccagtgcctgggggccatcattggagcaggaatcctctatctggtcacacctcccagtgtggtgggaggcctgggagtcaccatggttcatggaaatcttaccgctggtcatggtctcctggttgagttgataatcacatttcaattggtgtttactatctttgccagctgtgattccaaacggactgatgtcactggctcaatagctttagcaattggattttctgttgcaattggacatttatttgcaatcaattatactggtgccagcatgaatcccgcccgatcctttggacctgcagttatcatgggaaattgggaaaaccattggatatattgggttgggcccatcataggagctgtcctcgctggtggcctttatgagtatgtcttctgtccagatgttgaattcaaacgtcgttttaaagaagccttcagcaaagctgcccagcaaacaaaaggaagctacatggaggtggaggacaacaggagtcaggtagagacggatgacctgattctaaaacctggagtggtgcatgtgattgacgttgaccggggagaggagaagaaggggaaagaccaatctggagaggtattgtcttcagtatgactagaagatcgcactgaaagcagacaagactccttagaactgtcctcagatttccttccacccattaaggaaacagatttgttataaattagaaatgtgcaggtttgttgtttcatgtcatattactcagtctaaacaataaatatttcataatttacaaaggaggaacggaagaaacctattgtgaattccaaatctaaaaaaagaaatatttttaaaatgttcttaagcaaatatatacctattttatctagttacctttcattaacaaccaattttaaccgtgtgtcaagatttggttaagtcttgcctgacagaactcaaagacacgtctatcagcttattccttctctactggaatattggtatagtcaattcttatttgaatatttattctattaaactgagtttaacaatggcaaaatacagtatgtcacagtcatgcacattcaagagagaaaatataacaagttcttttatgagcaatcccttatgcatagactaccttggcaaaagagcattagcaagtgtcactgctcatcagttacttccttccatttatatcacaaatacccaagtttcaattctaacttcatttcatggtatttcttcctcctcaatgcccaaggtaatgtgggactaaagcccagaaatttgaaaagaatattcagaaatccttcccaaatcataagggcacctattgagattcaagacaagcagactcgtaaaatcttgtagaggcagaggcaaagttatcatcatacaaaaatcacaaacaaaaaggagatctgtattcgggtatcaaacggttgatctgttttcagtgcacaccctcaaatgcaccacaccagttttacgatctaagcttttaacccctttaccactttgcttatttttaaaaaatttattggcaaaactggggattttgtttgtaactttggttatctatatttaaacattagctgagacatatttttgataacaagaacttagctagttgagtcctggctttttgttgattattaagctgtgttcactctagaaggtgtaaaggccctgtcccaatctctgctctctcacttctcgtgacatttgttgataatctttactgcaagtgtaatgatatttgagtgaattaaaatgcatgacagacaaggtacaacatggttgcagaataaaagggtgaggacatcagatcactctgtattcaaagcttactagacgaacaatctttcatttctggatatattgtagctaacccaacacatttttaaactatttttgttactgactcacttacttgtcaaaataattggtttttctgtcctgctttgccttttgtcactagaatgttctccagaaaccccagtttctgtcatcttaactgtctagtctagccgttaacttagacaaagaagtgcaaatgtcaatttcactaaacaaaagctattagaagtaaagcagaaacctatcactgcaaggagtgacttgtaaataactgatgatcaagggctgtcttctctcaagcatggttccaactctgtgtcactttttagcgttaatggcagttgtgtgtctgtggcagtgagataatggaccactattaaacctgattctcttcggtgctaggaaagagtgatgtgtgagattcccagagagtcgtcacaccagtgttatgcctgggagtgccactggcataccgcaggtgcctaaatcccaggcccctttctcagggggcgtggccacaccacacactgcgccagtgacacatagttacttcctggctgggacggcacctatagaaactagggtacaaatctcccaaagatggtttgcaccgtcatttcaaatgtttgcacaatataccacttagaggcttaaaatcagggtggttcagttcaaaaggtaatatcaaccgtcagcaaacatgtcagtttaaaaataagttcggttaacaaggaagtgttaagcagattttttgaatacacttacaatatactggcttataatcatttttattctgccatatggtttatttcatatacactcacttttacactcacttccaattatagcattcaataagttacggttaaagaaaagtgaatggtgtttttgtaatttgttttctagtagctagcagagagcctggcacatagtatgtattcaaaacaagtgtgttaattaataaaaatatataaatctcatttgagatttaagaatataaataattttcttttaatctttattttgctcaatatttaataggaagtatgatttcaaggactactaaaggaaggcaatatacatgtgaaaaccataaaatacattttttgcattctactatttttaggggcatgaaatgaatgaaagctttagcacttttttgcccctacatatgagacaacatattttgtatttcactcaaggctctgccagtaaaaagtaatgaaattgtacctttctaatgacatctatgcagcaggggtctatcgccttgtggatggcaccaaattatccaagtgtattaggagactggggcttttttctttaatcccttcttattaatgaagtgcatagtgctgctcccaggagaccactgctgacagatacacagagaagagatcagagaggaaaaactgggaagacataaatgaattatacccagccatgaaacaatgccaactgtctcttccctaaggaagagtacaagtaccctaaaattgaaaggtggtccctacactgaaaacgcacatagtttgtcaaaagtgtacaaaagggaaagagtcttattttaagctttcaggctttcttaaaaacttggggaccagaatttcaatgtatgtttccattgttgaagataacattttcttcaaagagccttaaccttttgtactggaaggaaatattttctggacttaagtagttgcctaaatttaagattcctacactttatttctgccattgatgcttttcctaaacccttatactatctttttattatctgagccttttcctaatgcagctcataggtgctagctagagctgctgctcagtattgaagactttacaaggagattagaaatctttggaaaacatatgtgatgaaattgagctatatgatttatcagagatctgattccaaagagcacagaatactgttctcagaccatgaaaccagacaacacatgtattggtttaaactcgataatgacaggaaaattccaaactagagcagtaaattcaaatggtaagatgaatcctagaaggcctctgattgcagcatgttgacaccaacctcacgttacgaacaattcacagagaatttgcctttgtggcaactgaagatggaagtctggggggcacagacaaccttatcaaacaatataaaagccaatataaattctcataagcactatagaatttgcaaattcagaacattttatacctaaaagtaattctgtctttcctaaagtgtttttaacatgaaaattagtaggaagatgtggttactatttggaaagtgtaatgtaacaaaactctcttttgttaccacaaattttgtgagtttagtactctacagattgccccataagagcagtagcttttgaaactcataattctctgaaataaatgaaagacatttaattcaaggatcaaaaattgtggccatctttgcaaatgactacctatagcctgtgaaaatacatttcaaaaaatgttatgtgcaatgaacactaaatttaagagcagttacagtgtgactcactcatgtttaaaaaaaatcgaagagctaaaaaatacgtctaatttatgtaacccattggaatgtatttctaggttctcttcaggattaattaaataaacatgcaatttatgaaaacatataaacaattatttatcacttttatgacccaaatcacaataaaattgtcatttaggataaactggggagaatagactgaacatatggttatattcacagttatttattaacttaaatgttattccaacattagagctaatgttaaaaagatttaaactgtaacgtctaatatttggaataatatattaaagtattagcactgtggttgattttcttgaattatgttgcatcttgtactactaagcttgtgaaaataaacatttggatgttttaaaaggtaaacatta

SEQ ID NO: 108404 - DNA, 567 bp, Homo sapiens
  Payload ID: 1299
  Gene Symbol: AQP4
  Gene Name: aquaporin 4
  ENST ID: ENST00000383170
  CDS Start-End: 83-379
agacaagtggccgtaatctgactcccagcacacagggagctgcggggcaggcaatgagagctgcactctggctggggaaggcatgagtgacagacccacagcaaggcggtggggtgtggacctttgtgtaccagagagaacatcatggtggctttcaaaggggtctggactcaagctttctggaaagcagtcacagcggaatttctggccatgcttatttttgttctcctcagcctgggatccaccatcaactggggtggaacagaaaagcctttaccggtcgacatggttctcatctccctttgctttggactcagcattgcaaccatggtgcagtgctttggccatatcagcggtggccacatcaaccctgcagtgactgtggccatggtgtgcaccaggaagatcagcatcgccaagtctgtcttctacatcgcagcccagtgcctgggggccatcattggagcaggaatcctctatctggtcacacctcccagtgtggtgggaggcctgggagtcaccatggttcatggaaatcttaccgctggtcatggtctcctggttgag

SEQ ID NO: 108405 - DNA, 1169 bp, Homo sapiens
  Payload ID: 1299
  Gene Symbol: AQP4
  Gene Name: aquaporin 4
  Uniprot ID: P55087
  ENST ID: ENST00000440832
  CDS Start-End: 264-1169
gttcccatcgcccttgctagtcaccagaagctcctctcccctcaatgagttcactttctcaaaagacagccttcagcaccctggtttcctagaaggcttccccctaatccagagtctggggggagggggagattttcagaatgccatttcaaagcaatcaaatgcaaagctagaaaagacgaccccccccccccacgcacaccttgttttaatgctttatgttcgaaattaagtgtggacctttgtgtaccagagagaacatcatggtggctttcaaaggggtctggactcaagctttctggaaagcagtcacagcggaatttctggccatgcttatttttgttctcctcagcctgggatccaccatcaactggggtggaacagaaaagcctttaccggtcgacatggttctcatctccctttgctttggactcagcattgcaaccatggtgcagtgctttggccatatcagcggtggccacatcaaccctgcagtgactgtggccatggtgtgcaccaggaagatcagcatcgccaagtctgtcttctacatcgcagcccagtgcctgggggccatcattggagcaggaatcctctatctggtcacacctcccagtgtggtgggaggcctgggagtcaccatggttcatggaaatcttaccgctggtcatggtctcctggttgagttgataatcacatttcaattggtgtttactatctttgccagctgtgattccaaacggactgatgtcactggctcaatagctttagcaattggattttctgttgcaattggacatttatttgcaatcaattatactggtgccagcatgaatcccgcccgatcctttggacctgcagttatcatgggaaattgggaaaaccattggatatattgggttgggcccatcataggagctgtcctcgctggtggcctttatgagtatgtcttctgtccagatgttgaattcaaacgtcgttttaaagaagccttcagcaaagctgcccagcaaacaaaaggaagctacatggaggtggaggacaacaggagtcaggtagagacggatgacctgattctaaaacctggagtggtgcatgtgattgacgttgaccggggagaggagaagaaggggaaagaccaatctggagaggtattgtcttcagtatga

SEQ ID NO: 108406 - DNA, 575 bp, Homo sapiens
  Payload ID: 1299
  Gene Symbol: AQP4
  Gene Name: aquaporin 4
  ENST ID: ENST00000578776
  CDS Start-End: 19-575
actctggctggggaaggcatgagtgacagacccacagcaaggcggtggggcctgggatccaccatcaactggggtggaacagaaaagcctttaccggtcgacatggttctcatctccctttgctttggactcagcattgcaaccatggtgcagtgctttggccatatcagcggtggccacatcaaccctgcagtgactgtggccatggtgtgcaccaggaagatcagcatcgccaagtctgtcttctacatcgcagcccagtgcctgggggccatcattggagcaggaatcctctatctggtcacacctcccagtgtggtgggaggcctgggagtcaccatggttcatggaaatcttaccgctggtcatggtctcctggttgagttgataatcacatttcaattggtgtttactatctttgccagctgtgattccaaacggactgatgtcactggctcaatagctttagcaattggattttctgttgcaattggacatttatttgcaatcaattatactggtgccagcatgaatcccgcccgatcctttggacctgcagttatcatgggaaattg

SEQ ID NO: 108407 - DNA, 1586 bp, Homo sapiens
  Payload ID: 1299
  Gene Symbol: AQP4
  Gene Name: aquaporin 4
  Uniprot ID: P55087
  ENST ID: ENST00000581374
  CDS Start-End: 287-1192
cctttctagggacagtttggataattttccgtgaaactggatgatctttgaatattaaatgaaaggagactagaataacagtctcttgactattcatgaaggagctttagcagaagcattctttcttggtgtgcaaatcacgcctggcagcccctgcccacagtacccgaagatggcaggccttgttcccttcacctaaattcataaacctgggtgtagtggcttctgatgctgatttgtttctcttttcagtaagtgtggacctttgtgtaccagagagaacatcatggtggctttcaaaggggtctggactcaagctttctggaaagcagtcacagcggaatttctggccatgcttatttttgttctcctcagcctgggatccaccatcaactggggtggaacagaaaagcctttaccggtcgacatggttctcatctccctttgctttggactcagcattgcaaccatggtgcagtgctttggccatatcagcggtggccacatcaaccctgcagtgactgtggccatggtgtgcaccaggaagatcagcatcgccaagtctgtcttctacatcgcagcccagtgcctgggggccatcattggagcaggaatcctctatctggtcacacctcccagtgtggtgggaggcctgggagtcaccatggttcatggaaatcttaccgctggtcatggtctcctggttgagttgataatcacatttcaattggtgtttactatctttgccagctgtgattccaaacggactgatgtcactggctcaatagctttagcaattggattttctgttgcaattggacatttatttgcaatcaattatactggtgccagcatgaatcccgcccgatcctttggacctgcagttatcatgggaaattgggaaaaccattggatatattgggttgggcccatcataggagctgtcctcgctggtggcctttatgagtatgtcttctgtccagatgttgaattcaaacgtcgttttaaagaagccttcagcaaagctgcccagcaaacaaaaggaagctacatggaggtggaggacaacaggagtcaggtagagacggatgacctgattctaaaacctggagtggtgcatgtgattgacgttgaccggggagaggagaagaaggggaaagaccaatctggagaggtattgtcttcagtatgactagaagatcgcactgaaagcagacaagactccttagaactgtcctcagatttccttccacccattaaggaaacagatttgttataaattagaaatgtgcaggtttgttgtttcatgtcatattactcagtctaaacaataaatatttcataatttacaaaggaggaacggaagaaacctattgtgaattccaaatctaaaaaaagaaatatttttaaaatgttcttaagcaaatatatacctattttatctagttacctttcattaacaaccaattttaaccgtgtgtcaagatttggttaagtcttgcctgacagaactcaaagacacgtctatcagcttattccttctctactggaatattggtatagtcaattcttatttgaatatttat

SEQ ID NO: 108408 - DNA, 891 bp, Homo sapiens
  Payload ID: 1299
  Gene Symbol: AQP4
  Gene Name: aquaporin 4
  ENST ID: ENST00000622234
  CDS Start-End: 1-891
atgagtgacagacccacagcaaggcggtggggtaagtgtggacctttgtgtaccagagagaacatcatggtggctttcaaaggggtctggactcaagctttctggaaagcagtcacagcggaatttctggccatgcttatttttgttctcctcagcctgggatccaccatcaactggggtggaacagaaaagcctttaccggtcgacatggttctcatctccctttgctttggactcagcattgcaaccatggtgcagtgctttggccatatcagcggtggccacatcaaccctgcagtgactgtggccatggtgtgcaccaggaagatcagcatcgccaagtctgtcttctacatcgcagcccagtgcctgggggccatcattggagcaggaatcctctatctggtcacacctcccagtgtggtgggaggcctgggagtcaccatggttcatggaaatcttaccgctggtcatggtctcctggttgagttgataatcacatttcaattggtgtttactatctttgccagctgtgattccaaacggactgatgtcactggctcaatagctttagcaattggattttctgttgcaattggacatttatttgcaatatattgggttgggcccatcataggagctgtcctcgctggtggcctttatgagtatgtcttctgtccagatgttgaattcaaacgtcgttttaaagaagccttcagcaaagctgcccagcaaacaaaaggaagctacatggaggtggaggacaacaggagtcaggtagagacggatgacctgattctaaaacctggagtggtgcatgtgattgacgttgaccggggagaggagaagaaggggaaagaccaatctggagaggtattgtcttcagtatga

SEQ ID NO: 108409 - DNA, 1450 bp, Homo sapiens
  Payload ID: 1300
  Gene Symbol: AQP5
  Gene Name: aquaporin 5
  Uniprot ID: P55064
  ENST ID: ENST00000293599
  CDS Start-End: 149-946
ccaggccgccagcctcggagtgggcgcgggacagtgcgcggcgccccgcagccaggcccccgcccccgccgcatccacctcctccgccgcctgcgacccaacgggcgccccccgccgcggcagctgccgccgggcccccgcggccaccatgaagaaggaggtgtgctccgtggccttcctcaaggccgtgttcgcagagttcttggccaccctcatcttcgtcttctttggcctgggctcggccctcaagtggccgtcggcgctgcctaccatcctgcagatcgcgctggcgtttggcctggccataggcacgctggcccaggccctgggacccgtgagcggcggccacatcaaccccgccatcaccctggccctcttggtgggcaaccagatctcgctgctccgggctttcttctacgtggcggcccagctggtgggcgccattgccggggctggcatcctctacggtgtggcaccgctcaatgcccggggcaatctggccgtcaacgcgctcaacaacaacacaacgcagggccaggccatggtggtggagctgattctgaccttccagctggcactctgcatcttcgcctccactgactcccgccgcaccagccctgtgggctccccagccctgtccattggcctgtctgtcaccctgggccaccttgtcggaatctacttcactggctgctccatgaacccagcccgctcttttggccctgcggtggtcatgaatcggttcagccccgctcactgggttttctgggtagggcccatcgtgggggcggtcctggctgccatcctttacttctacctgctcttccccaactccctgagcctgagtgagcgtgtggccatcatcaaaggcacgtatgagcctgacgaggactgggaggagcagcgggaagagcggaagaagaccatggagctgaccacccgctgaccagtgtcaggcaggggccagcccctcagcccctgagccaagggggaaaagaagaaaaagtacctaacacaagcttcctttttgcacaaccggtcctcttggctgaggaggaggagctggtcaccctggctgcacagttagagaggggagaaggaacccatgatgggactcctggggtaggggccaggggctggggtctgctggggacaggtctctctgggacagacctcagagattgtgaatgcagtgccaagctcacaggctgcaagggccaggccagaaaagggcgggcctgcagcctgcaccccccaccttccccaacccttcctcaagagctgaagggatcccagcccctaggtgggcagaggcagaccctccccagagctccttaggaagaagacagactggttcattgaatgccgccttatttatttctggtgaggatgcatgcgtggggctgctggtgtttagagtgggggctacccaataaatcactgatactca

SEQ ID NO: 108410 - DNA, 1398 bp, Homo sapiens
  Payload ID: 1301
  Gene Symbol: AQP6
  Gene Name: aquaporin 6, kidney specific
  Uniprot ID: Q13520
  ENST ID: ENST00000315520
  CDS Start-End: 338-1186
tcatcgtaggaggttccagctcagtgcccagagacagcccccacatcccaccccatcaggtcagctcaggctggagcaggcatatgagcaacacccctcattccacccccatacacatgcataagcccatccgcctgcgccctgccagtctgaccagcacagtcctggggacaggagcgtggtggaggagctgcaggtgggggccagagaagcctccacagagagcaaaagccagggtcagccagagacaggacaccagaagagacaggagatcagagaccagaggaacagagaagaggccccagagcaaggcaaggaacggccaaggcaccaggacatggatgcagtggagccagggggacgtggctgggccagcatgttggcgtgcaggctttggaaagccatcagcagggcgctgtttgcagagttcctggccacggggctgtatgtgttctttggcgtgggctcagtcatgcgctggcccacagcacttccctccgtgctacagattgccatcaccttcaacctggtcaccgccatggctgtgcaggtcacctggaaggccagcggggcccacgccaaccccgccgtgacgctggccttcctcgtaggctcccacatctctctgccccgtgctgtggcctatgtggctgcccagctggtgggggccacggtgggggctgctctgctttatggggtcatgccgggagacatccgagagacccttgggatcaacgtggtccggaacagtgtctcaactggccaggcggtggcagtggagctgcttctgaccctgcagctggtgctctgtgtcttcgcttccaccgacagccgtcagacatcaggctccccggccaccatgattgggatctctgtggcactgggccacctcattgggatccacttcactggctgctccatgaatccagcccgctccttcggccctgccatcatcattgggaagttcacagtccactgggtcttctgggtggggcccctgatgggagccctcctggcctcactgatctacaacttcgtcctgttccccgacaccaagaccctggcgcagcggctggctatcctcacaggcaccgtagaggtggggacaggggcaggggcaggggcggagcccctgaagaaggaatcccagccgggttcgggagccgtggagatggagagtgtgtgaaacagcctacgcctggccgcgcccttgggcttcctgccttgcaggacctgcctggaggttctccctgggggtggcgggagggggaggcttgaccttttgtcctgaccaggtgggctggaggggacaagccctatccctggcattacgtttctaggtagaatctgggagtgaatttgtcccattccctctctgtagggcttccccacctctcg

SEQ ID NO: 108411 - DNA, 849 bp, Homo sapiens
  Payload ID: 1301
  Gene Symbol: AQP6
  Gene Name: aquaporin 6, kidney specific
  ENST ID: ENST00000551733
  CDS Start-End: 499-825
ggaggacacagggagtccctcatgcttgagtcccctggggccaccttgaggcagcctatcccaatgcatccccgccccgctatccgggtggggcgcagaagagaggggagcccttctccgctcagtctccaggagactcaggcacgtttatagggaagaagtcaagagaaggggaagcctgaaagccacaggtgagactgggaaaggccaagagagggtcccagtcactcaaagggagccagaagtccaaggagggtcccccgaccccgacttgtacactggagaagggctgcccctacttcaaggccacagggcagctgcaggccacagtgtccacagcgtccttggtaaagtcgactgtattcacatctgcattctgtccggaacagtgtctcaactggccaggcggtggcagtggagctgcttctgaccctgcagctggtgctctgtgtcttcgcttccaccgacagccgtcagacatcaggctccccggccaccatgattgggatctctgtggcactgggccacctcattgggatccacttcactggctgctccatgaatccagcccgctccttcggccctgccatcatcattgggaagttcacagtccactgggtcttctgggtggggcccctgatgggagccctcctggcctcactgatctacaacttcgtcctgttccccgacaccaagaccctggcgcagcggctggctatcctcacaggcaccgtagaggtggggacaggggcaggggcaggggcggagcccctgaagaaggaatcccagccgggttcgggagccgtggagatggagagtgtgtgaaacagcctacgcctggccgcgccc

SEQ ID NO: 108412 - DNA, 2245 bp, Homo sapiens
  Payload ID: 1301
  Gene Symbol: AQP6
  Gene Name: aquaporin 6, kidney specific
  Uniprot ID: Q13520
  ENST ID: ENST00000615425
  CDS Start-End: 1-849
atggatgcagtggagccagggggacgtggctgggccagcatgttggcgtgcaggctttggaaagccatcagcagggcgctgtttgcagagttcctggccacggggctgtatgtgttctttggcgtgggctcagtcatgcgctggcccacagcacttccctccgtgctacagattgccatcaccttcaacctggtcaccgccatggctgtgcaggtcacctggaaggccagcggggcccacgccaaccccgccgtgacgctggccttcctcgtaggctcccacatctctctgccccgtgctgtggcctatgtggctgcccagctggtgggggccacggtgggggctgctctgctttatggggtcatgccgggagacatccgagagacccttgggatcaacgtggtccggaacagtgtctcaactggccaggcggtggcagtggagctgcttctgaccctgcagctggtgctctgtgtcttcgcttccaccgacagccgtcagacatcaggctccccggccaccatgattgggatctctgtggcactgggccacctcattgggatccacttcactggctgctccatgaatccagcccgctccttcggccctgccatcatcattgggaagttcacagtccactgggtcttctgggtggggcccctgatgggagccctcctggcctcactgatctacaacttcgtcctgttccccgacaccaagaccctggcgcagcggctggctatcctcacaggcaccgtagaggtggggacaggggcaggggcaggggcggagcccctgaagaaggaatcccagccgggttcgggagccgtggagatggagagtgtgtgaaacagcctacgcctggccgcgcccttgggcttcctgccttgcaggacctgcctggaggttctccctggcattacgtttctaggtagaatctgggagtgaatttgtcccattccctctctgtagggcttccccacctctcggtgggacagagcagaggaaggcaggggatttaggatcgccctcccatcctctcacccactggaccccgtaggagtcctgaccccagatgcccaagtcttgggggagaaaggaatgggagcccagacagccactctgcttagacatgggagctatagggacctcagggagccccagcttcttacccacccaggaaacccttggtccagagaggacaggctttctggaggaatcaggccctgggacagcctctgagctcctgggggtgtttctctgaccttgggtgtggttttgggggctatatttcctccttcagactgggggcttcctgaggacagagactgctctaccaatagatctttgtttgttttgagacagaatcttgatctgttacccaggctggagtgcagtggcatgatctcggctcactgcaacctctacctcctgggttcaagggattctcctgcctcagcctcccaagtagctgggattacaggcgcctgccaccacgcccagctaattttttgtatttttagtagagatggggtttcatcatattggtcagggtggtctcaaactcctgacctgaggcgatctgcccacctcggcctcccaaagtgctgggattacaggcgtgagccaccgtgcccggcctctcccaataggtctttattcctcaatcctccaaatgctctggagaggcccccacccttgagaagaactgacacagagaagaacattttctcaggctcgtagagaggtgggatagaggaagggaggtttgagccagacaggcctttcccagggaagcctcctcccaggtgcttgccccagctcccaccccacagcccactctcaggcaggaacaatcctcagaggggaagtgcccatctagccattgactcatgacctgggtcaaagaagccgtctccaggctctctgtcagcattacaggatccccagaaagctgttgaataagccctaagggtggtaggaacccaggagggacccaggaaactaagatttgagattcagtgcctctgaaagactaccaaaatctaagttggtttaatagttaaaagctgctgtagatttattctgcccacaacttgggggtcctttctggatctcggcttctccagctgtaaaatggacacacaatcctcctccagggactgctgtgaaatcaagaaatcggaaaatactttcagaagttaaaatgctagaaaaacaaccccaataaatgatgattattgtt

SEQ ID NO: 108413 - DNA, 829 bp, Homo sapiens
  Payload ID: 1301
  Gene Symbol: AQP6
  Gene Name: aquaporin 6, kidney specific
  ENST ID: ENST00000618286
  CDS Start-End: 338-829
tcatcgtaggaggttccagctcagtgcccagagacagcccccacatcccaccccatcaggtcagctcaggctggagcaggcatatgagcaacacccctcattccacccccatacacatgcataagcccatccgcctgcgccctgccagtctgaccagcacagtcctggggacaggagcgtggtggaggagctgcaggtgggggccagagaagcctccacagagagcaaaagccagggtcagccagagacaggacaccagaagagacaggagatcagagaccagaggaacagagaagaggccccagagcaaggcaaggaacggccaaggcaccaggacatggatgcagtggagccagggggacgtggctgggccagcatgttggcgtgcaggctttggaaagccatcagcagggcgctgtttgcagagttcctggccacggggctgtatgtgttctttggcgtgggctcagtcatgcgctggcccacagcacttccctccgtgctacagattgccatcaccttcaacctggtcaccgccatggctgtgcaggtcacctggaaggccagcggggcccacgccaaccccgccgtgacgctggccttcctcgtaggctcccacatctctctgccccgtgctgtggcctatgtggctgcccagctggtgggggccacggtgggggctgctctgctttatggggtcatgccgggagacatccgagagacccttgggatcaacgtggctccacccacgtcctctgctctccgactgttcccaagttcttccctccacctcgaggcctgcctcactcgccccttctccatttcgtaa

SEQ ID NO: 108414 - DNA, 1256 bp, Homo sapiens
  Payload ID: 1302
  Gene Symbol: AQP7
  Gene Name: aquaporin 7
  Uniprot ID: O14520
  ENST ID: ENST00000297988
  CDS Start-End: 173-1201
ggctctggactggggacacagggatagctgagccccagctgggggtggaagctgagccagggacagtcacggaggaacaagatcaagatgcgctgtaactgagaagcccccaaggcggaggctgagaatcagagacatttcagcagacatctacaaatctgaaagacaaaacatggttcaagcatccgggcacaggcggtccacccgtggctccaaaatggtctcctggtccgtgatagcaaagatccaggaaatactgcagaggaagatggtgcgagagttcctggccgagttcatgagcacatatgtcatgatggtattcggccttggttccgtggcccatatggttctaaataaaaaatatgggagctaccttggtgtcaacttgggttttggcttcggagtcaccatgggagtgcacgtggcaggccgcatctctggagcccacatgaacgcagctgtgacctttgctaactgtgcgctgggccgcgtgccctggaggaagtttccggtctatgtgctggggcagttcctgggctccttcctggcggctgccaccatctacagtctcttctacacggccattctccacttttcgggtggacagctgatggtgaccggtcccgtcgctacagctggcatttttgccacctaccttcctgatcacatgacattgtggcggggcttcctgaatgaggcgtggctgaccgggatgctccagctgtgtctcttcgccatcacggaccaggagaacaacccagcactgccaggaacagaggcgctggtgataggcatcctcgtggtcatcatcggggtgtcccttggcatgaacacaggatatgccatcaacccgtcccgggacctgcccccccgcatcttcaccttcattgctggttggggcaaacaggtcttcagcaatggggagaactggtggtgggtgccagtggtggcaccacttctgggtgcctatctaggtggcatcatctacctggtcttcattggctccaccatcccacgggagcccctgaaattggaggattctgtggcgtatgaagaccacgggataaccgtattgcccaagatgggatctcatgaacccacgatctctcccctcacccccgtctctgtgagccctgccaacagatcttcagtccaccctgccccacccttacatgaatccatggccctagagcacttctaagcagagattatttgtgatcccatccattccccaataaagcaaggcttgtccgaca

SEQ ID NO: 108415 - DNA, 1062 bp, Homo sapiens
  Payload ID: 1302
  Gene Symbol: AQP7
  Gene Name: aquaporin 7
  ENST ID: ENST00000379506
  CDS Start-End: 18-788
gagtctcctttctgtccatgggctcgggccactgtcttaggtccacccgtggctccaaaatggtctcctggtccgtgatagcaaagatccaggaaatactgcagaggaagatggtgcgagagttcctggccgagttcatgagcacatatgtcatgatggtattcggccttggttccgtggcccatatggttctaaataaaaaatatgggagctaccttggtgtcaacttgggttttggcttcggagtcaccatgggagtgcacgtggcaggccgcatctctggagcccacatgaacgcagctgtgacctttgctaactgtgcgctgggccgcgtgccctggaggaagtttccggtctatgtgctggggcagttcctgggctccttcctggcggctgccaccatctacagtctcttctacacggccattctccacttttcgggtggacagctgatggtgaccggtcccgtcgctacagctggcatttttgccacctaccttcctgatcacatgacattgtggcggggcttcctgaatgaggcgtggctgaccgggatgctccagctgtgtctcttcgccatcacggaccaggagaacaacccagcactgccaggaacagaggcgctggtgataggcatcctcgtggtcatcatcggggtgtcccttggcatgaacacaggatatgccatcaacccgtcccgggacctgcccccccgcatcttcaccttcattgctggttggggcaaacaggtcttcaggtactgcccctgcccaggcccattcctttgagtttttctgtgggtcccctgtgtgttgaggggtggggggtgatgtgaggggcagcacaggagggtcctgctgagcccccaggtagcctggggagcaggagtgagtcccaacatttccccaggccagtacagatacagatcctgcacctgcactgagtgtcaacgctgtccctgaattgggctgaggctgaccagggccctgggttgggggtgtttcctggggtagcctggggatgactcctctgctcaacctgtcttggcccgaggtggatgag

SEQ ID NO: 108416 - DNA, 2879 bp, Homo sapiens
  Payload ID: 1302
  Gene Symbol: AQP7
  Gene Name: aquaporin 7
  ENST ID: ENST00000379507
  CDS Start-End: 28-1053
aggcagacttgagtctcctttctgtccatgggctcgggccactgtcttaggtccacccgtggctccaaaatggtctcctggtccgtgatagcaaagatccaggaaatactgcagaggaagatggtgcgagagttcctggccgagttcatgagcacatatgtcatgatggtattcggccttggttccgtggcccatatggttctaaataaaaaatatgggagctaccttggtgtcaacttgggttttggcttcggagtcaccatgggagtgcacgtggcaggccgcatctctggagcccacatgaacgcagctgtgacctttgctaactgtgcgctgggccgcgtgccctggaggaagtttccggtctatgtgctggggcagttcctgggctccttcctggcggctgccaccatctacagtctcttctacacggccattctccacttttcgggtggacagctgatggtgaccggtcccgtcgctacagctggcatttttgccacctaccttcctgatcacatgacattgtggcggggcttcctgaatgaggcgtggctgaccgggatgctccagctgtgtctcttcgccatcacggaccaggagaacaacccagcactgccaggaacagaggcgctggtgataggcatcctcgtggtcatcatcggggtgtcccttggcatgaacacaggatatgccatcaacccgtcccgggacctgcccccccgcatcttcaccttcattgctggttggggcaaacaggtcttcagcaatggggagaactggtggtgggtgccagtggtggcaccacttctgggtgcctatctaggtggcatcatctacctggtcttcattggctccaccatcccacgggagcccctgaaattggaggattctgtggcgtatgaagaccacgggataaccgtattgcccaagatgggatctcatgaacccacgatctctcccctcacccccgtctctgtgagccctgccaacagatcttcagtccaccctgccccacccttacatgaatccatggccctagagcacttctaagcagagattatttgtgatcccatccattccccaataaagcaaggcttgtccgacagcagtacccccacttcctgggggcctcctgtggttgggcttccctcctgggttcttacaggagctccagggctatgtcttagcccaaggtgtagaggtgaggcacctcaagtctttcatgccctgggaactggggtgccccagggggagaatggggaagagatgacctgcgccctcagtaggaacagggtgagatgaaagaacgacagaatgagggattttcaggcacgggggaaggaagggtggttttggggaacagaccgtagctgactggttgggggccggctttggaaatactttgaggggatcctgagattggactctagactctcccctggttcttcccttccctgagttctggccggttcttggaccagacaaggcaaggcccaagaatgtagatcagaattttttagcctttttttcattagttccttccctagtattcttctagattttttttttcttaatcacatgaaattttaataccacagatgtactatatatctgtttatgttctgtatatgttctgtgctttatacataaaaaagagtaagatttttttttcacctccccttttaagaatcagttttaattcccttgagaatgcttgttatagattgaaggctgttaaggggttgggctcctctttcttcttcctggtgccagagtgctcccacatgaaggaataggaaaggaagatgcaaagagggaaatccttcgaccacatgaagacacaggaagaggcctcatagggctccaagggctccagggaagcaggtgcagaggttgggtggggtgaggggccaggatccactgaccctggggccaggcaggaatcactctgttgcctggggctcagaaggcagcatcacccatggttcctgtccttgctcatgcattttgcctttcaataattattgtgcatctactgtgtgcaggccctgcctggacactggggatgcgcagtggatgcgctgggctctgcctttgagggttgcagtttaatgggggacaggtaattatatggaagaaggtgagtgcagagtgggaggcttggaggctgtggggctcggggtaggggagctcacatccagcctctgggccaaggccaggaggcttcccagaggaggagacagagcagggtatggtggtggggggtgtcctttttgggggtgggagctgcactttacagtttgaggggatgggcagaggaggctgggcttcgttctggaggtggggacacggtgaggtgaggtttagaaagcacacctgagccgcagtgtgtaggatgctggaaatggtggagatgggcctgcgaaagtgatgacccaggagcagcagccgggcacctaacaatgggtcagcaccgtgggcgtggagacgagagcggggattgatcaataccggagaagtacaatgtacaggacttgggttccatttggatggagtgggtgagggagagggaggagtcagaaatggcttccggtttccagcttgggcctggggattggagatgtccccactgagagtagggcacaagtgaggaaatggtttggagaggaagataagttacatcatggacatgctgagtctgagttgcctatgggacttggaatggggggtggcaaaatgtgtgtgatcttgagcaagatattcaacccttctgggccttggtcttcttatttgtaaaatggcgataagaatattacttcccatttgtgttgctgtgaatattaaatgcgctaccacatgtaaaatgttgagaatca

SEQ ID NO: 108417 - DNA, 1068 bp, Homo sapiens
  Payload ID: 1302
  Gene Symbol: AQP7
  Gene Name: aquaporin 7
  ENST ID: ENST00000377425
  CDS Start-End: 215-865
ggggacacagggatagctgagccccagctgggggtggaagctgagccagggacagtcacggaggaacaagatcaagatgcgctgtaactgagaagcccccaaggcggaggctgagaatcagagacatttcagcagacatctacaaatctgaaagacaaaacatggttcaagcatccgggcacaggcggtattcggccttggttccgtggcccatatggttctaaataaaaaatatgggagctaccttggtgtcaacttgggttttggcttcggagtcaccatgggagtgcacgtggcaggccgcatctctggagcccacatgaacgcagctgtgacctttgctaactgtgcgctgggccgcgtgccctggaggaagtttccggtctatgtgctggggcagttcctgggctccttcctggcggctgccaccatctacagtctcttctacacggccattctccacttttcgggtggacagctgatggtgaccggtcccgtcgctacagctggcatttttgccacctaccttcctgatcacatgacattgtggcggggcttcctgaatgaggcgtggctgaccgggatgctccagctgtgtctcttcgccatcacggaccaggagaacaacccagcactgccaggaacagaggcgctggtgataggcatcctcgtggtcatcatcggggtgtcccttggcatgaacacaggatatgccatcaacccgtcccgggacctgcccccccgcatcttcaccttcattgctggttggggcaaacaggtcttcaggtggcatcatctacctggtcttcattggctccaccatcccacgggagcccctgaaattggaggattctgtggcgtatgaagaccacgggataaccgtattgcccaagatgggatctcatgaacccacgatctctcccctcacccccgtctctgtgagccctgccaacagatcttcagtccaccctgccccacccttacatgaatccatggccctagagcacttctaagcagagattatttgtgatcccatccattccccaataaagcaaggcttgtccgaca

SEQ ID NO: 108418 - DNA, 675 bp, Homo sapiens
  Payload ID: 1302
  Gene Symbol: AQP7
  Gene Name: aquaporin 7
  ENST ID: ENST00000439678
  CDS Start-End: 167-675
gagtctcctttctgtccatgggctcgggccactgtcttaggtccacccgtggctccaaaatggtctcctggtccgtgatagcaaagatccaggaaatactgcagaggaagatggtgcgagagttcctggccgagttcatgagcacatatgtcatgatggagcccacatgaacgcagctgtgacctttgctaactgtgcgctgggccgcgtgccctggaggaagtttccggtctatgtgctggggcagttcctgggctccttcctggcggctgccaccatctacagtctcttctacacggccattctccacttttcgggtggacagctgatggtgaccggtcccgtcgctacagctggcatttttgccacctaccttcctgatcacatgacattgtggcggggcttcctgaatgaggcgtggctgaccgggatgctccagctgtgtctcttcgccatcacggaccaggagaacaacccagcactgccaggaacagaggcgctggtgataggcatcctcgtggtcatcatcggggtgtcccttggcatgaacacaggatatgccatcaacccgtcccgggacctgcccccccgcatcttcaccttcattgctggttggggcaaacaggtcttcagcaatggggagaactggtggtgggtgccagtggtggcaccact

SEQ ID NO: 108419 - DNA, 998 bp, Homo sapiens
  Payload ID: 1302
  Gene Symbol: AQP7
  Gene Name: aquaporin 7
  Uniprot ID: O14520
  ENST ID: ENST00000447660
  CDS Start-End: 389-886
aaagcgccgatgagctgttctggagcacggggcccagcacagggtgagaggtgagatgcctgtggggaaatccaggagatagttaaacacatgcaaggggctggagctcaggagaggcttggtctggaaggaaaaagttgaagttcatcacaacacaggtggtagttgtcaatactgtccagagacagtgtacagaaagagaaaaggatgggttgaggacagagccctgaggaatgaagaagggcatgcaaaggagcctgagaaggaacggtcagagaggtgggaggagaaccagagcagactgcatgacagaggggggcagtggttccaccaggaagaagccgtcagcggcgtgggcagcggcagatgggccacgcgaggagcccacatgaacgcagctgtgacctttgctaactgtgcgctgggccgcgtgccctggaggaagtttccggtctatgtgctggggcagttcctgggctccttcctggcggctgccaccatctacagtctcttctacacggccattctccacttttcgggtggacagctgatggtgaccggtcccgtcgctacagctggcatttttgccacctaccttcctgatcacatgacattgtggcggggcttcctgaatgaggcgtggctgaccgggatgctccagctgtgtctcttcgccatcacggaccaggagaacaacccagcactgccaggaacagaggcgctggtgataggcatcctcgtggtcatcatcggggtgtcccttggcatgaacacaggatatgccatcaacccgtcccgggacctgcccccccgcatcttcaccttcattgctggttggggcaaacaggtcttcaggtactgcccctgcccaggcccattcctttgagtttttctgtgggtcccctgtgtgttgaggggtggggggtgatgtgaggggcagcacaggagggtcctgctgagcccccaggtagcctggggagcaggagtgagtcccaaca

SEQ ID NO: 108420 - DNA, 1668 bp, Homo sapiens
  Payload ID: 1302
  Gene Symbol: AQP7
  Gene Name: aquaporin 7
  ENST ID: ENST00000537089
  CDS Start-End: 168-323
tggactggggacacagggatagctgagccccagctgggggtggaagctgagccagggacagtcacggaggaacaagatcaagatgcgctgtaactgagaagcccccaaggcggaggctgagaatcagagacatttcagcagacatctacaaatctgaaagacaaaacatggttcaagcatccgggcacaggcggtccacccgtggctccaaaatggtctcctggtccgtgatagcaaagatccaggaaatactgcagaggaagatggtgcgagagttcctggccgagttcatgagcacatatgtcatgatggagcccacatgaacgcagctgtgacctttgctaactgtgcgctgggccgcgtgccctggaggaagtttccggtctatgtgctggggcagttcctgggctccttcctggcggctgccaccatctacagtctcttctacacggccattctccacttttcgggtggacagctgatggtgaccggtcccgtcgctacagctggcatttttgccacctaccttcctgatcacatgacattgtggcggggcttcctgaatgaggcgtggctgaccgggatgctccagctgtgtctcttcgccatcacggaccaggagaacaacccagcactgccaggaacagaggcgctggtgataggcatcctcgtggtcatcatcggggtgtcccttggcatgaacacaggatatgccatcaacccgtcccgggacctgcccccccgcatcttcaccttcattgctggttggggcaaacaggtcttcaggtactgcccctgcccaggcccattcctttgagtttttctgtgggtcccctgtgtgttgaggggtggggggtgatgtgaggggcagcacaggagggtcctgctgagcccccaggtagcctggggagcaggagtgagtcccaacatttccccaggccagtacagatacagatcctgcacctgcactgagtgtcaacgctgtccctgaattgggctgaggctgaccagggccctgggttgggggtgtttcctggggtagcctggggatgactcctctgctcaacctgtcttggcccgaggtggatgagggtgctgtcctgggcatcagccccctcagcaggcctctgcctcttgcctgcagcaatggggagaactggtggtgggtgccagtggtggcaccacttctgggtgcctatctaggtggcatcatctacctggtcttcattggctccaccatcccacgggagcccctgaaattggaggattctgtggcgtatgaagaccacgggataaccgtattgcccaagatgggatctcatgaacccacgatctctcccctcacccccgtctctgtgagccctgccaacagatcttcagtccaccctgccccacccttacatgaatccatggccctagagcacttctaagcagagattatttgtgatcccatccattccccaataaagcaaggcttgtccgacagcagtacccccacttcctgggggcctcctgtggttgggcttccctcctgggttcttacaggagctccagggctatgtcttagcccaaggtgtagaggtgaggcacctcaagtctttcatgccctgggaactggggtgccccagggggagaatggggaagagatgacctgcgccctcagtagga

SEQ ID NO: 108421 - DNA, 575 bp, Homo sapiens
  Payload ID: 1302
  Gene Symbol: AQP7
  Gene Name: aquaporin 7
  ENST ID: ENST00000625109
  CDS Start-End: 334-575
aactcggtctccacggcactgctggccggacgagggatgttattttgggcagtgcatctggacttggttcaagtggcaccagccaaacccctgccttactgacctctcccctggaggagcaggagcagcgctcgaggccgccctgggagagctgagaggcaggctctggactggggacacagggatagctgagccccagctgggggtggaagctgagccagggacagtcacggaggaacaagatcaagatgcgctgtaactgagaagcccccaaggcggaggctgagaatcagagacatttcagcagacatctacaaatctgaaagacaaaacatggttcaagcatccgggcacaggcggtccacccgtggctccaaaatggtctcctggtccgtgatagcaaagatccaggaaatactgcagaggaagatggtgcgagagttcctggccgagttcatgagcacatatgtcatgatggcgtggctgaccgggatgctccagctgtgtctcttcgccatcacggaccaggagaacaacccagcactgccaggaacagaggcgctggtgataggcat

SEQ ID NO: 108422 - DNA, 1479 bp, Homo sapiens
  Payload ID: 1302
  Gene Symbol: AQP7
  Gene Name: aquaporin 7
  ENST ID: ENST00000624890
  CDS Start-End: 150-275
atagctgagccccagctgggggtggaagctgagccagggacagtcacggaggaacaagatcaagatgcgctgtaactgagaagcccccaaggcggaggctgagaatcagagacatttcagcagacatctacaaatctgaaagacaaaacatggttcaagcatccgggcacaggcgaggcttgttggcaccgtggattgcactttcagctccccacccgcccatctgcaaagtggcctcattggtgtgccatttttactggtccagtcccaactagaaggggcatggcctggccatctaccccagttcctctccatgtccccgtggctctcaagtgtctccaattccagctgtcccagctgccctgcgcaagaggaggcgtgtgtgggcgaggctgctgggttacctattaactcagctgggagttgaagagccgatgggcagcaggcagacttgagtctcctttctgtccatgggctcgggccactgtcttaggtccacccgtggctccaaaatggtctcctggtccgtgatagcaaagatccaggaaatactgcagaggaagatggtgcgagagttcctggccgagttcatgagcacatatgtcatgatggtattcggccttggttccgtggcccatatggttctaaataaaaaatatgggagctaccttggtgtcaacttgggttttggcttcggagtcaccatgggagtgcacgtggcaggccgcatctctggagcccacatgaacgcagctgtgacctttgctaactgtgcgctgggccgcgtgccctggaggaagtttccggtctatgtgctggggcagttcctgggctccttcctggcggctgccaccatctacagtctcttctacacggccattctccacttttcgggtggacagctgatggtgaccggtcccgtcgctacagctggcatttttgccacctaccttcctgatcacatgacattgtggcggggcttcctgaatgaggcgtggctgaccgggatgctccagctgtgtctcttcgccatcacggaccaggagaacaacccagcactgccaggaacagaggcgctggtgataggcatcctcgtggtcatcatcggggtgtcccttggcatgaacacaggatatgccatcaacccgtcccgggacctgcccccccgcatcttcaccttcattgctggttggggcaaacaggtcttcaggtactgcccctgcccaggcccattcctttgagtttttctgtgggtcccctgtgtgttgaggggtggggggtgatgtgaggggcagcacaggagggtcctgctgagcccccaggtagcctggggagcaggagtgagtcccaacatttccccaggccagtacagatacagatcctgcacctgcactgagtgtcaacgctgtccctgaattgggctgaggctgaccagggccctgggttgggggtgtttcctggggtagcctggggatgact

SEQ ID NO: 108423 - DNA, 1026 bp, Homo sapiens
  Payload ID: 1302
  Gene Symbol: AQP7
  Gene Name: aquaporin 7
  ENST ID: ENST00000624005
  CDS Start-End: 336-491
agaactcggtctccacggcactgctggccggacgagggatgttattttgggcagtgcatctggacttggttcaagtggcaccagccaaacccctgccttactgacctctcccctggaggagcaggagcagcgctcgaggccgccctgggagagctgagaggcaggctctggactggggacacagggatagctgagccccagctgggggtggaagctgagccagggacagtcacggaggaacaagatcaagatgcgctgtaactgagaagcccccaaggcggaggctgagaatcagagacatttcagcagacatctacaaatctgaaagacaaaacatggttcaagcatccgggcacaggcggtccacccgtggctccaaaatggtctcctggtccgtgatagcaaagatccaggaaatactgcagaggaagatggtgcgagagttcctggccgagttcatgagcacatatgtcatgatggagcccacatgaacgcagctgtgacctttgctaactgtgcgctgggccgcgtgccctggaggaagtttccggtctatgtgctggggcagttcctgggctccttcctggcggctgccaccatctacagtctcttctacagcgtggctgaccgggatgctccagctgtgtctcttcgccatcacggaccaggagaacaacccagcactgccaggaacagaggcgctggtgataggcatcctcgtggtcatcatcggggtgtcccttggcatgaacacaggatatgccatcaacccgtcccgggacctgcccccccgcatcttcaccttcattgctggttggggcaaacaggtcttcaggtactgcccctgcccaggcccattcctttgagtttttctgtgggtcccctgtgtgttgaggggtggggggtgatgtgaggggcagcacaggagggtcctgctgagcccccaggtagcctggggagcaggagtgagtcccaacatttccccaggccagtacagatacagatcctgcacctgcactgagtgtc

SEQ ID NO: 108424 - DNA, 585 bp, Homo sapiens
  Payload ID: 1302
  Gene Symbol: AQP7
  Gene Name: aquaporin 7
  ENST ID: ENST00000625032
  CDS Start-End: 436-585
gatgttattttgggcagtgcatctggacttggttcaagtggcaccagccaaacccctgccttactgacctctcccctggaggagcaggagcagcgctcgaggccgccctgggagagctgagaggcaggctctggactggggacacagggatagctgagccccagctgggggtggaagctgagccagggacagtcacggaggaacaagatcaagatgcgctgtaactgagaagcccccaaggcggaggctgagaatcagagacatttcagcagagtcctggacagtcgcagcttaagttagcagcaagaggacttgaggttaaaggtatagcacgcaaatatgaggctggagccactgagtagaggctgagggcatctccacagtccaaagccgggctgcagacacggaagcatctacaaatctgaaagacaaaacatggttcaagcatccgggcacaggcggtccacccgtggctccaaaatggtctcctggtccgtgatagcaaagatccaggaaatactgcagaggaagatggtgcgagagttcctggccgagttcatgagcacatatgtcatgatgagagaa

SEQ ID NO: 108425 - DNA, 1270 bp, Homo sapiens
  Payload ID: 1302
  Gene Symbol: AQP7
  Gene Name: aquaporin 7
  ENST ID: ENST00000624075
  CDS Start-End: 240-1013
cttactgacctctcccctggaggagcaggagcagcgctcgaggccgccctgggagagctgagaggcaggctctggactggggacacagggatagctgagccccagctgggggtggaagctgagccagggacagtcacggaggaacaagatcaagatgcgctgtaactgagaagcccccaaggcggaggctgagaatcagagacatttcagcagacatctacaaatctgaaagacaaaacatggttcaagcatccgggcacaggcggtccacccgtggctccaaaatggtctcctggtccgtgatagcaaagatccaggaaatactgcagaggaagatggtgcgagagttcctggccgagttcatgagcacatatgtcatgatggtattcggccttggttccgtggcccatatggttctaaataaaaaatatgggagctaccttggtgtcaacttgggttttggcttcggagtcaccatgggagtgcacgtggcaggccgcatctctggagcccacatgaacgcagctgtgacctttgctaactgtgcgctgggccgcgtgccctggaggaagtttccggtctatgtgctggggcagttcctgggctccttcctggcggctgccaccatctacagtctcttctacacggccattctccacttttcgggtggacagctgatggtgaccggtcccgtcgctacagctggcatttttgccacctaccttcctgatcacatgacattgtggcggggcttcctgaatgaggcgtggctgaccgggatgctccagctgtgtctcttcgccatcacggaccaggagaacaacccagcactgccaggaacagaggcgctggtgataggcatcctcgtggtcatcatcggggtgtcccttggcatgaacacaggatatgccatcaacccgtcccgggacctgcccccccgcatcttcaccttcattgctggttggggcaaacaggtcttcaggtactgcccctgcccaggcccattcctttgagtttttctgtgggtcccctgtgtgttgaggggtggggggtgatgtgaggggcagcacaggagggtcctgctgagcccccaggtagcctggggagcaggagtgagtcccaacatttccccaggccagtacagatacagatcctgcacctgcactgagtgtcaacgctgtccctgaattgggctgaggctgaccagggccctgggttgggggtgtttcctggggtagcctggggatgactcctctgctcaacctgtctt

SEQ ID NO: 108426 - DNA, 973 bp, Homo sapiens
  Payload ID: 1302
  Gene Symbol: AQP7
  Gene Name: aquaporin 7
  ENST ID: ENST00000624420
  CDS Start-End: 120-377
gagccagggacagtcacggaggaacaagatcaagatgcgctgtaactgagaagcccccaaggcggaggctgagaatcagagacatttcagcagacatctacaaatctgaaagacaaaacatggttcaagcatccgggcacaggcggtccacccgtggctccaaaatggtctcctggtccgtgatagcaaagatccaggaaatactgcagaggaagatggtgcgagagttcctggccgagttcatgagcacatatgtcatgatgagagaaggtgatgactggtttggggttggagaagaaagcacatgtttgagagggctgtggaagacagaatcagggagactctgccagcagaagatgtgggcaaagcgccgatgagctgttctggagcacggggcccagcacagggtgagaggagcccacatgaacgcagctgtgacctttgctaactgtgcgctgggccgcgtgccctggaggaagtttccggtctatgtgctggggcagttcctgggctccttcctggcggctgccaccatctacagtctcttctacacggccattctccacttttcgggtggacagctgatggtgaccggtcccgtcgctacagctggcatttttgccacctaccttcctgatcacatgacattgtggcggggcttcctgaatgaggcgtggctgaccgggatgctccagctgtgtctcttcgccatcacggaccaggagaacaacccagcactgccaggaacagaggcgctggtgataggcatcctcgtggtcatcatcggggtgtcccttggcatgaacacaggatatgccatcaacccgtcccgggacctgcccccccgcatcttcaccttcattgctggttggggcaaacaggtcttcaggtactgcccctgcccaggcccattcctttgagtttttctgtgggtcccctgtgtgttgaggggtggggggtgatgtgaggggca

SEQ ID NO: 108427 - DNA, 875 bp, Homo sapiens
  Payload ID: 1302
  Gene Symbol: AQP7
  Gene Name: aquaporin 7
  ENST ID: ENST00000624095
  CDS Start-End: 51-305
gagttgaagagccgatgggcagcaggcagacttgagtctcctttctgtccatgggctcgggccactgtcttaggtccacccgtggctccaaaatggtctcctggtccgtgatagcaaagatccaggaaatactgcagaggaagatggtgcgagagttcctggccgagttcatgagcacatatgtcatgatgagagaaggtgatgactggtttggggttggagaagaaagcacatgtttgagagggctgtggaagacagaatcagggagactctgccagcagaagatgtgggcaaagcgccgatgagctgttctggagcacggggcccagcacagggtgagaggagcccacatgaacgcagctgtgacctttgctaactgtgcgctgggccgcgtgccctggaggaagtttccggtctatgtgctggggcagttcctgggctccttcctggcggctgccaccatctacagtctcttctacacggccattctccacttttcgggtggacagctgatggtgaccggtcccgtcgctacagctggcatttttgccacctaccttcctgatcacatgacattgtggcggggcttcctgaatgaggcgtggctgaccgggatgctccagctgtgtctcttcgccatcacggaccaggagaacaacccagcactgccaggaacagaggcgctggtgataggcatcctcgtggtcatcatcggggtgtcccttggcatgaacacaggatatgccatcaacccgtcccgggacctgcccccccgcatcttcaccttcattgctggttggggcaaacaggtcttcaggtactgcccctgcccaggcccattcctttgagtttttctgtgggtcccctgtgtgttg

SEQ ID NO: 108428 - DNA, 1359 bp, Homo sapiens
  Payload ID: 1303
  Gene Symbol: AQP8
  Gene Name: aquaporin 8
  Uniprot ID: O94778
  ENST ID: ENST00000219660
  CDS Start-End: 126-911
aaaggggcagagcccatagtgtgatcagcaggtcctgtccctaggagataagagtatcttgcacagcaggtgcaggtttcccagcagctcaggcaagagtccgatgtttgtgccatctgatcctgatgtctggagagatagccatgtgtgagcctgaatttggcaatgacaaggccagggagccgagcgtgggtggcaggtggcgagtgtcctggtacgaacggtttgtgcagccatgtctggtcgaactgctgggctctgctctcttcatcttcatcgggtgcctgtcggtcattgagaatgggacggacactgggctgctgcagccggccctggcccacgggctggctttggggctcgtgattgccacgctggggaatatcagtggtggacacttcaaccctgcggtgtccctggcagccatgctgatcggaggcctcaacctggtgatgctcctcccgtactgggtctcacagctgctcggggggatgctcggggctgccttggccaaggcggtgagtcctgaggagaggttctggaatgcatctggggcggcctttgtgacagtccaggagcaggggcaggtggcaggggcgttggtggcagagatcatcctgacgacgctgctggccctggctgtatgcatgggtgccatcaatgagaagacaaagggccctctggccccgttctccatcggctttgccgtcaccgtggatatcctggctgggggccctgtgtctggaggctgcatgaatcccgcccgtgcttttggacctgcggtggtggccaaccactggaacttccactggatctactggctgggcccactcctggctggcctgcttgttggactgctcattaggtgcttcattggagatgggaagacccgcctcatcctgaaggctcggtgaagcagagctcgtgggattcctgctgctccaggtgtcctcagctcacctgtcccagactgaggacaggggagttcctgcatttcctgccagggcagaggcccagaggagcgaccccctgcttccactgcttgggcctgctttctcagatagactgactgctgaggaggctctaggttcttggaattcctttgtgctcatcagagaccccagcctggggaacacgctgcccgcactgcccagagagcagtgcaaacaccacaacacgagcgtgtttcttgagaggaatgtccccgagttggacaaggaggctgtttctgcacatcagctcatttcccgcaccccatttcttgcttgattgctttgttgggggcctggccacttccttgcttctcaagctgacaattctcactttgcaataaatagtccagtgtttccttccacgtgctca

SEQ ID NO: 108429 - DNA, 1276 bp, Homo sapiens
  Payload ID: 1303
  Gene Symbol: AQP8
  Gene Name: aquaporin 8
  ENST ID: ENST00000566125
  CDS Start-End: 69-836
tgtctgtgaaggatcgtcatctatacactcagtcctggctcaggctgtcacggtgactgcagatagccatgtgtgagcctgaatttggcaatgacaaggccagggagccgagcgtgggtggcaggtggcgagtgtcctggtacgaacggtttgtgcagccatgtctggtcgaactgctgggctctgctctcttcatcttcatcgggtgcctgtcggtcattgagaatgggacggacactgggctgctgcagccggccctggcccacgggctggctttggggctcgtgattgccacgctggggaatatcagtggtggacacttcaaccctgcggtgtccctggcagccatgctgatcggaggcctcaacctggtgatgctcctcccgtactgggtctcacagctgctcggggggatgctcggggctgccttggccaaggcggtgagtcctgaggagaggttctggaatgcatctggggcggcctttgtgacagtccaggagcaggggcaggtggcaggggcgttggtggcagagatcatcctgacgacgctgctggccctggctgtatgcatgggtgccatcaatgagaagacaaagggccctctggccccgttctccatcggctttgccgtcaccgtggatatcctggctgggggccctgtgtctggaggctgcatgaatcccgcccgtgcttttggacctgcggtggtggccaaccactggaacttccactggatctactggctgggcccactcctggctggcctgcttgttggactgctcattaggtgcttcattggagatgggaagacccgcctcatcctgaaggctcggtgaagcagagctcgtgggattcctgctgctccaggtgtcctcagctcacctgtcccagactgaggacaggggagttcctgcatttcctgccagggcagaggcccagaggagcgaccccctgcttccactgcttgggcctgctttctcagatagactgactgctgaggaggctctaggttcttggaattcctttgtgctcatcagagaccccagcctggggaacacgctgcccgcactgcccagagagcagtgcaaacaccacaacacgagcgtgtttcttgagaggaatgtccccgagttggacaaggaggctgtttctgcacatcagctcatttcccgcaccccatttcttgcttgattgctttgttgggggcctggccacttccttgcttctcaagctgacaattctcactttgcaataaatagtccagtgtttccttcca

SEQ ID NO: 108430 - DNA, 3034 bp, Homo sapiens
  Payload ID: 1304
  Gene Symbol: AQP9
  Gene Name: aquaporin 9
  Uniprot ID: O43315
  ENST ID: ENST00000219919
  CDS Start-End: 371-1258
actgtgatttggcaacacaactggcacatctcttttctcatctcttgaaaaaaaccaacagagaaaaaagtaccttgagaataaaggtaatgattaatctgtcaggcacaaaagggattgttttggggatttcgggttctaagtcgcagattcaaacaaatagcagcgaacagggaatgacagttccaccagaagacgattaagccacagcctctaattggaacggcatttgtacagtcagagactcttaccagacatctccaggaatctgtgagccattgtcaaaacgtccattttcatctggctgtgaaagtgaggaccacaacaggtaggtattggtagaaacaggagtcctcagagaagccccaagatgcagcctgagggagcagaaaagggaaaaagcttcaagcagagactggtcttgaagagcagcttagcgaaagaaaccctctctgagttcttgggcacgttcatcttgattgtccttggatgtggctgtgttgcccaagctattctcagtcgaggacgttttggaggggtcatcactatcaatgttggattttcaatggcagttgcaatggccatttatgtggctggcggtgtctctggtggtcacatcaacccagctgtgtctttagcaatgtgtctctttggacggatgaaatggttcaaattgccattttatgtgggagcccagttcttgggagcctttgtgggggctgcaaccgtctttggcatttactatgatggacttatgtcctttgctggtggaaaactgctgatcgtgggagaaaatgcaacagcacacatttttgcaacatacccagctccgtatctatctctggcgaacgcatttgcagatcaagtggtggccaccatgatactcctcataatcgtctttgccatctttgactccagaaacttgggagcccccagaggcctagagcccattgccatcggcctcctgattattgtcattgcttcctccctgggactgaacagtggctgtgccatgaacccagctcgagacctgagtcccagacttttcactgccttggcaggctgggggtttgaagtcttcagagctggaaacaacttctggtggattcctgtagtgggccctttggttggtgctgtcattggaggcctcatctatgttcttgtcattgaaatccaccatccagagcctgactcagtctttaagacagaacaatctgaggacaaaccagagaaatatgaactcagtgtcatcatgtagtggcatgctcagctctggatttgcagtcagtttgggattctcttcagaaagatggcatctaagtgtctgtgttcttgtaagcctgaggtggaatccacccagttttgtctgctagccatatgggacatctaattggaaaagcatctgcataaaagtttggaaacaatgaccacttctctaccattgtcccccacccccaccccccagaataacgctgactgtcccctgaaacagccttctctcctgccctgtttatttcatcctcgatgggaattcttgctaggtaagcactaataactcggcatcttgacgatagtcccatttgggtggtttcagctgcactatctgtatgaaatggtgtcaccaaaacccttttcttcagtatcgacaaagattacattctgagtaccaaccaaaccctaaattgaaagacaaaactatggtttcagtcaacatattcatgaattagggagctaatgggttaagcttccagttcccgctatgctactggatttgtataaatactgatattctccaaacctagtggtgtagggagcaagagaatgcagctggaaggcacaaggggaggacattgtggcattcagaaactgcaggagacaagatgaatttgagaagccaaatggaatttttaatggaaaccatttatcagattaatctcttgctctcctgcattttagaggacaccaattaatttcctggtctttagtatataataacctaaaataccattgtaacctcagtcatgaaaaatacatcactctgtctttttagctcaaatgtattttcctaattgcccacttgagaacagacatttgacaagttatatcaacgactgtgcttgtccattattttacacatgccctagaagccaaaactgaaagccactggatcctggtctagctgaatcttcagagtgggaggtctccaaaaagatattaccttattgggcttaacaattcacaaggcactttcacacccattatctaatttaatcctcataatgactatgtgaggcaaatgccacattgcccatttttcagataaagaaacaaaatcttagggaagataagttgagttgtccaagagcacactgaaagttgaatgttatctaatgcattcctctacctttcagaagatcagtagctggctgacaatctttgccaaatcttccttgctagccagaagtggaattggcagcttctagaatatgtacacctctggacaaaatgttcctcaatcttaagatacaaagaccctcattgtctgggtctattcccacacttactgagtacagatgaaggaaagtggtagcaatttaatcataactttcatttgctgaaaaacattatgagaaggcctcccttcctaagccacctctggtcttgctaagtcttgatcttgcttcctgccagcaccaaacattacattcaggggatttcctctggctcagtcttttccccttgaagttctctaatagatgttacttttgacaaaagatcgcctatgagttacaagcaccaggggatgctctacatcaagggatgcaccttcagtcaaactgtcaaaaagcccagaattcccaaaggcattaggtttcccaactgctttgtgctgatatcagaacagcagaaattaaatgtgaaatgtttctgatgacttatgttctacaatctatggacatacgggatttttttttcttgctttgaagctacctggatatttcctatttgaaataaaattgttcggtcattgttg

SEQ ID NO: 108431 - DNA, 2803 bp, Homo sapiens
  Payload ID: 1304
  Gene Symbol: AQP9
  Gene Name: aquaporin 9
  Uniprot ID: O43315
  ENST ID: ENST00000536493
  CDS Start-End: 186-1073
ccaccagaagacgattaagccacagcctctaattggaacggcatttgtacagtcagagactcttaccagacatctccaggaatctgtgagccattgtcaaaacgtccattttcatctggctgtgaaagtgaggaccacaacaggtaggtattggtagaaacaggagtcctcagagaagccccaagatgcagcctgagggagcagaaaagggaaaaagcttcaagcagagactggtcttgaagagcagcttagcgaaagaaaccctctctgagttcttgggcacgttcatcttgattgtccttggatgtggctgtgttgcccaagctattctcagtcgaggacgttttggaggggtcatcactatcaatgttggattttcaatggcagttgcaatggccatttatgtggctggcggtgtctctggtggtcacatcaacccagctgtgtctttagcaatgtgtctctttggacggatgaaatggttcaaattgccattttatgtgggagcccagttcttgggagcctttgtgggggctgcaaccgtctttggcatttactatgatggacttatgtcctttgctggtggaaaactgctgatcgtgggagaaaatgcaacagcacacatttttgcaacatacccagctccgtatctatctctggcgaacgcatttgcagatcaagtggtggccaccatgatactcctcataatcgtctttgccatctttgactccagaaacttgggagcccccagaggcctagagcccattgccatcggcctcctgattattgtcattgcttcctccctgggactgaacagtggctgtgccatgaacccagctcgagacctgagtcccagacttttcactgccttggcaggctgggggtttgaagtcttcagagctggaaacaacttctggtggattcctgtagtgggccctttggttggtgctgtcattggaggcctcatctatgttcttgtcattgaaatccaccatccagagcctgactcagtctttaagacagaacaatctgaggacaaaccagagaaatatgaactcagtgtcatcatgtagtggcatgctcagctctggatttgcagtcagtttgggattctcttcagaaagatggcatctaagtgtctgtgttcttgtaagcctgaggtggaatccacccagttttgtctgctagccatatgggacatctaattggaaaagcatctgcataaaagtttggaaacaatgaccacttctctaccattgtcccccacccccaccccccagaataacgctgactgtcccctgaaacagccttctctcctgccctgtttatttcatcctcgatgggaattcttgctaggtaagcactaataactcggcatgaaatggtgtcaccaaaacccttttcttcagtatcgacaaagattacattctgagtaccaaccaaaccctaaattgaaagacaaaactatggtttcagtcaacatattcatgaattagggagctaatgggttaagcttccagttcccgctatgctactggatttgtataaatactgatattctccaaacctagtggtgtagggagcaagagaatgcagctggaaggcacaaggggaggacattgtggcattcagaaactgcaggagacaagatgaatttgagaagccaaatggaatttttaatggaaaccatttatcagattaatctcttgctctcctgcattttagaggacaccaattaatttcctggtctttagtatataataacctaaaataccattgtaacctcagtcatgaaaaatacatcactctgtctttttagctcaaatgtattttcctaattgcccacttgagaacagacatttgacaagttatatcaacgactgtgcttgtccattattttacacatgccctagaagccaaaactgaaagccactggatcctggtctagctgaatcttcagagtgggaggtctccaaaaagatattaccttattgggcttaacaattcacaaggcactttcacacccattatctaatttaatcctcataatgactatgtgaggcaaatgccacattgcccatttttcagataaagaaacaaaatcttagggaagataagttgagttgtccaagagcacactgaaagttgaatgttatctaatgcattcctctacctttcagaagatcagtagctggctgacaatctttgccaaatcttccttgctagccagaagtggaattggcagcttctagaatatgtacacctctggacaaaatgttcctcaatcttaagatacaaagaccctcattgtctgggtctattcccacacttactgagtacagatgaaggaaagtggtagcaatttaatcataactttcatttgctgaaaaacattatgagaaggcctcccttcctaagccacctctggtcttgctaagtcttgatcttgcttcctgccagcaccaaacattacattcaggggatttcctctggctcagtcttttccccttgaagttctctaatagatgttacttttgacaaaagatcgcctatgagttacaagcaccaggggatgctctacatcaagggatgcaccttcagtcaaactgtcaaaaagcccagaattcccaaaggcattaggtttcccaactgctttgtgctgatatcagaacagcagaaattaaatgtgaaatgtttctgatgacttatgttctacaatctatggacatacgggatttttttttcttgctttgaagctacctggatatttcctatttgaaataaaattgttcggtcattgttg

SEQ ID NO: 108432 - DNA, 1334 bp, Homo sapiens
  Payload ID: 1304
  Gene Symbol: AQP9
  Gene Name: aquaporin 9
  ENST ID: ENST00000558772
  CDS Start-End: 198-890
aaaatcttttctggaccagggcccgtcactgtgatttggcaacacaactggcacatctcttttctcatctcttgaaaaaaaccaacagagaaaaaagtaccttgagaataaaggtccttggatgtggctgtgttgcccaagctattctcagtcgaggacgttttggaggggtcatcactatcaatgttggattttcaatggcagttgcaatggccatttatgtggctggcggtgtctctggtggtcacatcaacccagctgtgtctttagcaatgtgtctctttggacggatgaaatggttcaaattgccattttatgtgggagcccagttcttgggagcctttgtgggggctgcaaccgtctttggcatttactatgatggacttatgtcctttgctggtggaaaactgctgatcgtgggagaaaatgcaacagcacacatttttgcaacatacccagctccgtatctatctctggcgaacgcatttgcagatcaagtggtggccaccatgatactcctcataatcgtctttgccatctttgactccagaaacttgggagcccccagaggcctagagcccattgccatcggcctcctgattattgtcattgcttcctccctgggactgaacagtggctgtgccatgaacccagctcgagacctgagtcccagacttttcactgccttggcaggctgggggtttgaagtcttcagagctggaaacaacttctggtggattcctgtagtgggccctttggttggtgctgtcattggaggcctcatctatgttcttgtcattgaaatccaccatccagagcctgactcagtctttaagacagaacaatctgaggacaaaccagagaaatatgaactcagtgtcatcatgtagtggcatgctcagctctggatttgcagtcagtttgggattctcttcagaaagatggcatctaagtgtctgtgttcttgtaagcctgaggtggaatccacccagttttgtctgctagccatatgggacatctaattggaaaagcatctgcataaaagtttggaaacaatgaccacttctctaccattgtcccccacccccaccccccagaataacgctgactgtcccctgaaacagccttctctcctgccctgtttatttcatcctcgatgggaattcttgctaggtaagcactaataactcggcatcttgacgatagtcccatttgggtggtttcagctgcactatctgtatgaaatggtgtcaccaaaacccttttcttcagtatcgacaaagattacattctgagtaccaaccaaaccctaaattgaaagacaaaactatggt

SEQ ID NO: 108433 - DNA, 9694 bp, Homo sapiens
  Payload ID: 1305
  Gene Symbol: AQR
  Gene Name: aquarius intron-binding spliceosomal factor
  Uniprot ID: O60306
  ENST ID: ENST00000156471
  CDS Start-End: 227-4684
aacgcctgcatgaacttccggctacacgccattccgcttcccgaggaacgcttgggctgttgtacgggttccctacgggactctgaaggctgaggatatccggcccggagcgtttgtgcggcgcggagttaagcgccccggcagtaacttaagggaagtggaccagggttgccgctgcccagagcggtcctttagtttccactggagtggagggaagagtgctgccatggcagcccctgcgcagcccaagaagatcgtggcccctacggtgtcccaaatcaatgcggagttcgtgacccagttagcatgtaaatactgggctccccacatcaagaagaaatcaccttttgatataaaggttattgaagatatatatgaaaaagagattgtcaaatcaaggtttgctattagaaagataatgctcttggaatttagccagtatcttgaaaattatctctggatgaattattctcctgaggtatctagcaaggcctatttaatgtcaatctgctgtatggtgaatgagaagtttagagaaaacgtgcctgcatgggagatttttaagaagaagccagaccacttcccattcttttttaaacacatcttgaaggcggcattagctgaaactgatggtgaattttcacttcatgaacagacagtcttactactttttcttgatcattgcttcaatagtttggaagtagacttgatacgaagtcaagtacagcagcttatctccctcccaatgtggatgggcttacagctggcacgattggaattagaattaaaaaagacacctaagctaagaaaattctggaacttgattaaaaagaatgatgaaaagatggatccagaagcaagagaacaggcatatcaagagaggagatttctttcacaactcatccagaagtttatctctgtgctgaaatcagtcccactttctgaacctgtcactatggacaaagttcattactgtgaaagattcattgaacttatgattgatctagaggccctgctacccacaaggcgctggtttaataccatcctggatgattcccaccttctggttcactgttacctttccaatcttgttcgtagagaagaggatggccatcttttttcccagcttttggacatgcttaaattctatactggttttgaaattaatgaccaaactggaaatgctctgacagagaatgagatgaccacaattcactatgatagaattacttctctacagagagctgcttttgcacattttcctgaactctatgattttgccctctcaaatgtggcagaagtagatactcgggagtccttggtcaagttttttggacctcttagttcaaacacactccaccaggtggcatcatacctctgcttgttgccaactcttcctaaaaatgaagacacaacttttgataaagaatttcttctagaattgctggtatctcgtcatgaacgtcgaatttctcagattcagcagttgaaccagatgcctttgtatccaactgagaaaattatatgggatgaaaatattgtcccaactgagtactattctggagaaggttgtcttgctcttcccaaattgaatttgcagtttttgactcttcatgactacctgctaaggaactttaacctcttccgcttagaatcaacttatgaaattcgtcaggacattgaagatagtgtcagcagaatgaagccatggcaatctgaatatggcggtgtagtgtttggtggttgggcgcgaatggcccagcccattgtggctttcactgtcgttgaagtggccaaacccaacataggtgaaaactggccaacccgagttcgtgcagatgttaccataaatctcaatgtcagagatcacatcaaagatgaatgggaaggtcttcgtaagcatgatgtatgctttttaattaccgtacgtcccacaaaaccttatggcactaagtttgaccggaggagaccttttattgagcaggttggcctggtttatgtcagaggctgtgaaattcagggcatgctggatgataaaggacgtgtcattgaagatggacctgaacccagacccaatcttagaggagaatcaaggacatttagagtgtttttggatccaaaccagtatcaacaagatatgaccaatactatacaaaatggagcagaggatgtgtatgaaacttttaatataataatgaggagaaaaccaaaggaaaataactttaaggctgtgctggagactattcggaacctgatgaatactgattgtgtggtacctgactggctgcacgatatcattttaggttatggggacccaagtagtgcacattattcgaaaatgcccaatcagattgccacccttgatttcaatgatacatttctctccattgagcatttaaaagccagcttccctggtcataatgttaaagtaactgtagaagaccctgctctacaaataccccctttcaggataacttttccagtaagaagtggaaaagggaagaaaaggaaagatgcggatgtggaagatgaagacaccgaggaagcaaaaaccttaattgttgagccccatgttattcctaataggggtccttatccttataatcaacccaaacgtaatacgattcagttcactcatacacagatagaagccatccgtgctggaatgcagcctgggctgactatggttgtgggcccacctggtacaggcaaaacagatgtggcagttcagatcatatccaacatctaccacaacttcccagaacagaggactctaattgttactcattccaatcaggccctaaaccagttgtttgagaaaatcatggcattagacattgatgagcgccacctactgcgtcttggtcatggagaagaagagctggagacagagaaagatttcagcaggtatggaagagttaattatgttctggctcgaagaatagaacttttagaagaagtcaaacgattgcaaaagagtctaggggttccaggagatgcctcatatacctgtgaaactgcaggctatttcttcttataccaggtaatgtctcgctgggaagagtatatcagcaaagtgaaaaataaaggtagtacattgccagatgttacggaagtctccactttcttccctttccatgaatactttgcaaatgctcctcaacccatttttaaaggaagatcttatgaagaagacatggaaattgctgaaggatgtttcaggcatattaagaaaatctttacgcagcttgaggaattcagagcctctgaattgcttcgaagtggactggacagatctaaataccttttagtgaaagaagccaaaattattgctatgacctgtactcatgctgccttaaaacgacatgacttggtcaagctaggtttcaagtatgacaacattttgatggaagaggctgctcagattctggagatagaaacttttatccctcttcttctacagaatcctcaggatggatttagccgactaaaacgatggattatgattggcgatcatcaccagttacctccagttattaagaacatggcctttcaaaagtactcaaacatggagcagtctctcttcactcgctttgttcgcgttggagttccgactgttgaccttgatgctcaagggagagccagagcaagcttgtgcaacctctacaactggcgatacaagaatctaggaaacttaccccatgtgcagctcttgccagagtttagtacagcaaatgctggcttactgtatgacttccagctcattaatgttgaagattttcaaggagtgggagaatctgaacctaatccttacttctatcagaatcttggagaggcagaatatgtagtagcactttttatgtacatgtgtttacttggttaccctgctgacaaaatcagtattctaacaacatataatggccaaaagcatcttattcgcgacatcatcaatagacgatgtggaaacaatccattgattggaagaccaaacaaggtgacaactgttgatagatttcaaggtcaacagaatgactatattcttctttctctggtacgaaccagggcagtgggccatctgagggatgtccgtcgcttggtagtggccatgtctagagccagacttggactttatatcttcgccagagtatccctcttccaaaactgttttgaactgactccagctttcagtcagctcacagctcgcccccttcatttgcatataattccaacagaacctttcccaactactagaaagaatggagagagaccatctcatgaagtacaaataataaaaaatatgccccagatggcaaactttgtatacaacatgtacatgcatttgatacagactacacatcattatcatcagactttattacaactaccacctgctatggtagaagagggtgaggaagttcaaaatcaagaaacagaattggaaacagaagaagaggccatgactgttcaagctgacatcatacccagtccaacagacaccagctgccgtcaagaaactccagcctttcaaactgacaccacccccagtgagacaggagccacttccactccagaagccatccctgctttatctgagaccacccctactgtggtaggagctgtatctgcaccggcagaagctaacacacctcaggatgccacatctgccccggaagagaccaagtagccaaactgtagtccttctaaaggaggacatggcagtcaaaaagtctgagtaaagctgttttttgtattttatatttgcttctgccattttactgtcactaattaatgtttagttcttatatttgttaactgatttcggtgtcttgaatatatttttttaaattatgtgtatgaacaattctagtttcatttgttcaatcagaagagcaaataaccattcctttcatgttttgatcactgagtgtgtctgtaatcatacctacattaaaatcattttctatgaatatataatatatacttcacatttttagtgaacttctctaaagaagaggacagaatatactggacttaaccacgaatacccttgagtgtccaaattgggaaggaacttgtttcttctgttatactatcaaatgcttaaattctgtttccttttttcttacctttgtttgctgtctttatgtaaagatattattagcagtaagatacaggtttcttcaatctatcaaagtggttacatgcatttccttctctcaaatcttagaatgccttagaatcacctaagatgtctgtttattcttgaggcacacctcagactgaatgagtcagaatctcaggattagagcctaggaatctatattttaggaggttctccacaccactaatgtttgggttgctggcagagtggcatcagccaaggctggttaggctgagccaggatttgtcatcagctaaataggaggactctgccaaatcaatctgggcaagaagcaggatcctgagtctgggcaatgagagtcagagaacttaactcctgtgtgcagggtagaattttcccatggcagaaattctgagttttctgccttatttttcttgggataaccagccacaaggagaccttcaggtaaaatgtggttcaaatatgggaaggcagaggtacctgggaccttgctactcaagtatgatttgtgaaccaacagcatcaacatcgtattgaagtttgttatttatagaaatgcagaagtttgggctctgctccaaacctattaaatctaaatctacattgcaacaaagtccccaggtgattcacaggcactttgtagtttgagaagcactgtactaagattactgtgttgtcttcacatgaatgaggctataatgtagaattaccagtgaatgtgactaatgttttctgacaagggacctctgcttacaaggtccctgggcatggtgcccagaactggaaaaaaaaaaaaaaaaaaggaaatgtttatatgtatgtgtagaggggaaaattgcccactagttctctatttcccattttgatcatctgctagagtatctaaaggggaggggagcatttaccccagaatgtctcctctagtgcatccacctatgggcctggccatgtccaaggaatctttgaagaaacaagcaagaactgcacactaccattgaaatccttctggtcctgacattttgaaggaatgattgcttcatagggaaattaaacccagaaagtcaagtcagttatatttttgagtgactagtgtttgctcagctctaccaggctgtgttgaatatggtacagactctcattttatgatgtatcctactgcatcaggacatttgtgtcaatgtcaggtgatgaggggaaatgaaagtgatgagacgatgagaggagtgaaataccaaggacgcgatactaggaaacccaggtctatttgttatcagagtaaggatcaagccagatagcctgttatgtaatttctccgataaaagattttgaaagcaggtgctgtgggcatctgtatggggaatcgcactcatagaattattttcatttgtaaatatttggtatcaggccaagcaagggaaagaagctttactgtattaccatctttcctggaaaagattgatttttctctctcccttaggggatatgaggtatgatacctgcaaccaaaataagctggctgttaagtgctctctccttaactattgtccaagcaatgtacatcactcttgcctagatgagtgaccatacttttttctttgctgcttggtttttctatcactaaaaagcaaatttaggtggaagatggatgggtaagtcctttgtccttgtcaaaagaatttagaaagggtaaaggtggtgggatttgaattcttttaaacggtttattcattggaaaggcaagtgagtggcagttgactgtagaatcttgggaatttttgaaggaatttaagagctgtacttattttaaataatgaggaaacaatcagagagacttaaccagggtggcaactatggaagagtgggggtagaatccaagtctacagttctacggcactgctttgtttattttttcaatcaagcacacatgagggattgcttaataaattcaagagttttctatatagtttgggattactacagacacaggtactctagccatgtgactatttcagattagtgttcccattgctctccatcctatttttcatatctaaatgtgtcatgattttagaatctctttgtaaagaaaaccaaaaagagccatgcccaaaagaatgagcatgaaatgaagcaattcaagtatttagaatttcttcttcttttttttttttttttttcaaaattctgagttaagaaagttcattgccaacagttgaggataaatagctctattgatttaggcaaatgaatgagaagatttaaacatcatcaagactcccaaagttggtgtaataaaagttgagatgttttgctagatgctgagagaaaaggcataaataggccatttgtgctcctgtaaacaaatgaaattttgtaatgatcaagagacagcaagatattataaaacacactttggactcatcgagacctggctcagagttgtacctaatttgcttatcagcatttggttagaccttagacaaattttataacctctctaagcccattttctttatctgtaaataaaggaaaaagatctgtttggatttgggacaggagagttgtctgttttatagggtaatgtttatgaaaataatttatcacctaggtacttagtaaataccagtttctgtctctgtttttcttcaaagctttgttgacaatgtaggatattgccaactaatcctttgacttgagtgcttagccatgccccaatccaggcagcatgaagaatgatcaagaaggggacacctagtggcagttgacctttgaggatctatctaggatcaggttactgatttgggacctctgaatcagtacatcataacatcgagagtgatctctgccaaaattaaaattctgtcagaacagtataagcagaaggaagacattaggtctttctgaaatatggagctgataacttctatcagttctgaattctgtactgtcccacccccaaatcatctatattgttgcatgtgcttagctttgtgccttgaattgctatttcctttttatcttgcactcagatggtatttttagagatgtttcttcaatcaaaacaagataaagttaaaaaaaaaaaaaaaacagtgacccttttgcataagccagaagagcagtgccttgcttcctgtgaaaaatgcttggcagttagcctgtgtaattatttagcaatcatgttaatagatgtttaagaataatggaactggagctgtactgagccaaggatggaaatgaagacatgtgagactattttttcttcatccaccgatactcttcagttacaaggatttaatttaaaagggttttaattaaatggaatccagaagctttggacgctccagtttttcttcttagagacaaaccctagctcagtttcctggagcttgactcagaatgcagcatggtactccggactgacagtgtgccagctttattcacttatctctctaccttttggcttgcgtttatttcagggctgcctgacattttgaccttatgtacaaagatggccgatacgattatttttcatcatatattacagaaaatactactcttgaaaaatactctgagaaatatgttctatggtcagataagtttgggaaacagtgaattattgttcctcctttgcagaatcacaatgcactgttagctaattaaagactctcagatgtcccactggaaagaatcatgtttagctttgtttaacctagcatttcccaaacttattagagcataaaactttgtttttgtttttttttaataagataggtagctatttccttagaacacagtttgggaaactttttgttcatttgttttaataagataccttaggtagctatttccttagaacacgagccgggtgcagtggctcacgcctgtaatcccagcactttgggaggcccaggcgggcggatcacctgaggtcaggagatcgagatcatccggcccaacatggtgaaaccccgtctctactaaaaagacaaaaattagccagccatggtggcaggcacctgtagtcctagctactgtggaggctgaggcaggagaatcacttgaacccgggatggggaggttgcagtgagctgagatggcgccactgtactccagcctgggcgacgagcaaaaactccttcaaaaaaaaaaaaaaaacataacttaggtagctatttccttgggaaccaatatctttacattggctagaactgtgaatcgccctttaaagataaagccccaaaatacattttttttccctacaggtaaccagagggtgaagtaacagccgaagaggaaaccagaagtgaagtgatttgtacaaaatgtcgtagtgtaatttattgagtgtcatgtggtattaatcgcaacatcctgaaaatgcaaatgaataaaagtttggtcaatgtaccatgacattccttcatgtgagcctcctaagaaaaggtcactgagcattctctgtttacattttaattttagactccagaatttcacactaagtttttcttctcatttcttatgcagtaaaagaagagtttgtatttccaa

SEQ ID NO: 108434 - DNA, 5722 bp, Homo sapiens
  Payload ID: 1305
  Gene Symbol: AQR
  Gene Name: aquarius intron-binding spliceosomal factor
  ENST ID: ENST00000543879
  CDS Start-End: 121-2061
ggagcgtttgtgcggcgcggagttaagcgccccggcagtaacttaagggaagtggaccagggttgccgctgcccagagcggtcctttagtttccactggagtggagggaagagtgctgccatggcagcccctgcgcagcccaagaagatcgtggcccctacggtgtcccaaatcaatgcggagttcgtgacccagttagcatgtaaatactgggctccccacatcaagaagaaatcaccttttgatataaaggttattgaagatatatatgaaaaagagattgtcaaatcaaggtttgctattagaaagataatgctcttggaatttagccagtatcttgaaaattatctctggatgaattattctcctgaggtatctagcaaggcctatttaatgtcaatctgctgtatggtgaatgagaagtttagagaaaacgtgcctgcatgggagatttttaagaagaagccagaccacttcccattcttttttaaacacatcttgaaggcggcattagctgaaactgatggtgaattttcacttcatgaacagacagtcttactactttttcttgatcattgcttcaatagtttggaagtagacttgatacgaagtcaagtacagcagcttatctccctcccaatgtggatgggcttacagctggcacgattggaattagaattaaaaaagacacctaagctaagaaaattctggaacttgattaaaaagaatgatgaaaagatggatccagaagcaagagaacaggcatatcaagagaggagatttctttcacaactcatccagaagtttatctctgtgctgaaatcagtcccactttctgaacctgtcactatggacaaagttcattactgtgaaagattcattgaacttatgattgatctagaggccctgctacccacaaggcgctggtttaataccatcctggatgattcccaccttctggttcactgttacctttccaatcttgttcgtagagaagaggatggccatcttttttcccagcttttggacatgcttaaattctatactggttttgaaattaatgaccaaactggaaatgctctgacagagaatgagatgaccacaattcactatgatagaattacttctctacagagagctgcttttgcacattttcctgaactctatgattttgccctctcaaatgtggcagaagtagatactcgggagtccttggtcaagttttttggacctcttagttcaaacacactccaccaggtggcatcatacctctgcttgttgccaactcttcctaaaaatgaagacacaacttttgataaagaatttcttctagaattgctggtatctcgtcatgaacgtcgaatttctcagattcagcagttgaaccagatgcctttgtatccaactgagaaaattatatgggatgaaaatattgtcccaactgagtactattctggagaaggttgtcttgctcttcccaaattgaatttgcagtttttgactcttcatgactacctgctaaggaactttaacctcttccgcttagaatcaacttatgaaattcgtcaggacattgaagatagtgtcagcagaatgaagccatggcaatctgaatatggcggtgtagtgtttggtggttgggcgcgaatggcccagcccattgtggctttcactgtcgttgaagtggccaaacccaacataggtgaaaactggccaacccgagttcgtgcagatgttaccataaatctcaatgtcagagatcacatcaaagatgaatgggaaggtcttcgtaagcatgatgtatgctttttaattaccgtacgtcccacaaaaccttatggcactaagtttgaccggaggagaccttttattgagcaggttggcctggtttatgtcagaggctgtgaaattcagggcatgctggatgataaaggacgtgtcattgaagatggtatggtgacctatatttttgaaagagacctgaacccagacccaatcttagaggagaatcaaggacatttagagtgtttttggatccaaaccagtatcaacaagatatgaccaatactatacaaaatggagcagaggatgtgtatgaaacttttaatataataatgaggagaaaaccaaaggaaaataactttaaggctgtgctggagactattcggaacctgatgaatactgattgtgtggtacctgactggctgcacgatatcattttaggttatggggacccaagtagtgcacattattcgaaaatgcccaatcagattgccacccttgatttcaatgatacatttctctccattgagcatttaaaagccagcttccctggtcataatgttaaagtaactgtagaagaccctgctctacaaataccccctttcaggataacttttccagtaagaagtggaaaagggaagaaaaggaaagatgcggatgtggaagatgaagacaccgaggaagcaaaaaccttaattgttgagccccatgttattcctaataggggtccttatccttataatcaacccaaacgtaatacgattcagttcactcatacacagatagaagccatccgtgctggaatgcagcctgggctgactatggttgtgggcccacctggtacaggcaaaacagatgtggcagttcagatcatatccaacatctaccacaacttcccagaacagaggactctaattgttactcattccaatcaggccctaaaccagttgtttgagaaaatcatggcattagacattgatgagcgccacctactgcgtcttggtcatggagaagaagagctggagacagagaaagatttcagcaggtatggaagagttaattatgttctggctcgaagaatagaacttttagaagaagtcaaacgattgcaaaagagtctaggggttccaggagatgcctcatatacctgtgaaactgcaggctatttcttcttataccaggtaatgtctcgctgggaagagtatatcagcaaagtgaaaaataaaggtagtacattgccagatgttacggaagtctccactttcttccctttccatgaatactttgcaaatgctcctcaacccatttttaaaggaagatcttatgaagaagacatggaaattgctgaaggatgtttcaggcatattaagaaaatctttacgcagcttgaggaattcagagcctctgaattgcttcgaagtggactggacagatctaaataccttttagtgaaagaagccaaaattattgctatgacctgtactcatgctgccttaaaacgacatgacttggtcaagctaggtttcaagtatgacaacattttgatggaagaggctgctcagattctggagatagaaacttttatccctcttcttctacagaatcctcaggatggatttagccgactaaaacgatggattatgattggcgatcatcaccagttacctccagttattaagaacatggcctttcaaaagtactcaaacatggagcagtctctcttcactcgctttgttcgcgttggagttccgactgttgaccttgatgctcaagggagagccagagcaaggtaaaagagacaggaaaaaaaatcattcccatttaaggacatttgttccatgatccaagtatttgtgaatagcttttgtgtagactattagcattcttggctatccaggaacttggctatccataaatccaaaagcacttttgtcgacttctgcaagagatgtgaatggaccaaataatttatttccttcatttcattcattaatattaatttaagtaacttataatctaaaggcttcttttcattgtcccttctcctttcttcatgtccccaaaagatatacagttaatataattttaaaatctaaaaataaagtgaacaagaggagaacacaccaattcttacttcataaaggatgcaggccccatctcatagttacccccaaatgtcctcaatttttagtcttccttgattttttaatttaagggataaagatagcattgacctcagagagcgtaatagaactctcatttttgtagtaccttcagtcttctgacccttggttacttgaagtagggaagctaaggttgaaagagcattattgcttaaaagatgagccaaaatggctaacatgaaaatttaaaagaagcacagaaacagaaacctccttatgtatattaaaagagattttacactgctaatattttctgtttgtgggggaatttgtctttggaaagcttgtgcaacctctacaactggcgatacaagaatctaggaaacttaccccatgtgcagctcttgccagagtttagtacagcaaatgctggcttactgtatgacttccagctcattaatgttgaagattttcaaggagtgggagaatctgaacctaatccttacttctatcagaatcttggagaggcagaatatgtagtagcactttttatgtacatgtgtttacttggttaccctgctgacaaaatcagtattctaacaacatataatggccaaaagcatcttattcgcgacatcatcaatagacgatgtggaaacaatccattgattggaagaccaaacaaggtgacaactgttgatagatttcaaggtcaacagaatgactatattcttctttctctggtacgaaccagggcagtgggccatctgagggatgtccgtcgcttggtagtggccatgtctagagccagacttggactttatatcttcgccagagtatccctcttccaaaactgttttgaactgactccagctttcagtcagctcacagctcgcccccttcatttgcatataattccaacagaacctttcccaactactagaaagaatggagagagaccatctcatgaagtacaaataataaaaaatatgccccagatggcaaactttgtatacaacatgtacatgcatttgatacagactacacatcattatcatcagactttattacaactaccacctgctatggtagaagagggtgaggaagttcaaaatcaagaaacagaattggaaacagaagaagaggccatgactgttcaagctgacatcatacccagtccaacagacaccagctgccgtcaagaaactccagcctttcaaactgacaccacccccagtgagacaggagccacttccactccagaagccatccctgctttatctgagaccacccctactgtggtaggagctgtatctgcaccggcagaagctaacacacctcaggatgccacatctgccccggaagagaccaagtagccaaactgtagtccttctaaaggaggacatggcagtcaaaaagtctgagtaaagctgttttttgtattttatatttgcttctgccattttactgtcactaattaatgtttagttcttatatttgttaactgatttcggtgtcttgaatatatttttttaaattatgtgtatgaacaattctagtttcatttgttcaatcagaagagcaaataaccattcctttcatgttttgatcactgagtgtgtctgtaatcatacctacattaaaatcattttctatgaatatataatatatacttcacatttttagtgaacttctctaaagaagaggacagaatatactggacttaaccacgaatacccttgagtgtccaaattgggaaggaacttgtttcttctgttatactatcaaatgcttaaattctgtttccttttttctta

SEQ ID NO: 108435 - DNA, 543 bp, Homo sapiens
  Payload ID: 1305
  Gene Symbol: AQR
  Gene Name: aquarius intron-binding spliceosomal factor
  ENST ID: ENST00000560117
  CDS Start-End: 2-543
gatgccaactggcctgcatgcctgtgtagtgccttcagatatactctgtcccccagtgccgagtagggccttgttaagaaaccgcttatcactaaatgatctgtcttccagctctacaatggcaagaatctgggacttactgtttatactgtttactttgcagttagcatgtaaatactgggctccccacatcaagaagaaatcaccttttgatataaaggttattgaagatatatatgaaaaagagattgtcaaatcaaggtttgctattagaaagataatgctcttggaatttagccagtatcttgaaaattatctctggatgaattattctcctgaggtatctagcaaggcctatttaatgtcaatctgctgtatggtgaatgagaagtttagagaaaacgtgcctgcatgggagatttttaagaagaagccagaccacttcccattcttttttaaacacatcttgaaggcggcattagctgaaactgatggtgaattttcacttcatgaacagacagtcttactactttttcttgatca

SEQ ID NO: 108436 - DNA, 2358 bp, Homo sapiens
  Payload ID: 1306
  Gene Symbol: ALOX12
  Gene Name: arachidonate 12-lipoxygenase
  Uniprot ID: P18054
  ENST ID: ENST00000251535
  CDS Start-End: 54-2045
cccgggaatcgcacaggacccggctcccctcgcctaagctgctggggggcgccatgggccgctaccgcatccgcgtggccaccggggcctggctcttctccgggtcgtacaaccgcgtgcagctttggctggtcgggacgcgcggggaggcggagctggagctgcagctgcggcccgcgcggggcgaggaggaggagtttgatcatgacgttgcagaggacttggggctcctgcagttcgtgaggctgcgcaagcaccactggctggtggacgacgcgtggttctgcgaccgcatcacggtgcagggccctggagcctgcgcggaggtggccttcccgtgctaccgctgggtgcagggcgaggacatcctgagcctgcccgagggcaccgcccgcctgccaggagacaatgctttggacatgttccagaagcatcgagagaaggaactgaaagacagacagcagatctactgctgggccacctggaaggaagggttacccctgaccatcgctgcagaccgtaaggatgatctacctccaaatatgagattccatgaggagaagaggctggactttgaatggacactgaaggcaggggctctggagatggccctcaaacgtgtttacaccctcctgagctcctggaactgcctagaagactttgatcagatcttctggggccagaagagtgccctggctgagaaggttcgccagtgctggcaggatgatgagttgttcagctaccagttcctcaatggtgccaaccccatgctgttgagacgctcgacctctctgccctccaggctagtgctgccctcggggatggaagagcttcaggctcaactggagaaagaacttcagaatggttccctgtttgaagctgacttcatccttctggatggaattccagccaacgtgatccgaggagagaagcaatacctggctgcccccctcgttatgctgaagatggagcccaatgggaagctgcagcccatggtcatccagattcagcctcccaaccccagctctccaaccccaacactgttcctgccctcagaccccccacttgcctggctcctggcaaagtcctgggtccgaaattcagatttccaactgcacgagatccagtatcacttgctgaacactcacctggtggctgaggtcatcgctgtcgccaccatgcggtgcctcccaggactgcaccccatcttcaagttcctgatcccccatatccgctacaccatggaaatcaacacccgggcccggacccaactcatctcagatggaggaatttttgataaggcagtgagcacaggtggagggggccatgtacagttgctccgtcgggcggcagctcagctgacctactgctccctctgtcctcctgacgacctggctgaccggggcctgctgggactcccaggtgctctctatgcccatgatgctttacggctctgggagatcattgccaggtatgtggaggggatcgtccacctcttctaccaaagggatgacatagtgaagggggaccctgagctgcaggcctggtgtcgggagatcacggaggtggggctgtgccaggcccaggaccgaggtttccctgtctccttccagtcccagagtcaactctgccatttcctcaccatgtgcgtcttcacgtgcactgcccagcatgccgccatcaaccagggccagctggactggtatgcctgggtccctaatgctccatgcacaatgcggatgcccccacccaccaccaaggaagatgtgacgatggccacagtgatggggtcactacctgatgtccggcaggcctgtcttcaaatggccatctcatggcatctgagtcgccgccagccagacatggtgcctctggggcaccacaaagaaaaatatttctcaggccccaagcccaaagctgtgctaaaccaattccgaacagatttggaaaagctggaaaaggagattacagcccggaatgagcaacttgactggccctatgaatatctgaagcccagctgcatagagaacagtgtcaccatctgagccctagagtgactctacctgcaagatttcacatcagctttaggactgacatttctatcttgaatttcatgctttcctaaagtctctgctgctaaggctctatttcctcccccagttaaaccccctacattagtatcccactagcccaggggagcagtaaactttctctgcaaagactagatccttttttacgctttgcagaccgcatagtcactgtctcaactactcagctctcctgctgcagcatgaaggcagccacagacaacatggaaatgagtgtgactatgttccaataaaactttatggacactga

SEQ ID NO: 108437 - DNA, 443 bp, Homo sapiens
  Payload ID: 1306
  Gene Symbol: ALOX12
  Gene Name: arachidonate 12-lipoxygenase
  ENST ID: ENST00000480801
  CDS Start-End: 1-443
cgctgggtgcagggcgaggacatcctgagcctgcccgagggcaccgcccgcctgccaggagacaatgctttggacatgttccagaagcatcgagagaaggaactgaaagacagacagcagatctactgctgggccacctggaaggaagggttacccctgaccatcgctgcagaccgtaaggatgatctacctccaaatatgagattccatgaggagaagaggctggactttgaatggacactgaaggcagggctagtgctgccctcggggatggaagagcttcaggctcaactggagaaagaacttcagaatggttccctgtttgaagctgacttcatccttctggatggaattccagccaacgtgatccgaggagagaagcaatacctggctgcccccctcgttatgctgaagatggagcccaatgggaagctgcagcccat

SEQ ID NO: 108438 - DNA, 2502 bp, Homo sapiens
  Payload ID: 1307
  Gene Symbol: ALOX12B
  Gene Name: arachidonate 12-lipoxygenase, 12R type
  Uniprot ID: O75342
  ENST ID: ENST00000319144
  CDS Start-End: 262-2367
cccagacacctgctcactcaccaccagctgggctccgcctgggcctgcccggcacccaccccggccaccaagggcagcagcttttccagaatttggctggcaggcctagtcaccccacctcgccacctcaccactgcacctcggaggccagccctgtccactccactctgtgcctggcttctcttgcctgccttgggccttcgtgtggcccctccacggtgtctgggactgagtgcccctcttgcctcctgaagagcagccatggccacctacaaagtcagggtggccacaggcaccgacctcttgtcgggaacacgggactccatctcactgaccattgtggggacacaaggagagagccataagcagctgctgaaccactttgggagagactttgcaactggggcggtgggccagtacaccgtgcagtgccctcaggacctgggtgagctcatcatcatccgcctgcacaaagagcggtacgccttcttccccaaggacccttggtactgcaactatgtgcagatctgtgcccccaacggccgtatctaccacttccccgcctaccagtggatggatggctacgagaccctggcactccgggaggccacaggaaagacaacagcagatgactcgctccccgtcctcctggagcacagaaaagaggagatcagagccaagcaggacttctaccactggcgagtctttcttcctggcctgcccagctatgtgcacattcccagttaccgccctccggtgcggaggcatcgcaaccccaaccggcctgagtggaatggctatattccgggattcccaattctcatcaactttaaggccaccaagttcctgaacttaaatctccgctactccttcctcaagacggcctccttcttcgtccgcctggggcccatggcactggctttcaaagtccgcggcctgttggactgcaaacattcgtggaagaggctgaaggacattaggaaaattttccctggcaagaaatctgtcgtctccgagtacgtggccgagcactgggcagaggacaccttctttgggtaccagtacctcaacggcgtcaaccccggcctgatccgccgctgcacgcggatcccagacaagttccccgtcacagacgacatggtggctccgttcctgggcgagggaacgtgcttgcaagcggagctggagaaggggaacatttacctggccgactaccgcatcatggagggcatccccaccgtggagctcagcggccggaagcagcaccactgcgcccccctctgcctgctgcactttggacccgagggcaagatgatgcccatcgccatccagctcagccagacccctgggccagattgccccatcttcctgcccagtgattctgagtgggactggctgctagccaagacgtgggtacgctatgcggagttctacagccacgaggccatcgcccacctgctggagacacacctcattgctgaggccttctgcctggccttgctgaggaacctgcccatgtgccaccccctctacaagctcctcatcccccatacccgatacaccgtccagatcaacagcattggccgggccgttctcctcaatgagggggggctctctgccaagggcatgtccctgggcgtggaaggctttgctggggtgatggtacgggctctgtcggagctcacctatgacagcctctacctccccaatgactttgtggagcgtggggtccaggacctgcctggatattactaccgcgatgacagcttggcggtgtggaatgcactggagaagtatgtgacggagatcatcacctattattacccgagtgacgcagccgtggagggtgatccggaattgcagtcttgggtgcaggaaatatttaaagagtgcctcctggggcgggagagctcaggcttccctaggtgcttgcgaaccgtgcctgagctgatccgatatgtcactatagtcatctacacctgctctgccaagcacgctgctgtcaacacaggccagatggagttcaccgcctggatgcccaacttcccagcgtccatgcggaatccaccgattcagactaaggggctgaccactctggagaccttcatggacacgttgccggatgtgaagaccacgtgcatcacgctgctggtgctctggaccctcagccgagagcctgacgacaggcggcccctgggacacttcccggacattcacttcgtggaggaggccccgcggaggagcatagaggcgttccgccagcgcctgaaccagatctcacacgacatccgccagcgcaacaagtgccttcccatcccctactactacctggacccggtgctgattgagaacagcatttctatttaggagcgcgcttcccgtctctcctctccccattctgtgccctactattttcaacaaaacaaaacaaacaagcaaaaaacacaaaaacctcagagaccaaaacaccaaacaaacaaaaaaacaaaaaaccttcctttc

SEQ ID NO: 108439 - DNA, 2677 bp, Homo sapiens
  Payload ID: 1308
  Gene Symbol: ALOX15
  Gene Name: arachidonate 15-lipoxygenase
  Uniprot ID: P16050
  ENST ID: ENST00000293761
  CDS Start-End: 15-2003
catctttgagcaagatgggtctctaccgcatccgcgtgtccactggggcctcgctctatgccggttccaacaaccaggtgcagctgtggctggtcggccagcacggggaggcggcgctcgggaagcgactgtggcccgcacggggcaaggagacagaactcaaggtggaagtaccggagtatctggggccgctgctgtttgtgaaactgcgcaaacggcacctccttaaggacgacgcctggttctgcaactggatctctgtgcagggccccggagccggggacgaggtcaggttcccttgttaccgctgggtggagggcaacggcgtcctgagcctgcctgaaggcaccggccgcactgtgggcgaggaccctcagggcctgttccagaaacaccgggaagaagagctggaagagagaaggaagttgtaccggtggggaaactggaaggacgggttaattctgaatatggctggggccaaactatatgacctccctgtggatgagcgatttctggaagacaagagagttgactttgaggtttcgctggccaaggggctggccgacctcgctatcaaagactctctaaatgttctgacttgctggaaggatctagatgacttcaaccggattttctggtgtggtcagagcaagctggctgagcgcgtgcgggactcctggaaggaagatgccttatttgggtaccagtttcttaatggcgccaaccccgtggtgctgaggcgctctgctcaccttcctgctcgcctagtgttccctccaggcatggaggaactgcaggcccagctggagaaggagctggagggaggcacactgttcgaagctgacttctccctgctggatgggatcaaggccaacgtcattctctgtagccagcagcacctggctgcccctctagtcatgctgaaattgcagcctgatgggaaactcttgcccatggtcatccagctccagctgccccgcacaggatccccaccacctccccttttcttgcctacggatcccccaatggcctggcttctggccaaatgctgggtgcgcagctctgacttccagctccatgagctgcagtctcatcttctgaggggacacttgatggctgaggtcattgttgtggccaccatgaggtgcctgccgtcgatacatcctatcttcaagcttataattccccacctgcgatacaccctggaaattaacgtccgggccaggactgggctggtctctgacatgggaattttcgaccagataatgagcactggtgggggaggccacgtgcagctgctcaagcaagctggagccttcctaacctacagctccttctgtccccctgatgacttggccgaccgggggctcctgggagtgaagtcttccttctatgcccaagatgcgctgcggctctgggaaatcatctatcggtatgtggaaggaatcgtgagtctccactataagacagacgtggctgtgaaagacgacccagagctgcagacctggtgtcgagagatcactgaaatcgggctgcaaggggcccaggaccgagggtttcctgtctctttacaggctcgggaccaggtttgccactttgtcaccatgtgtatcttcacctgcaccggccaacacgcctctgtgcacctgggccagctggactggtactcttgggtgcctaatgcaccctgcacgatgcggctgcccccgccaaccaccaaggatgcaacgctggagacagtgatggcgacactgcccaacttccaccaggcttctctccagatgtccatcacttggcagctgggcagacgccagcccgttatggtggctgtgggccagcatgaggaggagtatttttcgggccctgagcctaaggctgtgctgaagaagttcagggaggagctggctgccctggataaggaaattgagatccggaatgcaaagctggacatgccctacgagtacctgcggcccagcgtggtggaaaacagtgtggccatctaagcgtcgccaccctttggttatttcagcccccatcacccaagccacaagctgaccccttcgtggttatagccctgccctcccaagtcccaccctcttcccatgtcccaccctccctagaggggcaccttttcatggtctctgcacccagtgaacacattttactctagaggcatcacctgggaccttactcctctttccttccttcctcctttcctatcttccttcctctctctcttcctctttcttcattcagatctatatggcaaatagccacaattatataaatcatttcaagactagaatagggggatataatacatattactccacaccttttatgaatcaaatatgatttttttgttgttgttaagacagagtctcactttgacacccaggctggagtgcagtggtgccatcaccacggctcactgcagcctcagcgtcctgggctcaaatgatcctcccacctcagcctcctgagtagctgggactacaggctcatgccatcatgcccagctaatatttttttattttcgtggagacggggcctcactatgttgcctaggctggaaataggattttgaacccaaattgagtttaacaataataaaaagttgttttacgctaaagatggaaaagaactaggactgaactattttaaataaaatattggc

SEQ ID NO: 108440 - DNA, 553 bp, Homo sapiens
  Payload ID: 1308
  Gene Symbol: ALOX15
  Gene Name: arachidonate 15-lipoxygenase
  ENST ID: ENST00000576394
  CDS Start-End: 225-553
actccctgctctcgccaggacaccgccttttggactggggctgaattctgccccttgaagctctgctccttggagctgggggccccagcggtaggcggagttgattggagacctgccacccacattccgaccccaagcgacctccgagagggcggggtctcaggctgggttatttagctcgtccacccttctccaccagaaggagcgaaacatctttgagcaagatgggtctctaccgcatccgcgtgtccactggggcctcgctctatgccggttccaacaaccaggtgcagctgtggctggtcggccagcacggggaggcggcgctcgggaagcgactgtggcccgcacggggcaaggagacagaactcaaggtggaagtaccggagtatctggggccgctgctgtttgtgaaactgcgcaaacggcacctccttaaggacgacgcctggttctgcaactggatctctgtgcagggccccggagccggggacgaggtcaggttcccttgttaccgctgggtggagggcaacggcgtcctgagcctgcctga

SEQ ID NO: 108441 - DNA, 2784 bp, Homo sapiens
  Payload ID: 1308
  Gene Symbol: ALOX15
  Gene Name: arachidonate 15-lipoxygenase
  Uniprot ID: P16050
  ENST ID: ENST00000570836
  CDS Start-End: 98-2086
ttctgcaggcaacagggaggcagcggcttttatgctcaaaaggaatgagtcccagtggctggcacagagaagaaggagcgaaacatctttgagcaagatgggtctctaccgcatccgcgtgtccactggggcctcgctctatgccggttccaacaaccaggtgcagctgtggctggtcggccagcacggggaggcggcgctcgggaagcgactgtggcccgcacggggcaaggagacagaactcaaggtggaagtaccggagtatctggggccgctgctgtttgtgaaactgcgcaaacggcacctccttaaggacgacgcctggttctgcaactggatctctgtgcagggccccggagccggggacgaggtcaggttcccttgttaccgctgggtggagggcaacggcgtcctgagcctgcctgaaggcaccggccgcactgtgggcgaggaccctcagggcctgttccagaaacaccgggaagaagagctggaagagagaaggaagttgtaccggtggggaaactggaaggacgggttaattctgaatatggctggggccaaactatatgacctccctgtggatgagcgatttctggaagacaagagagttgactttgaggtttcgctggccaaggggctggccgacctcgctatcaaagactctctaaatgttctgacttgctggaaggatctagatgacttcaaccggattttctggtgtggtcagagcaagctggctgagcgcgtgcgggactcctggaaggaagatgccttatttgggtaccagtttcttaatggcgccaaccccgtggtgctgaggcgctctgctcaccttcctgctcgcctagtgttccctccaggcatggaggaactgcaggcccagctggagaaggagctggagggaggcacactgttcgaagctgacttctccctgctggatgggatcaaggccaacgtcattctctgtagccagcagcacctggctgcccctctagtcatgctgaaattgcagcctgatgggaaactcttgcccatggtcatccagctccagctgccccgcacaggatccccaccacctccccttttcttgcctacggatcccccaatggcctggcttctggccaaatgctgggtgcgcagctctgacttccagctccatgagctgcagtctcatcttctgaggggacacttgatggctgaggtcattgttgtggccaccatgaggtgcctgccgtcgatacatcctatcttcaagcttataattccccacctgcgatacaccctggaaattaacgtccgggccaggactgggctggtctctgacatgggaattttcgaccagataatgagcactggtgggggaggccacgtgcagctgctcaagcaagctggagccttcctaacctacagctccttctgtccccctgatgacttggccgaccgggggctcctgggagtgaagtcttccttctatgcccaagatgcgctgcggctctgggaaatcatctatcggtatgtggaaggaatcgtgagtctccactataagacagacgtggctgtgaaagacgacccagagctgcagacctggtgtcgagagatcactgaaatcgggctgcaaggggcccaggaccgagggtttcctgtctctttacaggctcgggaccaggtttgccactttgtcaccatgtgtatcttcacctgcaccggccaacacgcctctgtgcacctgggccagctggactggtactcttgggtgcctaatgcaccctgcacgatgcggctgcccccgccaaccaccaaggatgcaacgctggagacagtgatggcgacactgcccaacttccaccaggcttctctccagatgtccatcacttggcagctgggcagacgccagcccgttatggtggctgtgggccagcatgaggaggagtatttttcgggccctgagcctaaggctgtgctgaagaagttcagggaggagctggctgccctggataaggaaattgagatccggaatgcaaagctggacatgccctacgagtacctgcggcccagcgtggtggaaaacagtgtggccatctaagcgtcgccaccctttggttatttcagcccccatcacccaagccacaagctgaccccttcgtggttatagccctgccctcccaagtcccaccctcttcccatgtcccaccctccctagaggggcaccttttcatggtctctgcacccagtgaacacattttactctagaggcatcacctgggaccttactcctctttccttccttcctcctttcctatcttccttcctctctctcttcctctttcttcattcagatctatatggcaaatagccacaattatataaatcatttcaagactagaatagggggatataatacatattactccacaccttttatgaatcaaatatgatttttttgttgttgttaagacagagtctcactttgacacccaggctggagtgcagtggtgccatcaccacggctcactgcagcctcagcgtcctgggctcaaatgatcctcccacctcagcctcctgagtagctgggactacaggctcatgccatcatgcccagctaatatttttttattttcgtggagacggggcctcactatgttgcctaggctggaaataggattttgaacccaaattgagtttaacaataataaaaagttgttttacgctaaagatggaaaagaactaggactgaactattttaaataaaatattggcaaaagaatatagagcatcaaaaaa

SEQ ID NO: 108442 - DNA, 581 bp, Homo sapiens
  Payload ID: 1308
  Gene Symbol: ALOX15
  Gene Name: arachidonate 15-lipoxygenase
  ENST ID: ENST00000572265
  CDS Start-End: 570-581
gtgaccacagggaggagaaagtgaaggcaggagcgcaccttcccacctgccgtccccgtcccctcagaaccgagtcctggggccacctgctcggcgcggtccctctctctctggctcagtccccgcaccccgatacgtctcctcctctcagaggctccgaggaagggcgtgggcgctggagggagcagggctcagccgggtgcccctcccgccaggccccaccggggctgagcctcttctgtcgcccgcaggagacagaactcaaggtggaagtaccggagtatctggggccgctgctgtttgtgaaactgcgcaaacggcacctccttaaggacgacgcctggttctgcaactggatctctgtgcagggccccggagccggggacgaggtcaggttcccttgttaccgctgggtggagggcaacggcgtcctgagcctgcctgaaggcaccggccgcactgtgggcgaggaccctcagggcctgttccagaaacaccgggaagaagagctggaagagagaaggaagttgtaccggtggggaaactggaaggacgggttaattctgaatatggctggggcc

SEQ ID NO: 108443 - DNA, 2422 bp, Homo sapiens
  Payload ID: 1308
  Gene Symbol: ALOX15
  Gene Name: arachidonate 15-lipoxygenase
  Uniprot ID: P16050
  ENST ID: ENST00000574640
  CDS Start-End: 285-2156
ctgcgtgttttcggtccaaatccttttctttttctccctcccgtcaagatagtggtttccactccctgctctcgccaggacaccgccttttggactggggctgaattctgccccttgaagctctgctccttggagctgggggccccagcggtaggcggagttgattggagacctgccacccacattccgaccccaagcgacctccgagagggcggggtctcaggctgggttatttagctcgtccacccttctccaccagaaggagcgaaacatctttgagcaagatgggtctctaccgcatccgcgtgtccactggggcctcgctctatgccggttccaacaaccaggtgcagctgtggctggtcggccagcacggggaggcggcgctcgggaagcgactgtggcccgcacggggcaagggccccggagccggggacgaggtcaggttcccttgttaccgctgggtggagggcaacggcgtcctgagcctgcctgaaggcaccggccgcactgtgggcgaggaccctcagggcctgttccagaaacaccgggaagaagagctggaagagagaaggaagttgtaccggtggggaaactggaaggacgggttaattctgaatatggctggggccaaactatatgacctccctgtggatgagcgatttctggaagacaagagagttgactttgaggtttcgctggccaaggggctggccgacctcgctatcaaagactctctaaatgttctgacttgctggaaggatctagatgacttcaaccggattttctggtgtggtcagagcaagctggctgagcgcgtgcgggactcctggaaggaagatgccttatttgggtaccagtttcttaatggcgccaaccccgtggtgctgaggcgctctgctcaccttcctgctcgcctagtgttccctccaggcatggaggaactgcaggcccagctggagaaggagctggagggaggcacactgttcgaagctgacttctccctgctggatgggatcaaggccaacgtcattctctgtagccagcagcacctggctgcccctctagtcatgctgaaattgcagcctgatgggaaactcttgcccatggtcatccagctccagctgccccgcacaggatccccaccacctccccttttcttgcctacggatcccccaatggcctggcttctggccaaatgctgggtgcgcagctctgacttccagctccatgagctgcagtctcatcttctgaggggacacttgatggctgaggtcattgttgtggccaccatgaggtgcctgccgtcgatacatcctatcttcaagcttataattccccacctgcgatacaccctggaaattaacgtccgggccaggactgggctggtctctgacatgggaattttcgaccagataatgagcactggtgggggaggccacgtgcagctgctcaagcaagctggagccttcctaacctacagctccttctgtccccctgatgacttggccgaccgggggctcctgggagtgaagtcttccttctatgcccaagatgcgctgcggctctgggaaatcatctatcggtatgtggaaggaatcgtgagtctccactataagacagacgtggctgtgaaagacgacccagagctgcagacctggtgtcgagagatcactgaaatcgggctgcaaggggcccaggaccgagggtttcctgtctctttacaggctcgggaccaggtttgccactttgtcaccatgtgtatcttcacctgcaccggccaacacgcctctgtgcacctgggccagctggactggtactcttgggtgcctaatgcaccctgcacgatgcggctgcccccgccaaccaccaaggatgcaacgctggagacagtgatggcgacactgcccaacttccaccaggcttctctccagatgtccatcacttggcagctgggcagacgccagcccgttatggtggctgtgggccagcatgaggaggagtatttttcgggccctgagcctaaggctgtgctgaagaagttcagggaggagctggctgccctggataaggaaattgagatccggaatgcaaagctggacatgccctacgagtacctgcggcccagcgtggtggaaaacagtgtggccatctaagcgtcgccaccctttggttatttcagcccccatcacccaagccacaagctgaccccttcgtggttatagccctgccctcccaagtcccaccctcttcccatgtcccaccctccctagaggggcaccttttcatggtctctgcacccagtgaacacattttactctagaggcatcacctgggaccttactcctctttccttccttcctcctttcctatcttccttcctctctctcttcctctttcttcattcagatctatatggcaa

SEQ ID NO: 108444 - DNA, 2605 bp, Homo sapiens
  Payload ID: 1309
  Gene Symbol: ALOX15B
  Gene Name: arachidonate 15-lipoxygenase, type B
  Uniprot ID: O15296
  ENST ID: ENST00000380173
  CDS Start-End: 117-2060
gtccactgggcttggagtcagtggcaataaccaggggcaataaccaggcgtgtcccaggggggagccccgctctgcagccctgtgcgccgtagagagctggacttaggctggcagcatggccgagttcagggtcagggtgtccaccggagaagccttcggggctggcacatgggacaaagtgtctgtcagcatcgtggggacccggggagagagccccccactgcccctggacaatctcggcaaggagttcactgcgggcgctgaggaggacttccaggtgacgctcccggaggacgtaggccgagtgctgctgctgcgcgtgcacaaggcgcccccagtgctgcccctgctggggcccctggccccggatgcctggttctgccgctggttccagctgacaccgccgcggggcggccacctcctcttcccctgctaccagtggctggagggggcggggaccctggtgctgcaggagggtacagccaaggtgtcctgggcagaccaccaccctgtgctccagcaacagcgccaggaggagcttcaggcccggcaggagatgtaccagtggaaggcttacaacccaggttggcctcactgcctggatgaaaagacagtggaagacttggagctcaatatcaaatactccacagccaagaatgccaacttttatctacaggctggctctgcttttgcagagatgaaaatcaaggggttgctggaccgcaaggggctctggaggagtctgaatgagatgaaaaggatcttcaacttccggaggaccccagcagctgagcacgcatttgagcactggcaggaggacgccttcttcgcctcccagttcctgaatggtctcaaccctgtcctgatccgccgctgtcactacctcccaaagaacttccccgtcactgatgccatggtggcctcagtgttgggtcctgggaccagcttgcaggctgagctagagaagggctccctgttcttggtggatcacggcatcctctctggcatccagaccaatgtcattaatgggaagcctcagttctctgcggccccaatgaccctgctataccagagcccaggctgcgggccgctgctgcctctcgccatccagctcagccagacccccggcccaaacagccccatcttcctgcccactgatgacaagtgggactggttgctggccaagacctgggtgcgcaatgccgagttctccttccatgaggccctcacgcacctgctgcactcacatctgctgcctgaggtcttcaccctggctaccctgcgtcagctgccccactgccaccctctcttcaagtccacaggcatcggcattgaaggcttctctgagttgatacagaggaacatgaagcagctgaactattctctcctgtgtctgcctgaggatatccggacccgaggagttgaagacatcccaggctactactaccgtgatgatgggatgcagatctggggtgcagtggaacgctttgtctctgaaatcatcggtatctactacccaagtgatgagtctgtccaagatgacagagagctccaggcctgggtcagagagatcttctccaagggcttcctaaaccaggagagctcaggtataccctcctcactggagacccgggaagccctggtgcagtatgtcaccatggtgatattcacctgctccgccaagcatgcggctgtcagtgcagggcagtttgactcctgtgcttggatgcccaacctgccacccagcatgcagctgccaccacccacctccaaaggcctggcaacatgcgagggcttcatagccaccctcccacctgtcaatgccacatgtgatgtcatccttgctctctggttgctgagcaaggagcctggagaccaaaggcccctgggcacctatccggatgagcacttcacagaggaggcccctcggcggagcatcgccaccttccagagccgcctggcccagatctcgaggggcatccaggagcggaaccagggcctggtgctgccctacacctacctagaccctcccctcatcgagaacagcgtctccatctaaatcccaggggaacacaggcccagatgacatccctttgaccacatcgctctaggataactggcacccagagaaaaggactcctcagaaaaaacaggcccccatgtgcctctcctgggacaaccagactctgtaactcacccccaccaccatacacacacacaaaaacagaaacaaaatcaaaacagagaaagcagaaaatctaccaagaacagagtctcaggacagaaccactgagtcttttggaggctccaagcctcaaagtgcccgcagagcccaccttgagggttttgctagttggttttgttttgcgttttacagccgtggggggaagcacataatcccgccccagggcccactagcatccactgattggaccttatggtcacccaactcaaggacagccaccaagaagtggctgccaaagagactgggcgcagtggctcatgcccataatcccagcactttgggagatggaggcgggaaaatcatttgaggtcagaagttcaaggccagcctggacgacatagcgagactccacctctacc

SEQ ID NO: 108445 - DNA, 2739 bp, Homo sapiens
  Payload ID: 1309
  Gene Symbol: ALOX15B
  Gene Name: arachidonate 15-lipoxygenase, type B
  Uniprot ID: O15296
  ENST ID: ENST00000380183
  CDS Start-End: 140-2170
aaacggacgtgctttttagaggagtccactgggcttggagtcagtggcaataaccaggggcaataaccaggcgtgtcccaggggggagccccgctctgcagccctgtgcgccgtagagagctggacttaggctggcagcatggccgagttcagggtcagggtgtccaccggagaagccttcggggctggcacatgggacaaagtgtctgtcagcatcgtggggacccggggagagagccccccactgcccctggacaatctcggcaaggagttcactgcgggcgctgaggaggacttccaggtgacgctcccggaggacgtaggccgagtgctgctgctgcgcgtgcacaaggcgcccccagtgctgcccctgctggggcccctggccccggatgcctggttctgccgctggttccagctgacaccgccgcggggcggccacctcctcttcccctgctaccagtggctggagggggcggggaccctggtgctgcaggagggtacagccaaggtgtcctgggcagaccaccaccctgtgctccagcaacagcgccaggaggagcttcaggcccggcaggagatgtaccagtggaaggcttacaacccaggttggcctcactgcctggatgaaaagacagtggaagacttggagctcaatatcaaatactccacagccaagaatgccaacttttatctacaggctggctctgcttttgcagagatgaaaatcaaggggttgctggaccgcaaggggctctggaggagtctgaatgagatgaaaaggatcttcaacttccggaggaccccagcagctgagcacgcatttgagcactggcaggaggacgccttcttcgcctcccagttcctgaatggtctcaaccctgtcctgatccgccgctgtcactacctcccaaagaacttccccgtcactgatgccatggtggcctcagtgttgggtcctgggaccagcttgcaggctgagctagagaagggctccctgttcttggtggatcacggcatcctctctggcatccagaccaatgtcattaatgggaagcctcagttctctgcggccccaatgaccctgctataccagagcccaggctgcgggccgctgctgcctctcgccatccagctcagccagacccccggcccaaacagccccatcttcctgcccactgatgacaagtgggactggttgctggccaagacctgggtgcgcaatgccgagttctccttccatgaggccctcacgcacctgctgcactcacatctgctgcctgaggtcttcaccctggctaccctgcgtcagctgccccactgccaccctctcttcaagctgctgatcccgcacacccgatacaccctgcacatcaacacactcgcccgggagctgcttatcgtgccagggcaggtggtggacaggtccacaggcatcggcattgaaggcttctctgagttgatacagaggaacatgaagcagctgaactattctctcctgtgtctgcctgaggatatccggacccgaggagttgaagacatcccaggctactactaccgtgatgatgggatgcagatctggggtgcagtggaacgctttgtctctgaaatcatcggtatctactacccaagtgatgagtctgtccaagatgacagagagctccaggcctgggtcagagagatcttctccaagggcttcctaaaccaggagagctcaggtataccctcctcactggagacccgggaagccctggtgcagtatgtcaccatggtgatattcacctgctccgccaagcatgcggctgtcagtgcagggcagtttgactcctgtgcttggatgcccaacctgccacccagcatgcagctgccaccacccacctccaaaggcctggcaacatgcgagggcttcatagccaccctcccacctgtcaatgccacatgtgatgtcatccttgctctctggttgctgagcaaggagcctggagaccaaaggcccctgggcacctatccggatgagcacttcacagaggaggcccctcggcggagcatcgccaccttccagagccgcctggcccagatctcgaggggcatccaggagcggaaccagggcctggtgctgccctacacctacctagaccctcccctcatcgagaacagcgtctccatctaaatcccaggggaacacaggcccagatgacatccctttgaccacatcgctctaggataactggcacccagagaaaaggactcctcagaaaaaacaggcccccatgtgcctctcctgggacaaccagactctgtaactcacccccaccaccatacacacacacaaaaacagaaacaaaatcaaaacagagaaagcagaaaatctaccaagaacagagtctcaggacagaaccactgagtcttttggaggctccaagcctcaaagtgcccgcagagcccaccttgagggttttgctagttggttttgttttgcgttttacagccgtggggggaagcacataatcccgccccagggcccactagcatccactgattggaccttatggtcacccaactcaaggacagccaccaagaagtggctgccaaagagactgggcgcagtggctcatgcccataatcccagcactttgggagatggaggcgggaaaatcatttgaggtcagaagttcaaggccagcctggacgacatagcgagactccacctctaccaaaaaataaaaattaaaaaacaaa

SEQ ID NO: 108446 - DNA, 2396 bp, Homo sapiens
  Payload ID: 1309
  Gene Symbol: ALOX15B
  Gene Name: arachidonate 15-lipoxygenase, type B
  ENST ID: ENST00000572022
  CDS Start-End: 123-2117
agaggagtccactgggcttggagtcagtggcaataaccaggggcaataaccaggcgtgtcccaggggggagccccgctctgcagccctgtgcgccgtagagagctggacttaggctggcagcatggccgagttcagggtcagggtgtccaccggagaagccttcggggctggcacatgggacaaagtgtctgtcagcatcgtggggacccggggagagagccccccactgcccctggacaatctcggcaaggagttcactgcgggcgctgaggaggacttccaggtgacgctcccggaggacgtaggccgagtgctgctgctgcgcgtgcacaaggcgcccccagtgctgcccctgctggggcccctggccccggatgcctggttctgccgctggttccagctgacaccgccgcggggcggccacctcctcttcccctgctaccagtggctggagggggcggggaccctggtgctgcaggagggtacagccaaggtgtcctgggcagaccaccaccctgtgctccagcaacagcgccaggaggagcttcaggcccggcaggagatgtaccagtggaaggcttacaacccaggttggcctcactgcctggatgaaaagacagtggaagacttggagctcaatatcaaatactccacagccaagaatgccaacttttatctacaggctggctctgcttttgcagagatgaaaatcaaggggttgctggaccgcaaggggctctggaggagtctgaatgagatgaaaaggatcttcaacttccggaggaccccagcagctgagcacgcatttgagcactggcaggaggacgccttcttcgcctcccagttcctgaatggtctcaaccctgtcctgatccgccgctgtcactacctcccaaagaacttccccgtcactgatgccatggtggcctcagtgttgggtcctgggaccagcttgcaggctgagctagagaagggctccctgttcttggtggatcacggcatcctctctggcatccagaccaatgtcattaatgggaagcctcagttctctgcggccccaatgaccctgctataccagagcccaggctgcgggccgctgctgcctctcgccatccagctcagccagacccccggcccaaacagccccatcttcctgcccactgatgacaagtgggactggttgctggccaagacctgggtgcgcaatgccgagttctccttccatgaggccctcacgcacctgctgcactcacatctgctgcctgaggtcttcaccctggctaccctgcgtcagctgccccactgccaccctctcttcaagctgctgatcccgcacacccgatacaccctgcacatcaacacactcgcccgggagctgcttatcgtgccagggcaggtggtggacaggtccacaggcatcggcattgaaggcttctctgagttgatacagaggaacatgaagcagctgaactattctctcctgtgtctgcctgaggatatccggacccgaggagttgaagacatcccaggctactactaccgtgatgatgggatgcagatctggggtgcagtggaacgtgatgagtctgtccaagatgacagagagctccaggcctgggtcagagagatcttctccaagggcttcctaaaccaggagagctcaggtataccctcctcactggagacccgggaagccctggtgcagtatgtcaccatggtgatattcacctgctccgccaagcatgcggctgtcagtgcagggcagtttgactcctgtgcttggatgcccaacctgccacccagcatgcagctgccaccacccacctccaaaggcctggcaacatgcgagggcttcatagccaccctcccacctgtcaatgccacatgtgatgtcatccttgctctctggttgctgagcaaggagcctggagaccaaaggcccctgggcacctatccggatgagcacttcacagaggaggcccctcggcggagcatcgccaccttccagagccgcctggcccagatctcgaggggcatccaggagcggaaccagggcctggtgctgccctacacctacctagaccctcccctcatcgagaacagcgtctccatctaaatcccaggggaacacaggcccagatgacatccctttgaccacatcgctctaggataactggcacccagagaaaaggactcctcagaaaaaacaggcccccatgtgcctctcctgggacaaccagactctgtaactcacccccaccaccatacacacacacaaaaacagaaacaaaatcaaaacagagaaagcagaaaatctaccaagaacagagtctcaggacagaaccactgagtcttttggaggctccaagcctcaaagtgcccgcagagcccacct

SEQ ID NO: 108447 - DNA, 1809 bp, Homo sapiens
  Payload ID: 1309
  Gene Symbol: ALOX15B
  Gene Name: arachidonate 15-lipoxygenase, type B
  Uniprot ID: O15296
  ENST ID: ENST00000573359
  CDS Start-End: 1-1809
atggccgagttcagggtcagggtgtccaccggagaagccttcggggctggcacatgggacaaagtgtctgtcagcatcgtggggacccggggagagagccccccactgcccctggacaatctcggcaaggagttcactgcgggcgctgaggaggacttccaggtgacgctcccggaggacgtaggccgagtgctgctgctgcgcgtgcacaaggcgcccccagtgctgcccctgctggggcccctggccccggatgcctggttctgccgctggttccagctgacaccgccgcggggcggccacctcctcttcccctgctaccagtggctggagggggcggggaccctggtgctgcaggagggtacagccaaggtgtcctgggcagaccaccaccctgtgctccagcaacagcgccaggaggagcttcaggcccggcaggagatgtaccagtggaaggcttacaacccaggttggcctcactgcctggatgaaaagacagtggaagacttggagctcaatatcaaatactccacagccaagaatgccaacttttatctacaggctggctctgcttttgcagagatgaaaatcaaggggttgctggaccgcaaggggctctggaggagtctgaatgagatgaaaaggatcttcaacttccggaggaccccagcagctgagcacgcatttgagcactggcaggaggacgccttcttcgcctcccagttcctgaatggtctcaaccctgtcctgatccgccgctgtcactacctcccaaagaacttccccgtcactgatgccatggtggcctcagtgttgggtcctgggaccagcttgcaggctgagctagagaagggctccctgttcttggtggatcacggcatcctctctggcatccagaccaatgtcattaatgggaagcctcagttctctgcggccccaatgaccctgctataccagagcccaggctgcgggccgctgctgcctctcgccatccagctcagccagacccccggcccaaacagccccatcttcctgcccactgatgacaagtgggactggttgctggccaagacctgggtgcgcaatgccgagttctccttccatgaggccctcacgcacctgctgcactcacatctgctgcctgaggtcttcaccctggctaccctgcgtcagctgccccactgccaccctctcttcaagtccacaggcatcggcattgaaggcttctctgagttgatacagaggaacatgaagcagctgaactattctctcctgtgtctgcctgaggatatccggacccgaggagttgaagacatcccaggctactactaccgtgatgatgggatgcagatctggggtataccctcctcactggagacccgggaagccctggtgcagtatgtcaccatggtgatattcacctgctccgccaagcatgcggctgtcagtgcagggcagtttgactcctgtgcttggatgcccaacctgccacccagcatgcagctgccaccacccacctccaaaggcctggcaacatgcgagggcttcatagccaccctcccacctgtcaatgccacatgtgatgtcatccttgctctctggttgctgagcaaggagcctggagaccaaaggcccctgggcacctatccggatgagcacttcacagaggaggcccctcggcggagcatcgccaccttccagagccgcctggcccagatctcgaggggcatccaggagcggaaccagggcctggtgctgccctacacctacctagaccctcccctcatcgagaacagcgtctccatctaa

SEQ ID NO: 108448 - DNA, 2506 bp, Homo sapiens
  Payload ID: 1310
  Gene Symbol: ALOX5
  Gene Name: arachidonate 5-lipoxygenase
  Uniprot ID: P09917
  ENST ID: ENST00000374391
  CDS Start-End: 54-2078
cctggaccgccgcgccgaggctcccggcgctcgctgctcccgcggcccgcgccatgccctcctacacggtcaccgtggccactggcagccagtggttcgccggcactgacgactacatctacctcagcctcgtgggctcggcgggctgcagcgagaagcacctgctggacaagcccttctacaacgacttcgagcgtggcgcggtggattcatacgacgtgactgtggacgaggaactgggcgagatccagctggtcagaatcgagaagcgcaagtactggctgaatgacgactggtacctgaagtacatcacgctgaagacgccccacggggactacatcgagttcccctgctaccgctggatcaccggcgatgtcgaggttgtcctgagggatggacgcgcaaagttggcccgagatgaccaaattcacattctcaagcaacaccgacgtaaagaactggaaacacggcaaaaacaatatcgatggatggagtggaaccctggcttccccttgagcatcgatgccaaatgccacaaggatttaccccgtgatatccagtttgatagtgaaaaaggagtggactttgttctgaattactccaaagcgatggagaacctgttcatcaaccgcttcatgcacatgttccagtcttcttggaatgacttcgccgactttgagaaaatctttgtcaagatcagcaacactatttctgagcgggtcatgaatcactggcaggaagacctgatgtttggctaccagttcctgaatggctgcaaccctgtgttgatccggcgctgcacagagctgcccgagaagctcccggtgaccacggagatggtagagtgcagcctggagcggcagctcagcttggagcaggaggtccagcaagggaacattttcatcgtggactttgagctgctggatggcatcgatgccaacaaaacagacccctgcacactccagttcctggccgctcccatctgcttgctgtataagaacctggccaacaagattgtccccattgccatccagctcaaccaaatcccgggagatgagaaccctattttcctcccttcggatgcaaaatacgactggcttttggccaaaatctgggtgcgttccagtgacttccacgtccaccagaccatcacccaccttctgcgaacacatctggtgtctgaggtttttggcattgcaatgtaccgccagctgcctgctgtgcaccccattttcaagctgctggtggcacacgtgagattcaccattgcaatcaacaccaaggcccgtgagcagctcatctgcgagtgtggcctctttgacaaggccaacgccacagggggcggtgggcacgtgcagatggtgcagagggccatgaaggacctgacctatgcctccctgtgctttcccgaggccatcaaggcccggggcatggagagcaaagaagacatcccctactacttctaccgggacgacgggctcctggtgtgggaagccatcaggacgttcacggccgaggtggtagacatctactacgagggcgaccaggtggtggaggaggacccggagctgcaggacttcgtgaacgatgtctacgtgtacggcatgcggggccgcaagtcctcaggcttccccaagtcggtcaagagccgggagcagctgtcggagtacctgaccgtggtgatcttcaccgcctccgcccagcacgccgcggtcaacttcggccagtacgactggtgctcctggatccccaatgcgcccccaaccatgcgagccccgccaccgactgccaagggcgtggtgaccattgagcagatcgtggacacgctgcccgaccgcggccgctcctgctggcatctgggtgcagtgtgggcgctgagccagttccaggaaaacgagctgttcctgggcatgtacccagaagagcattttatcgagaagcctgtgaaggaagccatggcccgattccgcaagaacctcgaggccattgtcagcgtgattgctgagcgcaacaagaagaagcagctgccatattactacttgtccccagaccggattccgaacagtgtggccatctgagcacactgccagtctcactgtgggaaggccagctgccccagccagatggactccagcctgcctggcaggctgtctggccaggcctcttggcagtcacatctcttcctccgaggccagtacctttccatttattctttgatcttcagggaactgcatagattgatcaaagtgtaaacaccatagggacccattctacacagagcaggactgcacagcgtcctgtccacacccagctcagcatttccacaccaagcagcaacagcaaatcacgaccactgatagatgtctattcttgttggagacatgggatgattattttctgttctatttgtgcttagtccaattccttgcacatagtaggtacccaattcaattactattgaatgaattaagaattggttgccataaaaataaatcagttcatttaa

SEQ ID NO: 108449 - DNA, 2390 bp, Homo sapiens
  Payload ID: 1310
  Gene Symbol: ALOX5
  Gene Name: arachidonate 5-lipoxygenase
  Uniprot ID: P09917
  ENST ID: ENST00000542434
  CDS Start-End: 105-1958
ccggggccagggaccagtggtgggaggaggctgcggcgctagatgcggacacctggaccgccgcgccgaggctcccggcgctcgctgctcccgcggcccgcgccatgccctcctacacggtcaccgtggccactggcagccagtggttcgccggcactgacgactacatctacctcagcctcgtgggctcggcgggctgcagcgagaagcacctgctggacaagcccttctacaacgacttcgagcgtggcgcggtggattcatacgacgtgactgtggacgaggaactgggcgagatccagctggtcagaatcgagaagcgcaagtactggctgaatgacgactggtacctgaagtacatcacgctgaagacgccccacggggactacatcgagttcccctgctaccgctggatcaccggcgatgtcgaggttgtcctgagggatggacgcgcaaagttggcccgagatgaccaaattcacattctcaagcaacaccgacgtaaagaactggaaacacggcaaaaacaatatcgatggatggagtggaaccctggcttccccttgagcatcgatgccaaatgccacaaggatttaccccgtgatatccagtttgatagtgaaaaaggagtggactttgttctgaattactccaaagcgatggagaacctgttcatcaaccgcttcatgcacatgttccagtcttcttggaatgacttcgccgactttgagaaaatctttgtcaagatcagcaacactatttctgagcgggtcatgaatcactggcaggaagacctgatgtttggctaccagttcctgaatggctgcaaccctgtgttgatccggcgctgcacagagctgcccgagaagctcccggtgaccacggagatggtagagtgcagcctggagcggcagctcagcttggagcaggaggtccagcaagggaacattttcatcgtggactttgagctgctggatggcatcgatgccaacaaaacagacccctgcacactccagttcctggccgctcccatctgcttgctgtataagaacctggccaacaagattgtccccattgccatccagctcaaccaaatcccgggagatgagaaccctattttcctcccttcggatgcaaaatacgactggcttttggccaaaatctgggtgcgttccagtgacttccacgtccaccagaccatcacccaccttctgcgaacacatctggtgtctgaggtttttggcattgcaatgtaccgccagctgcctgctgtgcaccccattttcaagctgctggtggcacacgtgagattcaccattgcaatcaacaccaaggcccgtgagcagctcatctgcgagtgtggcctctttgacaaggccaacgccacagggggcggtgggcacgtgcagatggtgcagagggccatgaaggacctgacctatgcctccctgtgctttcccgaggccatcaaggcccggggcatggagagcaaagaagacatcccctactacttctaccgggacgacgggctcctggtgtgggaagccatcaggacgttcacggccgaggtggtagacatctactacgagggcgaccaggtggtggaggaggacccggagctgcaggacttcgtgaacgatgtctacgtgtacggcatgcggggccgcaagtcctcaggcttccccaagtcggtcaagagccgggagcagctgtcggagtacctgaccgtggtgatcttcaccgcctccgcccagcacgccgcggtcaacttcggccagctgttcctgggcatgtacccagaagagcattttatcgagaagcctgtgaaggaagccatggcccgattccgcaagaacctcgaggccattgtcagcgtgattgctgagcgcaacaagaagaagcagctgccatattactacttgtccccagaccggattccgaacagtgtggccatctgagcacactgccagtctcactgtgggaaggccagctgccccagccagatggactccagcctgcctggcaggctgtctggccaggcctcttggcagtcacatctcttcctccgaggccagtacctttccatttattctttgatcttcagggaactgcatagattgatcaaagtgtaaacaccatagggacccattctacacagagcaggactgcacagcgtcctgtccacacccagctcagcatttccacaccaagcagcaacagcaaatcacgaccactgatagatgtctattcttgttggagacatgggatgattattttctgttctatttgtgcttagtccaattccttgcacatagtaggtacccaattcaattactattgaatgaattaagaattggttgccataaaaataaatcagttcatttaaaatg

SEQ ID NO: 108450 - DNA, 1945 bp, Homo sapiens
  Payload ID: 1310
  Gene Symbol: ALOX5
  Gene Name: arachidonate 5-lipoxygenase
  ENST ID: ENST00000622238
  CDS Start-End: 1-420
atgccctcctacacggtcaccgtggccactggcagccagtggttcgccggcactgacgactacatctacctcagcctcgtgggctcggcgggctgcagcgagaagcacctgctggacaagcccttctacaacgacttcgagcgtggcgcggtggattcatacgacgtgactgtggacgaggaactgggcgagatccagctggtcagaatcgagaagcgcaagtactggctgaatgacgactggtacctgaagtacatcacgctgaagacgccccacggggactacatcgagttcccctgctaccgctggatcaccggcgatgtcgaggttgtcctgagggatggacgcgagatggatggagtggaaccctggcttccccttgagcatcgatgccaaatgccacaaggatttaccccgtgatatccagtttgatagtgaaaaaggagtggactttgttctgaattactccaaagcgatggagaacctgttcatcaaccgcttcatgcacatgttccagtcttcttggaatgacttcgccgactttgagaaaatctttgtcaagatcagcaacactatttctgagcgggtcatgaatcactggcaggaagacctgatgtttggctaccagttcctgaatggctgcaaccctgtgttgatccggcgctgcacagagctgcccgagaagctcccggtgaccacggagatggtagagtgcagcctggagcggcagctcagcttggagcaggaggtccagcaagggaacattttcatcgtggactttgagctgctggatggcatcgatgccaacaaaacagacccctgcacactccagttcctggccgctcccatctgcttgctgtataagaacctggccaacaagattgtccccattgccatccagctcaaccaaatcccgggagatgagaaccctattttcctcccttcggatgcaaaatacgactggcttttggccaaaatctgggtgcgttccagtgacttccacgtccaccagaccatcacccaccttctgcgaacacatctggtgtctgaggtttttggcattgcaatgtaccgccagctgcctgctgtgcaccccattttcaagctgctggtggcacacgtgagattcaccattgcaatcaacaccaaggcccgtgagcagctcatctgcgagtgtggcctctttgacaaggccaacgccacagggggcggtgggcacgtgcagatggtgcagagggccatgaaggacctgacctatgcctccctgtgctttcccgaggccatcaaggcccggggcatggagagcaaagaagacatcccctactacttctaccgggacgacgggctcctggtgtgggaagccatcaggacgttcacggccgaggtggtagacatctactacgagggcgaccaggtggtggaggaggacccggagctgcaggacttcgtgaacgatgtctacgtgtacggcatgcggggccgcaagtcctcaggcttccccaagtcggtcaagagccgggagcagctgtcggagtacctgaccgtggtgatcttcaccgcctccgcccagcacgccgcggtcaacttcggccagtacgactggtgctcctggatccccaatgcgcccccaaccatgcgagccccgccaccgactgccaagggcgtggtgaccattgagcagatcgtggacacgctgcccgaccgcggccgctcctgctggcatctgggtgcagtgtgggcgctgagccagttccaggaaaacgagctgttcctgggcatgtacccagaagagcattttatcgagaagcctgtgaaggaagccatggcccgattccgcaagaacctcgaggccattgtcagcgtgattgctgagcgcaacaagaagaagcagctgccatattactacttgtccccagaccggattccgaacagtgtggccatctga

SEQ ID NO: 108451 - DNA, 2390 bp, Homo sapiens; identical to SEQ ID NO: 108449
  Payload ID: 1310
  Gene Symbol: ALOX5
  Gene Name: arachidonate 5-lipoxygenase
  Uniprot ID: P09917
  ENST ID: ENST00000622021
  CDS Start-End: 105-1958

SEQ ID NO: 108452 - DNA, 1945 bp, Homo sapiens; identical to SEQ ID NO: 108450
  Payload ID: 1310
  Gene Symbol: ALOX5
  Gene Name: arachidonate 5-lipoxygenase
  ENST ID: ENST00000612635
  CDS Start-End: 1-420

SEQ ID NO: 108453 - DNA, 2504 bp, Homo sapiens
  Payload ID: 1310
  Gene Symbol: ALOX5
  Gene Name: arachidonate 5-lipoxygenase
  Uniprot ID: P09917
  ENST ID: ENST00000610656
  CDS Start-End: 54-2078
cctggaccgccgcgccgaggctcccggcgctcgctgctcccgcggcccgcgccatgccctcctacacggtcaccgtggccactggcagccagtggttcgccggcactgacgactacatctacctcagcctcgtgggctcggcgggctgcagcgagaagcacctgctggacaagcccttctacaacgacttcgagcgtggcgcggtggattcatacgacgtgactgtggacgaggaactgggcgagatccagctggtcagaatcgagaagcgcaagtactggctgaatgacgactggtacctgaagtacatcacgctgaagacgccccacggggactacatcgagttcccctgctaccgctggatcaccggcgatgtcgaggttgtcctgagggatggacgcgcaaagttggcccgagatgaccaaattcacattctcaagcaacaccgacgtaaagaactggaaacacggcaaaaacaatatcgatggatggagtggaaccctggcttccccttgagcatcgatgccaaatgccacaaggatttaccccgtgatatccagtttgatagtgaaaaaggagtggactttgttctgaattactccaaagcgatggagaacctgttcatcaaccgcttcatgcacatgttccagtcttcttggaatgacttcgccgactttgagaaaatctttgtcaagatcagcaacactatttctgagcgggtcatgaatcactggcaggaagacctgatgtttggctaccagttcctgaatggctgcaaccctgtgttgatccggcgctgcacagagctgcccgagaagctcccggtgaccacggagatggtagagtgcagcctggagcggcagctcagcttggagcaggaggtccagcaagggaacattttcatcgtggactttgagctgctggatggcatcgatgccaacaaaacagacccctgcacactccagttcctggccgctcccatctgcttgctgtataagaacctggccaacaagattgtccccattgccatccagctcaaccaaatcccgggagatgagaaccctattttcctcccttcggatgcaaaatacgactggcttttggccaaaatctgggtgcgttccagtgacttccacgtccaccagaccatcacccaccttctgcgaacacatctggtgtctgaggtttttggcattgcaatgtaccgccagctgcctgctgtgcaccccattttcaagctgctggtggcacacgtgagattcaccattgcaatcaacaccaaggcccgtgagcagctcatctgcgagtgtggcctctttgacaaggccaacgccacagggggcggtgggcacgtgcagatggtgcagagggccatgaaggacctgacctatgcctccctgtgctttcccgaggccatcaaggcccggggcatggagagcaaagaagacatcccctactacttctaccgggacgacgggctcctggtgtgggaagccatcaggacgttcacggccgaggtggtagacatctactacgagggcgaccaggtggtggaggaggacccggagctgcaggacttcgtgaacgatgtctacgtgtacggcatgcggggccgcaagtcctcaggcttccccaagtcggtcaagagccgggagcagctgtcggagtacctgaccgtggtgatcttcaccgcctccgcccagcacgccgcggtcaacttcggccagtacgactggtgctcctggatccccaatgcgcccccaaccatgcgagccccgccaccgactgccaagggcgtggtgaccattgagcagatcgtggacacgctgcccgaccgcggccgctcctgctggcatctgggtgcagtgtgggcgctgagccagttccaggaaaacgagctgttcctgggcatgtacccagaagagcattttatcgagaagcctgtgaaggaagccatggcccgattccgcaagaacctcgaggccattgtcagcgtgattgctgagcgcaacaagaagaagcagctgccatattactacttgtccccagaccggattccgaacagtgtggccatctgagcacactgccagtctcactgtgggaaggccagctgccccagccagatggactccagcctgcctggcaggctgtctggccaggcctcttggcagtcacatctcttcctccgaggccagtacctttccatttattctttgatcttcagggaactgcatagattgatcaaagtgtaaacaccatagggacccattctacacagagcaggactgcacagcgtcctgtccacacccagctcagcatttccacaccaagcagcaacagcaaatcacgaccactgatagatgtctattcttgttggagacatgggatgattattttctgttctatttgtgcttagtccaattccttgcacatagtaggtacccaattcaattactattgaatgaattaagaattggttgccataaaaataaatcagttcattt

SEQ ID NO: 108454 - DNA, 904 bp, Homo sapiens
  Payload ID: 1311
  Gene Symbol: ALOX5AP
  Gene Name: arachidonate 5-lipoxygenase-activating protein
  Uniprot ID: P20292
  ENST ID: ENST00000380490
  CDS Start-End: 99-584
aatgatgaaagagtgcaagctctcacttccccttcctgtacagggcaggttgtgcagctggaggcagagcagtcctctctggggagcctgaagcaaacatggatcaagaaactgtaggcaatgttgtcctgttggccatcgtcaccctcatcagcgtggtccagaatggattctttgcccataaagtggagcacgaaagcaggacccagaatgggaggagcttccagaggaccggaacacttgcctttgagcgggtctacactgccaaccagaactgtgtagatgcgtaccccactttcctcgctgtgctctggtctgcggggctactttgcagccaagttcctgctgcgtttgctggactgatgtacttgtttgtgaggcaaaagtactttgtcggttacctaggagagagaacgcagagcacccctggctacatatttgggaaacgcatcatactcttcctgttcctcatgtccgttgctggcatattcaactattacctcatcttctttttcggaagtgactttgaaaactacataaagacgatctccaccaccatctcccctctacttctcattccctaactctctgctgaatatggggttggtgttctcatctaatcaatacctacaagtcatcataattcagctcttgagagcattctgctcttctttagatggctgtaaatctattggccatctgggcttcacagcttgagttaaccttgcttttccgggaacaaaatgatgtcatgtcagctccgccccttgaacatgaccgtggccccaaatttgctattcccatgcattttgtttgtttcttcacttatcctgttctctgaagatgttttgtgaccaggtttgtgttttcttaaaataaaatgcagagacatgttttaagctga

SEQ ID NO: 108455 - DNA, 1224 bp, Homo sapiens
  Payload ID: 1311
  Gene Symbol: ALOX5AP
  Gene Name: arachidonate 5-lipoxygenase-activating protein
  ENST ID: ENST00000617770
  CDS Start-End: 249-905
tcctattatctgggcatttggaggtgaaggggtcacagctctggcaaagatggggttgaaagggcccggactccagggaggggcagctctgcatggcctgattcctgcaccccacctttgccccctcacacctcctctcatctcccgtttttgaagaggaggaccctgtcacatctggacaattctgcaagaactctgtagaactgacttcactgtgaaccaggctccagaagtcaacagaaacaaaaatgctcacatttaatcacgatgctccctggcatacacagaagactctgaaaacttctgaatttgggaaatcctttggcaccttggggcacattgggaacataagccatcagtgctgggcaggttgtgcagctggaggcagagcagtcctctctggggagcctgaagcaaacatggatcaagaaactgtaggcaatgttgtcctgttggccatcgtcaccctcatcagcgtggtccagaatggattctttgcccataaagtggagcacgaaagcaggacccagaatgggaggagcttccagaggaccggaacacttgcctttgagcgggtctacactgccaaccagaactgtgtagatgcgtaccccactttcctcgctgtgctctggtctgcggggctactttgcagccaagttcctgctgcgtttgctggactgatgtacttgtttgtgaggcaaaagtactttgtcggttacctaggagagagaacgcagagcacccctggctacatatttgggaaacgcatcatactcttcctgttcctcatgtccgttgctggcatattcaactattacctcatcttctttttcggaagtgactttgaaaactacataaagacgatctccaccaccatctcccctctacttctcattccctaactctctgctgaatatggggttggtgttctcatctaatcaatacctacaagtcatcataattcagctcttgagagcattctgctcttctttagatggctgtaaatctattggccatctgggcttcacagcttgagttaaccttgcttttccgggaacaaaatgatgtcatgtcagctccgccccttgaacatgaccgtggccccaaatttgctattcccatgcattttgtttgtttcttcacttatcctgttctctgaagatgttttgtgaccaggtttgtgttttcttaaaataaaatgcagagacatgttttaagctg

SEQ ID NO: 108456 - DNA, 3053 bp, Homo sapiens
  Payload ID: 1312
  Gene Symbol: ALOXE3
  Gene Name: arachidonate lipoxygenase 3
  Uniprot ID: Q9BYJ1
  ENST ID: ENST00000318227
  CDS Start-End: 270-2801
acagatttggaagcagcgggtgaagctcgcctgctgctgattgagctttttctgcctcccgttcttagagcccccgccgaggctgcgacgcagggactgtaccatagtagaggctggaacagtgcggcgccggaaccggccgcgcggggccgctgcgggctatgggcttctctgagaggttcctccccagtccctagtggcccagatcccggacacctgggctcccgcccaggatcctgcaggcccagggcggtcctggagcggaaagaatgccacgcggggcattcagaccctgtttgccggcgctgtatttcgctttcctgacctgccctactccagagcagagaatgagtggaacccaggctcctgatatccatctgggtgagccagccagagggaccggctgtgtcagaggcaagcaaacaagtattagagtgcaagactgtgggcggagagaggaagcccgagccgccagcagggagcttcggagagagaaagcccaggaacatcccagagagagctgggcccatcctcagccctacccagccccgcagcccctagccctccgcccagaaacccagccctgtccggcgtgccgctcttctcctccaggccggctgctgctgcggccagcgttgccggggcatcccttcctccttcccatcatggcagtgtaccgcctgtgtgtgaccactggtccctacctgagggccggcacactggacaacatctctgtcacactggtgggcacgtgtggtgaaagccccaagcagcggctagatcgaatgggcagggacttcgcccctggatcggtacagaagtacaaggtgcgttgcacagcggagctgggtgagctcttgctgctgcgtgtacacaaggagcgctacgctttcttccgcaaggactcttggtactgtagccgcatctgtgtcaccgaaccggatggtagtgtatcccacttcccctgctatcagtggattgaaggctactgcaccgtggagctgaggccaggaacagcaagaactatttgtcaggactctcttcccctcctcctggatcacaggacacgggagctccgggcccgacaagaatgctaccgctggaagatctatgcccctggcttcccctgcatggtagacgtcaacagctttcaggagatggagtcagacaagaaatttgccttgacaaagacgacaacttgtgtagaccagggtgacagcagtgggaatcggtacctgcccggcttccccatgaaaattgacatcccatccctgatgtacatggagcccaatgttcgatactcagccaccaagacgatctcgctgctcttcaatgccatccctgcgtccttgggaatgaagcttcgagggctgttggatcgcaagggctcctggaagaagctggatgacatgcagaacatcttctggtgccataagaccttcacgacaaagtatgtcacagagcactggtgtgaagatcacttctttgggtaccagtacctgaatggtgtcaatcccgtcatgctccactgcatctctagcttgcccagcaagctgcctgtcaccaatgacatggtggcccccttgctgggacaggacacatgcctgcagacagagctagagagggggaacatcttcctagcggactactggatcctggcggaggcccccacccactgcctaaacggccgccagcagtacgtggccgccccactgtgcctgctgtggctcagcccccagggggcgctggtgcccttggccatccagctcagccagacccccgggcctgacagccccatcttcctgcccactgactccgaatgggactggctgctggccaagacgtgggtgcgcaactctgagttcctggtgcacgaaaacaacacgcactttctgtgcacgcatttgctgtgcgaggccttcgccatggccacgctgcgccagctgccgctctgccaccccatctacaagctcctactcccccacactcgatacacgctgcaggtgaacaccatcgcgagggccacgctgctcaaccccgagggcctcgtggaccaggtcacgtccatcgggaggcaaggcctcatctacctcatgagcacgggcctggcccacttcacctacaccaatttctgccttccggacagcctgcgggcccgcggcgtcctggctatccccaactaccactaccgagacgacggcctgaagatctgggcggccattgagagctttgtctcagaaatcgtgggctactattatcccagtgacgcatctgtgcagcaggattcggagctgcaggcctggactggcgagatttttgctcaggcgttcctgggccgggaaagctcaggtttcccaagccggctgtgcaccccaggagagatggtgaagttcctcactgcaatcatcttcaattgctctgcccagcacgctgctgtcaacagtgggcagcatgactttggggcctggatgcccaatgctccatcatccatgaggcagcccccaccccagaccaaggggaccaccaccctgaagacttacctagacaccctccctgaagtgaacatcagctgtaacaacctcctcctcttctggttggttagccaagaacccaaggaccagaggcccctgggcacctacccagatgagcacttcacagaggaggccccgaggcggagcatcgccgccttccagagccgcctggcccagatctcaagggacatccaggagcggaaccagggtctggcactgccctacacctacctggaccctcccctcattgagaacagcgtctccatctaaccacccccaaataccacccaagaagaaagaaaggtccaagcatgaggaggaccagttcctcaggtcctccagacccttccatcctccctgttctcagttcacctgaaccttctcttctgcacatggagacttttgcagccaagatggctctgacatcatacaaactgggccctgagctgtgagagaccagcacagcagcgtccaggttaaaagccgctgaccaaagtccaatgcacaatagcccctccgaaa

SEQ ID NO: 108457 - DNA, 3362 bp, Homo sapiens
  Payload ID: 1312
  Gene Symbol: ALOXE3
  Gene Name: arachidonate lipoxygenase 3
  ENST ID: ENST00000380149
  CDS Start-End: 32-2635
gcaggtgccctgtgctcatctctgcctgggaatggggaggaacagatcttgggggacattggggagtgggcggacaagcactccagggcatcagtccgggccgctgaccaggcggagggcagtgtcccaattatacaggcgttacctccttttctccatctcagcatctgatccctccctccgcagtggaacccaggctcctgatatccatctgggtgagccagccagagggaccggctgtgtcagaggcaagcaaacaagtattagagtgcaagactgtgggcggagagaggaagcccgagccgccagcagggagcttcggagagagaaagcccaggaacatcccagagagagctgggcccatcctcagccctacccagccccgcagcccctagccctccgcccagaaacccagccctgtccggcgtgccgctcttctcctccaggccggctgctgctgcggccagcgttgccggggcatcccttcctccttcccatcatggcagtgtaccgcctgtgtgtgaccactggtccctacctgagggccggcacactggacaacatctctgtcacactggtgggcacgtgtggtgaaagccccaagcagcggctagatcgaatgggcagggacttcgcccctggatcggtacagaagtacaaggtgcgttgcacagcggagctgggtgagctcttgctgctgcgtgtacacaaggagcgctacgctttcttccgcaaggactcttggtactgtagccgcatctgtgtcaccgaaccggatggtagtgtatcccacttcccctgctatcagtggattgaaggctactgcaccgtggagctgaggccaggaacagcaagaactatttgtcaggactctcttcccctcctcctggatcacaggacacgggagctccgggcccgacaagaatgctaccgctggaagatctatgcccctggcttcccctgcatggtagacgtcaacagctttcaggagatggagtcagacaagaaatttgccttgacaaagacgacaacttgtgtagaccagggtgacagcagtgggaatcggtacctgcccggcttccccatgaaaattgacatcccatccctgatgtacatggagcccaatgttcgatactcagccaccaagacgatctcgctgctcttcaatgccatccctgcgtccttgggaatgaagcttcgagggctgttggatcgcaagggctcctggaagaagctggatgacatgcagaacatcttctggtgccataagaccttcacgacaaagtatgtcacagagcactggtgtgaagatcacttctttgggtaccagtacctgaatggtgtcaatcccgtcatgctccactgcatctctagcttgcccagcaagctgcctgtcaccaatgacatggtggcccccttgctgggacaggacacatgcctgcagacagagctagagagggggaacatcttcctagcggactactggatcctggcggaggcccccacccactgcctaaacggccgccagcagtacgtggccgccccactgtgcctgctgtggctcagcccccagggggcgctggtgcccttggccatccagctcagccagacccccgggcctgacagccccatcttcctgcccactgactccgaatgggactggctgctggccaagacgtgggtgcgcaactctgagttcctggtgcacgaaaacaacacgcactttctgtgcacgcatttgctgtgcgaggccttcgccatggccacgctgcgccagctgccgctctgccaccccatctacaagctcctactcccccacactcgatacacgctgcaggtgaacaccatcgcgagggccacgctgctcaaccccgagggcctcgtggaccaggtcacgtccatcgggaggcaaggcctcatctacctcatgagcacgggcctggcccacttcacctacaccaatttctgccttccggacagcctgcgggcccgcggcgtcctggctatccccaactaccactaccgagacgacggcctgaagatctgggcggccattgagagctttgtctcagaaatcgtgggctactattatcccagtgacgcatctgtgcagcaggattcggagctgcaggcctggactggcgagatttttgctcaggcgttcctgggccgggaaagctcaggtttcccaagccggctgtgcaccccaggagagatggtgaagttcctcactgcaatcatcttcaattgctctgcccagcacgctgctgtcaacagtgggcagcatgactttggggcctggatgcccaatgctccatcatccatgaggcagcccccaccccagaccaaggggaccaccaccctgaagacttacctagacaccctccctgaagtgaacatcagctgtaacaacctcctcctcttctggttggttagccaagaacccaaggaccagaggcccctgggcacctacccagatgagcacttcacagaggaggccccgaggcggagcatcgccgccttccagagccgcctggcccagatctcaagggacatccaggagcggaaccagggtctggcactgccctacacctacctggaccctcccctcattgagaacagcgtctccatctaaccacccccaaataccacccaagaagaaagaaaggtccaagcatgaggaggaccagttcctcaggtcctccagacccttccatcctccctgttctcagttcacctgaaccttctcttctgcacatggagacttttgcagccaagatggctctgacatcatacaaactgggccctgagctgtgagagaccagcacagcagcgtccaggttaaaagccgctgaccaaagtccaatgcacaatagcccctccgaaaggaaggaaccgcttcacttcttgccccacttggggcagcctcttgttccagcctcttggaatgcccagcttgggtttctgagcttttctccctcatcctccccaatccccaaactccttctcctaccatgcctttctacgttctctttcttccaagcctagagccaccagcccagcttccttctctggaaaagcctggaaactgggcacagaaggactgtgtgcctgggtctaacatgtggtcccctttgtccctagcacctttaaggggaggggaagaattggagggcagcttgcctggacccctaacggctgttctcaggaacaggttcccaggcctggggtgtttgtggagatctgtctttctccaaagatttcatccaactcccctttcatcccactccctttcatcccatttttttctttctgtccttgagcccagtgagttcaataaaaaccaaaatatttggctctca

SEQ ID NO: 108458 - DNA, 3203 bp, Homo sapiens
  Payload ID: 1312
  Gene Symbol: ALOXE3
  Gene Name: arachidonate lipoxygenase 3
  Uniprot ID: Q9BYJ1
  ENST ID: ENST00000448843
  CDS Start-End: 342-2477
cacggatgattcacacgtaggaatgcagtggaacccaggctcctgatatccatctgggtgagccagccagagggaccggctgtgtcagaggcaagcaaacaagtattagagtgcaagactgtgggcggagagaggaagcccgagccgccagcagggagcttcggagagagaaagcccaggaacatcccagagagagctgggcccatcctcagccctacccagccccgcagcccctagccctccgcccagaaacccagccctgtccggcgtgccgctcttctcctccaggccggctgctgctgcggccagcgttgccggggcatcccttcctccttcccatcatggcagtgtaccgcctgtgtgtgaccactggtccctacctgagggccggcacactggacaacatctctgtcacactggtgggcacgtgtggtgaaagccccaagcagcggctagatcgaatgggcagggacttcgcccctggatcggtacagaagtacaaggtgcgttgcacagcggagctgggtgagctcttgctgctgcgtgtacacaaggagcgctacgctttcttccgcaaggactcttggtactgtagccgcatctgtgtcaccgaaccggatggtagtgtatcccacttcccctgctatcagtggattgaaggctactgcaccgtggagctgaggccaggaacagcaagaactatttgtcaggactctcttcccctcctcctggatcacaggacacgggagctccgggcccgacaagaatgctaccgctggaagatctatgcccctggcttcccctgcatggtagacgtcaacagctttcaggagatggagtcagacaagaaatttgccttgacaaagacgacaacttgtgtagaccagggtgacagcagtgggaatcggtacctgcccggcttccccatgaaaattgacatcccatccctgatgtacatggagcccaatgttcgatactcagccaccaagacgatctcgctgctcttcaatgccatccctgcgtccttgggaatgaagcttcgagggctgttggatcgcaagggctcctggaagaagctggatgacatgcagaacatcttctggtgccataagaccttcacgacaaagtatgtcacagagcactggtgtgaagatcacttctttgggtaccagtacctgaatggtgtcaatcccgtcatgctccactgcatctctagcttgcccagcaagctgcctgtcaccaatgacatggtggcccccttgctgggacaggacacatgcctgcagacagagctagagagggggaacatcttcctagcggactactggatcctggcggaggcccccacccactgcctaaacggccgccagcagtacgtggccgccccactgtgcctgctgtggctcagcccccagggggcgctggtgcccttggccatccagctcagccagacccccgggcctgacagccccatcttcctgcccactgactccgaatgggactggctgctggccaagacgtgggtgcgcaactctgagttcctggtgcacgaaaacaacacgcactttctgtgcacgcatttgctgtgcgaggccttcgccatggccacgctgcgccagctgccgctctgccaccccatctacaagctcctactcccccacactcgatacacgctgcaggtgaacaccatcgcgagggccacgctgctcaaccccgagggcctcgtggaccaggtcacgtccatcgggaggcaaggcctcatctacctcatgagcacgggcctggcccacttcacctacaccaatttctgccttccggacagcctgcgggcccgcggcgtcctggctatccccaactaccactaccgagacgacggcctgaagatctgggcggccattgagagctttgtctcagaaatcgtgggctactattatcccagtgacgcatctgtgcagcaggattcggagctgcaggcctggactggcgagatttttgctcaggcgttcctgggccgggaaagctcaggtttcccaagccggctgtgcaccccaggagagatggtgaagttcctcactgcaatcatcttcaattgctctgcccagcacgctgctgtcaacagtgggcagcatgactttggggcctggatgcccaatgctccatcatccatgaggcagcccccaccccagaccaaggggaccaccaccctgaagacttacctagacaccctccctgaagtgaacatcagctgtaacaacctcctcctcttctggttggttagccaagaacccaaggaccagaggcccctgggcacctacccagatgagcacttcacagaggaggccccgaggcggagcatcgccgccttccagagccgcctggcccagatctcaagggacatccaggagcggaaccagggtctggcactgccctacacctacctggaccctcccctcattgagaacagcgtctccatctaaccacccccaaataccacccaagaagaaagaaaggtccaagcatgaggaggaccagttcctcaggtcctccagacccttccatcctccctgttctcagttcacctgaaccttctcttctgcacatggagacttttgcagccaagatggctctgacatcatacaaactgggccctgagctgtgagagaccagcacagcagcgtccaggttaaaagccgctgaccaaagtccaatgcacaatagcccctccgaaaggaaggaaccgcttcacttcttgccccacttggggcagcctcttgttccagcctcttggaatgcccagcttgggtttctgagcttttctccctcatcctccccaatccccaaactccttctcctaccatgcctttctacgttctctttcttccaagcctagagccaccagcccagcttccttctctggaaaagcctggaaactgggcacagaaggactgtgtgcctgggtctaacatgtggtcccctttgtccctagcacctttaaggggaggggaagaattggagggcagcttgcctggacccctaacggctgttctcaggaacaggttcccaggcctggggtgtttgtggagatctgtctttctccaaagatttcatccaactcccctttcatcccactccctttcatcccatttttttctttctgtccttgagcccagtgagttcaataaaaaccaaaatatttggctctc

SEQ ID NO: 108459 - DNA, 2504 bp, Homo sapiens
  Payload ID: 1313
  Gene Symbol: ARAF
  Gene Name: A-Raf proto-oncogene, serine/threonine kinase
  ENST ID: ENST00000290277
  CDS Start-End: 212-2041
cttgacagacgtgaccctgacccaataagggtggaaggctgagtcccgcagagccaataacgagagtccgagaggcgacggaggcggactctgtgaggaaacaagaagagaggcccaagatggagacggcggcggctgtagcggcgtgacaggagccccatggcacctgcccagccccacctcagcccatcttgacaaaatctaaggctccatggagccaccacggggcccccctgccaatggggccgagccatcccgggcagtgggcaccgtcaaagtatacctgcccaacaagcaacgcacggtggtgactgtccgggatggcatgagtgtctacgactctctagacaaggccctgaaggtgcggggtctaaatcaggactgctgtgtggtctaccgactcatcaagggacgaaagacggtcactgcctgggacacagccattgctcccctggatggcgaggagctcattgtcgaggtccttgaagatgtcccgctgaccatgcacaattttgtacggaagaccttcttcagcctggcgttctgtgacttctgccttaagtttctgttccatggcttccgttgccaaacctgtggctacaagttccaccagcattgttcctccaaggtccccacagtctgtgttgacatgagtaccaaccgccaacagccctcaaggttctaccacagtgtccaggatttgtccggaggctccagacagcatgaggctccctcgaaccgccccctgaatgagttgctaaccccccagggtcccagcccccgcacccagcactgtgacccggagcacttccccttccctgccccagccaatgcccccctacagcgcatccgctccacgtccactcccaacgtccatatggtcagcaccacggcccccatggactccaacctcatccagctcactggccagagtttcagcactgatgctgccggtagtagaggaggtagtgatggaaccccccgggggagccccagcccagccagcgtgtcctcggggaggaagtccccacattccaagtcaccagcagagcagcgcgagcggaagtccttggccgatgacaagaagaaagtgaagaacctggggtaccgggactcaggctattactgggaggtaccacccagtgaggtgcagctgctgaagaggatcgggacgggctcgtttggcaccgtgtttcgagggcggtggcatggcgatgtggccgtgaaggtgctcaaggtgtcccagcccacagctgagcaggcccaggctttcaagaatgagatgcaggtgctcaggaagacgcgacatgtcaacatcttgctgtttatgggcttcatgacccggccgggatttgccatcatcacacagtggtgtgagggctccagcctctaccatcacctgcatgtggccgacacacgcttcgacatggtccagctcatcgacgtggcccggcagactgcccagggcatggactacctccatgccaagaacatcatccaccgagatctcaagtctaacaacatcttcctacatgaggggctcacggtgaagatcggtgactttggcttggccacagtgaagactcgatggagcggggcccagcccttggagcagccctcaggatctgtgctgtggatggcagctgaggtgatccgtatgcaggacccgaacccctacagcttccagtcagacgtctatgcctacggggttgtgctctacgagcttatgactggctcactgccttacagccacattggctgccgtgaccagattatctttatggtgggccgtggctatctgtccccggacctcagcaaaatctccagcaactgccccaaggccatgcggcgcctgctgtctgactgcctcaagttccagcgggaggagcggcccctcttcccccagatcctggccacaattgagctgctgcaacggtcactccccaagattgagcggagtgcctcggaaccctccttgcaccgcacccaggccgatgagttgcctgcctgcctactcagcgcagcccgccttgtgccttaggccccgcccaagccaccagggagccaatctcagccctccacgccaaggagccttgcccaccagccaatcaatgttcgtctctgccctgatgctgcctcaggatcccccattccccaccctgggagatgagggggtccccatgtgcttttccagttcttctggaattgggggacccccgccaaagactgagccccctgtctcctccatcatttggtttcctcttggctttggggatacttctaaattttgggagctcctccatctccaatggctgggatttgtggcagggattccactcagaacctctctggaatttgtgcctgatgtgccttccactggattttggggttcccagcaccccatgtggattttggggggtcccttttgtgtctcccccgccattcaaggactcctctctttcttcaccaagaagcacagaattctgctgggcctttgcttgttt

SEQ ID NO: 108460 - DNA, 1271 bp, Homo sapiens
  Payload ID: 1313
  Gene Symbol: ARAF
  Gene Name: A-Raf proto-oncogene, serine/threonine kinase
  Uniprot ID: P10398
  ENST ID: ENST00000377039
  CDS Start-End: 90-650
gagacggcggcggctgtagcggcgtgacaggagccccatggcacctgcccagccccacctcagcccatcttgacaaaatctaaggctccatggagccaccacggggcccccctgccaatggggccgagccatcccgggcagtgggcaccgtcaaagtatacctgcccaacaagcaacgcacggtggtgactgtccgggatggcatgagtgtctacgactctctagacaaggccctgaaggtgcggggtctaaatcaggactgctgtgtggtctaccgactcatcaagggacgaaagacggtcactgcctgggacacagccattgctcccctggatggcgaggagctcattgtcgaggtccttgaagatgtcccgctgaccatgcacaattttgtacggaagaccttcttcagcctggcgttctgtgacttctgccttaagtttctgttccatggcttccgttgccaaacctgtggctacaagttccaccagcattgttcctccaaggtccccacagtctgtgttgacatgagtaccaaccgccaacagttctaccacagtgtccaggatttgtccggaggctccagacagcatgaggctccctcgaaccgccccctgaatgagttgctaaccccccagggtcccaggtagggatgccttagctgaagagctgctgggggagaaaaagatcttggggctcttgtagaccacgagccatactttattcatttgtttacttgacaaacatttattgagcacctacaagtgtgagtaagggcatgaaactgggaccttgggcaagtcacctcatttctctgggcctcagttttctcatctgtaaagaggggatgatgatactttctaccatataaaggttctggtgaggcttaaatgagttaagacatgttcagtgcctagaacaggatctggtacagtgtaaataatcaatttttttgttattaattataaatatatttataagcatctaactactttgctaattctagtataatcatactcaagcctttccattttgaaatacgtattattttatcataaattacttcccttttattgcttttttatgttaaatattatataaaactatagctatattaaaatatattattgctctaatatatattttatgatgtgcatattttatggtatatttatgttattgtatcatgttgtattacataattttatataatgtagaacatcatacatgtttatatgatacataaaataaagttagggtattattttaaa

SEQ ID NO: 108461 - DNA, 2458 bp, Homo sapiens
  Payload ID: 1313
  Gene Symbol: ARAF
  Gene Name: A-Raf proto-oncogene, serine/threonine kinase
  Uniprot ID: P10398
  ENST ID: ENST00000377045
  CDS Start-End: 195-2015
tgacccaataagggtggaaggctgagtcccgcagagccaataacgagagtccgagaggcgacggaggcggactctgtgaggaaacaagaagagaggcccaagatggagacggcggcggctgtagcggcgtgacaggagccccatggcacctgcccagccccacctcagcccatcttgacaaaatctaaggctccatggagccaccacggggcccccctgccaatggggccgagccatcccgggcagtgggcaccgtcaaagtatacctgcccaacaagcaacgcacggtggtgactgtccgggatggcatgagtgtctacgactctctagacaaggccctgaaggtgcggggtctaaatcaggactgctgtgtggtctaccgactcatcaagggacgaaagacggtcactgcctgggacacagccattgctcccctggatggcgaggagctcattgtcgaggtccttgaagatgtcccgctgaccatgcacaattttgtacggaagaccttcttcagcctggcgttctgtgacttctgccttaagtttctgttccatggcttccgttgccaaacctgtggctacaagttccaccagcattgttcctccaaggtccccacagtctgtgttgacatgagtaccaaccgccaacagttctaccacagtgtccaggatttgtccggaggctccagacagcatgaggctccctcgaaccgccccctgaatgagttgctaaccccccagggtcccagcccccgcacccagcactgtgacccggagcacttccccttccctgccccagccaatgcccccctacagcgcatccgctccacgtccactcccaacgtccatatggtcagcaccacggcccccatggactccaacctcatccagctcactggccagagtttcagcactgatgctgccggtagtagaggaggtagtgatggaaccccccgggggagccccagcccagccagcgtgtcctcggggaggaagtccccacattccaagtcaccagcagagcagcgcgagcggaagtccttggccgatgacaagaagaaagtgaagaacctggggtaccgggactcaggctattactgggaggtaccacccagtgaggtgcagctgctgaagaggatcgggacgggctcgtttggcaccgtgtttcgagggcggtggcatggcgatgtggccgtgaaggtgctcaaggtgtcccagcccacagctgagcaggcccaggctttcaagaatgagatgcaggtgctcaggaagacgcgacatgtcaacatcttgctgtttatgggcttcatgacccggccgggatttgccatcatcacacagtggtgtgagggctccagcctctaccatcacctgcatgtggccgacacacgcttcgacatggtccagctcatcgacgtggcccggcagactgcccagggcatggactacctccatgccaagaacatcatccaccgagatctcaagtctaacaacatcttcctacatgaggggctcacggtgaagatcggtgactttggcttggccacagtgaagactcgatggagcggggcccagcccttggagcagccctcaggatctgtgctgtggatggcagctgaggtgatccgtatgcaggacccgaacccctacagcttccagtcagacgtctatgcctacggggttgtgctctacgagcttatgactggctcactgccttacagccacattggctgccgtgaccagattatctttatggtgggccgtggctatctgtccccggacctcagcaaaatctccagcaactgccccaaggccatgcggcgcctgctgtctgactgcctcaagttccagcgggaggagcggcccctcttcccccagatcctggccacaattgagctgctgcaacggtcactccccaagattgagcggagtgcctcggaaccctccttgcaccgcacccaggccgatgagttgcctgcctgcctactcagcgcagcccgccttgtgccttaggccccgcccaagccaccagggagccaatctcagccctccacgccaaggagccttgcccaccagccaatcaatgttcgtctctgccctgatgctgcctcaggatcccccattccccaccctgggagatgagggggtccccatgtgcttttccagttcttctggaattgggggacccccgccaaagactgagccccctgtctcctccatcatttggtttcctcttggctttggggatacttctaaattttgggagctcctccatctccaatggctgggatttgtggcagggattccactcagaacctctctggaatttgtgcctgatgtgccttccactggattttggggttcccagcaccccatgtggattttggggggtcccttttgtgtctcccccgccattcaaggactcctctctttcttcaccaagaagcacagaattc

SEQ ID NO: 108462 - DNA, 1913 bp, Homo sapiens
  Payload ID: 1314
  Gene Symbol: AANAT
  Gene Name: aralkylamine N-acetyltransferase
  Uniprot ID: Q16613
  ENST ID: ENST00000250615
  CDS Start-End: 1008-1766
atggaatccactaagaaggggcgagaccagtgaggattcaactaaagggagcgagaaggggcggggacccgggaggaggaagtggagtggccaccgaggaagaggggagtggtcggggtggggcacaggatggtggagagactgtcaacaacttttaatgagctcccttggcgtcctagcctagcccccaggcactgggagcattgcagaaagagaaagatactgtccctgtcctctaggtgtttccagtctagttggggagacaaaacaaatacacattaaatagataacaaacaactccaacttgtaaggctataatagatacgtgtagagcatatgtataatgcactgtattcaggaattccaagcagttcgaacgtcatgacccctcagaagttgacccagaagctggtgaaggaggcccagagaaagatacagggtgaggcacagtgaatctgctggaccagcttcaagaacaatatgtcagcctatccactgccacctcccacagctccagactcgtgggtgcttcctggatgtgaccagccatagaatttatcaccctggcaaggaccctggtacttggaagcttggagaaagtgattcagggctcttacccgcagtgggcaggactgctgacggctcccagctggattttcctgcaactgccctcaatgaagcaagctgttccacccaaggttgatgcaggacaaagagggtctcgctctgtcgcccaggctggagtgcagtggcgagtcactacagcctcgacctctccggctcaagccatcctcccgtctctgtctcccaaagtgctgggattacagcggtgagccactgtgcctggcttactgcctcatcttgttccctgaggttctagacctctagggtgttgtccggaaagaacagggccatgtggaagtcagcaaagagagaggccgattgaacagcaggctcttctcaggcatcgccaagtgactgattaggattggccaccagggggtgccatggagccacagtctatgaagggacagaagaggccttttgggggaccctggaggttgaaggtgctgggaggccctccttggcttaggaggacacttccaaagctggggcgccccaaggaggcaccagtggccagaatgtccacgcagagcacccaccccctgaaacctgaggccccacgtctgccacctgggatccccgagtccccgagctgtcagcggcgccacacactccctgccagtgagtttcgctgcctcaccccggaggacgctgtcagcgcctttgagatcgagcgtgaagccttcatctccgtcttgggcgtctgccccctgtacctggatgagatccggcacttcctgaccctatgtccagagctgtccctgggctggttcgaggagggctgccttgtggccttcatcatcggctcgctctgggacaaggagagactcatgcaggagtcactgacgctgcacaggtctgggggccacatagcccacctgcatgtgctggccgtgcaccgcgccttccggcagcagggcaggggccccatcctgctgtggcgctacctgcaccacctgggcagccagccggccgtgcgccgggccgcgctcatgtgcgaggacgcgctggtacccttctatgagaggttcagcttccacgccgtgggcccctgcgccatcaccgtgggctccctcaccttcatggagctccactgctccctgcggggccaccccttcctgcgcaggaacagcggctgctgaactgggctgcccacctggctgccaacatgatccccgtctctgccctgggctcctcttagctcagctgagcatggagacagcagtttccagagagtggagagagcagggctaaataaagaggagataaggtggcttctcacggcctga

SEQ ID NO: 108463 - DNA, 1005 bp, Homo sapiens
  Payload ID: 1314
  Gene Symbol: AANAT
  Gene Name: aralkylamine N-acetyltransferase
  Uniprot ID: Q16613
  ENST ID: ENST00000392492
  CDS Start-End: 235-858
tacaaacctctaacagcaccacaggctgcccggggaacatctgctactacagccttgcagcccggagtcccggattttactggttcccgtgcctgcggacaggcccccagggctagcggctttgtggagggaacactgggtatcctctccacagtccaggtgctgggaggccctccttggcttaggaggacacttccaaagctggggcgccccaaggaggcaccagtggccagaatgtccacgcagagcacccaccccctgaaacctgaggccccacgtctgccacctgggatccccgagtccccgagctgtcagcggcgccacacactccctgccagtgagtttcgctgcctcaccccggaggacgctgtcagcgcctttgagatcgagcgtgaagccttcatctccgtcttgggcgtctgccccctgtacctggatgagatccggcacttcctgaccctatgtccagagctgtccctgggctggttcgaggagggctgccttgtggccttcatcatcggctcgctctgggacaaggagagactcatgcaggagtcactgacgctgcacaggtctgggggccacatagcccacctgcatgtgctggccgtgcaccgcgccttccggcagcagggcaggggccccatcctgctgtggcgctacctgcaccacctgggcagccagccggccgtgcgccgggccgcgctcatgtgcgaggacgcgctggtacccttctatgagaggttcagcttccacgccgtgggcccctgcgccatcaccgtgggctccctcaccttcatggagctccactgctccctgcggggccaccccttcctgcgcaggaacagcggctgctgaactgggctgcccacctggctgccaacatgatccccgtctctgccctgggctcctcttagctcagctgagcatggagacagcagtttccagagagtggagagagcagggctaaataaagaggagataaggtggcttctcacggcctga

SEQ ID NO: 108464 - DNA, 796 bp, Homo sapiens
  Payload ID: 1314
  Gene Symbol: AANAT
  Gene Name: aralkylamine N-acetyltransferase
  ENST ID: ENST00000587798
  CDS Start-End: 86-364
cacagtccaggtgctgggaggccctccttggcttaggaggacacttccaaagctggggcgccccaaggaggcaccagtggccagaatgtccacgcagagcacccaccccctgaaacctgaggccccacgtctgccacctgggatccccgagtccccgagctgtcagcggcgccacacactccctgccagtgagtttcgctgcctcaccccggaggacgctgtcagcgcctttgagatcgagcgtgaagacagtggacgcgaggcacagcgactaccagtcacccacctgagcctcctgccacagccttcatctccgtcttgggcgtctgccccctgtacctggatgagatccggcacttcctgaccctatgtccagagctgtccctgggctggttcgaggagggctgccttgtggccttcatcatcggctcgctctgggacaaggagagactcatgcaggagtcactgacgctgcacaggtctgggggccacatagcccacctgcatgtgctggccgtgcaccgcgccttccggcagcagggcaggggccccatcctgctgtggcgctacctgcaccacctgggcagccagccggccgtgcgccgggccgcgctcatgtgcgaggacgcgctggtacccttctatgagaggttcagcttccacgccgtgggcccctgcgccatcaccgtgggctccctcaccttcatggagctccactgctccctgcggggccaccccttcctgcgcaggaacagcggctgctgaactgggctgcccacctggctgccaacatgat

SEQ ID NO: 108465 - DNA, 478 bp, Homo sapiens
  Payload ID: 1314
  Gene Symbol: AANAT
  Gene Name: aralkylamine N-acetyltransferase
  ENST ID: ENST00000585649
  CDS Start-End: 24-478
ctctggggcctgcctccctggagatgaggatgagacccctgtcccttgctgttctccaacaggtgctgggaggccctccttggcttaggaggacacttccaaagctggggcgccccaaggaggcaccagtggccagaatgtccacgcagagcacccaccccctgaaacctgaggccccacgtctgccacctgggatccccgagtccccgagctgtcagcggcgccacacactccctgccagtgagtttcgctgcctcaccccggaggacgctgtcagcgcctttgagatcgagcgtgaagccttcatctccgtcttgggcgtctgccccctgtacctggatgagatccggcacttcctgaccctatgtccagagctgtccctgggctggttcgaggagggctgccttgtggccttcatcatcggctcgctctgggacaaggagagactcatgcaggagtcactgacgctgcacaggtc

SEQ ID NO: 108466 - DNA, 5516 bp, Homo sapiens
  Payload ID: 1315
  Gene Symbol: AMZ1
  Gene Name: archaelysin family metallopeptidase 1
  Uniprot ID: Q400G9
  ENST ID: ENST00000312371
  CDS Start-End: 369-1865
gattggtgctgtgacctgcggcagcacagccgcctgcgttgagcgcccacggtgggctggactttgcactaggtgctgacaggaccggcagaggtggccactgccctcgtccccagcctgcactcctgggcgaaggctgacgctgaacagggtgctgtgggcccagaagcgcccatgcctgagagcgtccaggaccaggcagagctgggccttaagggcccttggaccagtgtctgtctgcagggagcccccggtagccactcggatcagcccgagggaagattctggacgagaccgtggccgtcccccgggtggcccatggacagcagcaggggctcccaggagtggccaggccctgcccgcccaccatgctgcagtgtagacccgcacaggagttcagcttcgggccccgggccttgaaggacgctctggtctccactgacgcagccctgcagcagctgtatgtgtccgccttctcccctgccgagcggctcttcctggccgaggcctacaacccgcagaggacgctcttctgcaccctgctcatccgcacgggcttcgactggctcctgagccgacccgaggctcccgaggacttccagaccttccacgcctccctgcagcaccggaagccccgcctggctcggaagcacatctacctacagccgatagacctgagcgaggagccggtgggaagctccctgctgcaccagctgtgcagctgcacagaggccttcttcctgggcctgcgcgtcaagtgcctgccgtcggtggcagccgcgtccatccgctgctcctcgcggcccagccgggactctgacaggctccagctccacacagacggcatcctgtccttcttgaagaacaacaagccaggggacgcgctgtgtgtgctgggcctcacactgtctgacctgtacccccatgaggcctggagcttcaccttcagcaagttccttccagggcacgaagtgggcgtctgcagcttcgcccggttctcaggggaattcccgaagtcggggcccagcgcccctgatctggccctggtagaggcagcagcagacggccccgaggcccccctgcaggacaggggctgggccctgtgcttcagtgccctggggatggttcagtgctgcaaggtcacgtgccacgagctctgccaccttctgggcctggggaactgccgctggctccgctgcctcatgcagggtgcgctcagcctggacgaggccctgcggcggcccctggacctctgtcccatctgcctgaggaagctgcagcatgtcctgggtttcaggctcatcgagaggtaccagagactctacacctggactcaggcggtggtggggacgtggcccagccaggaggcgggggagccgtcagtgtgggaggacaccccgcctgccagcgccgactcgggcatgtgctgtgagagtgactcggagcccggcaccagtgtgtcggagcccctcacccctgatgccgggagtcacaccttcgcctcggggccagaggaagggctgagctacctggcagcctcagaggctccgctgccacctgggggccctgcggaggccatcaaggagcatgaacggtggctggccatgtgcatccaggccctgcagcgggaagtggcagaggaggacctggtgcaggtggacagagccgtggacgccctcgaccgctgggagatgttcacgggccagctcccggccaccaggcaggacccacccagcagcagggacagcgtggggctgcgcaaggtgctgggggacaagttctcctccctgaggaggaagctgagtgcccgaaaactcgccagagcagagtcggccccccgtccctgggatggggaagagagttagtacagcaggggctgccctacgtctccttccctaaggatgctggccagcactgtccagtagctgaggccactactgacctgccagggataaagaggaagggtctgcctgggtggtggctcaggcctgtcatcccatcactttgagaggccaggagtttgagaccagactgggcaacatggtgagactctgcctctacaaaagaaaaattaaaaaattagctggatgaagtggttcatgcctgtgttcccagctattcaggaggctgaggtgggaggattgcttgagcctaggaggtcgaggctgcagtgggatgtgatcataccactgtactgcagtctgggccacacagaaagactgtctccagaaaaaaaaaagttctttggagaagccacagaccacctgtcttcaggcgcctccttcaactcctgagtcccagccagccgctcccaggggcctgcacacatggagaggcctccctgatcctgggtgcttctcgtggagtacaagccggactgtgctgaggttgggacagagccccctcccctgcagaggcagaaggaagcagcgtgcgtcctgtctccttccaggctgtgggcctgcccttcagttatttatagctggagctggagaggctggctcagatgaggagtgaccccgggggcacacaggctccacactgccacccagcttccaaggctgagtctcctccctaacggggaagtgacggggttttgtctctatcatctcaggcgtcaaccacatgcacacacacactgtcacgttctgtggcgctaacagcatcctgatcctgacggacttcaccggggctctccaggcatctcttctgacaaacactgcaggaggtgagggtgtctgacgtgcactgagggcagaggcccccttattcctgaggcggctacagctcaccgtggggaagatcaactgtggtgatgtttttgggacagtttcttggcaaaggtggccgcgctgtcagtaccaagtagctggaggtggtgatcagatgatctgtctttcctttttttttcggtctagttctgtcagttgctgagagaggggtattattgccatggctgggcgtttgatctgtctccctttagttttgccggattttgcttcctgcactttgaagctcctttacgtccctgcacatttgattgttgtgtcttcctgaggaattgacccttttattgtcacacgtaccccctcagcctgtggtggagggtctctgggagagagacttccggttctgacagcggaatcccttcggagtgacgagggcggggtcacagctcgcgcaccctcatctggagagaggcaagaacagggcagcttggaccttttgtgggtgggtggctcacacggttatggagggcttctaagaaaaacaaaatacaaaactaaaactagaagggctatgcaggtgaggtgggctgaggcttccttgtgaatctgacattggtggaggccgactgaaggctcccggtcctggtcccactccgtgttgacttcagagaagcaaagatgcagctcagaagtagcattaggatcttcgtcccgttctcttttgcgtagcttcaaaaaggcgtaacagtgacctgggaggggagatgaagagctaggcctttcagaaagtgaccaatggaaggtgccggcagagcaccctgcagtaacagaaggtgaaagccggagcctggtggctgttgctgcaaacaaccacccaaaacttagtggcttaaaatcaccacagtctagctcatgaatctgtaacttgggcagagctcggtggagacggtttgcccctgtggctcgactggagtgttcgttcacacggctgccaagtggaatttggctgggaatctcaggccttggttcctgcccacgtgagactctccatggaggaggggcatcttcttaggaaggcagctgccataccgtgaggaaacccgacaaacagggcagccagagccagacagcaggctcctggtcccagtcccggaaaatgcaaagggacaagtatgtgttgatttcagagaagctcagatgtagcattaggaccttcatccatacccttctcttttgcatggcttctaaagggcatgacagtgacctgggaggtaactgtgccagaataaagaggggagacgaaaaaaagagggtcactttcagaaagggacctgggcttcctcacaatatggcggttgccctcctaaggtggacatcgggagggtcagatggaagctctgtggcctttcctaactcggcctcacgtcacagagcgtcacctttcctgcactccacggcggcagtgacaaggaccccaccccaggttcacggggaggggacgtggcagggaatgtgagacaacacaatattgctgtggccattcatgaacagtcagtcagccccactcggcgttcactgtggggatttggctggtgcacctgcgaggtggcctgacctgttttccgatttccttcatcttctgcaaaaggttaaccgctggagtgatgcgagattaaacagaggtgataaaaatagaatgcctggctcatgctgagggtgggagcccactggggttatgaccaaagcctcggcgctctctgtacccgtgtcctttgaccctcagctgtgatgtgtgtcccaaaaaagcgttttgaagtgggaaggagcaaaccactaaaaaaaactccttttatccgcagcgtttaccaacttgcagatgtcagtgaaattttttaagacagctgttagaaggactgttttgaaatgcaactttgaggaagagaaattggtttccctcctctcccccgtgttagccccaggttctgtctgtgctgtggtgaagagtgacttgggacagtcaccaggaaagacgcaaggcagaggagagagaatgagggctgccttctcgaggaaggtcacagctcacgaatctttctaaacttaagtgctgcagaagttgaactgagattaaatttagagatgatggtttccaagacacacagggccacggttctttcagtttttaaacacgtgcaaagtccactgaattgctttctcgtctcatctgtcagaagcccctgcattcacaaggatgggtcttccagcttgacgatgacctctcttcggagagcctcacccatcttggtaagccaagtcagcggggcctcatggagctaaaaatagtttcaggtcatgacagatgttatctgtattgctgtgtgtgcgatgagtctggggaagctaacacatgccttctgaagtggctagaatacacactcccacgtcacagccatgctatgatgaaggggtgagaagcagtgtcccctctgaggcaaatctctcttcaggcagccccgcagtcctcttccgaaatctcattcttttccctctcttcctccccaaaaagcccaaactcattgtcagagtggggagaggggagaagcagcatcctgactcctgtccatggtgtgaaccctgagggcacgggacagtgagtggagctctgccaccacccgtttccagagcatgggtgaggagggagggatgccgacctgttaatatttgcttcagacctttccccgatgaacgaaatctccaaaagccttaaacataaaatggcttagtcaa

SEQ ID NO: 108467 - DNA, 1862 bp, Homo sapiens
  Payload ID: 1315
  Gene Symbol: AMZ1
  Gene Name: archaelysin family metallopeptidase 1
  Uniprot ID: Q400G9
  ENST ID: ENST00000407112
  CDS Start-End: 314-1207
gatcctcccggcccaggccgagctgcccacgctgctgcccggggctcggtgcccggcgcggcctctgccggctccggcgggcgcgggactgcgagggtgctgtgggcccagaagcgcccatgcctgagagcgtccaggaccaggcagagctgggccttaagggcccttggaccagtgtctgtctgcagggagcccccggtagccactcggatcagcccgagggaagattctggacgagaccgtggccgtcccccgggtggcccatggacagcagcaggggctcccaggagtggccaggccctgcccgcccaccatgctgcagtgtagacccgcacaggagttcagcttcgggccccgggccttgaaggacgctctggtctccactgacgcagccctgcagcagctgtatgtgtccgccttctcccctgccgagcggctcttcctggccgaggcctacaacccgcagaggacgctcttctgcaccctgctcatccgcacgggcttcgactggctcctgagccgacccgaggctcccgaggacttccagaccttccacgcctccctgcagcaccggaagccccgcctggctcggaagcacatctacctacagccgatagacctgagcgaggagccggtgggaagctccctgctgcaccagctgtgcagctgcacagaggccttcttcctgggcctgcgcgtcaagtgcctgccgtcggtggcagccgcgtccatccgctgctcctcgcggcccagccgggactctgacaggctccagctccacacagacggcatcctgtccttcttgaagaacaacaagccaggggacgcgctgtgtgtgctgggcctcacactgtctgacctgtacccccatgaggcctggagcttcaccttcagcaagttccttccagggcacggtcacgtgccacgagctctgccaccttctgggcctggggaactgccgctggctccgctgcctcatgcagggtgcgctcagcctggacgaggccctgcggcggcccctggacctctgtcccatctgcctgaggaagctgcagcatgtcctgggtttcaggctcatcgagaggtaccagagactctacacctggactcaggcggtggtggggacgtggcccagccaggaggcgggggagccgtcagtgtgggaggacaccccgcctgccagcgccgactcgggcatgtgctgtgagagtgactcggagcccggcaccagtgtgtcggagcccctcacccctgatgccgggagtcacaccttcgcctcggggccagaggaagggctgagctacctggcagcctcagaggctccgctgccacctgggggccctgcggaggccatcaaggagcatgaacggtggctggccatgtgcatccaggccctgcagcgggaagtggcagaggaggacctggtgcaggtggacagagccgtggacgccctcgaccgctgggagatgttcacgggccagctcccggccaccaggcaggacccacccagcagcagggacagcgtggggctgcgcaaggtgctgggggacaagttctcctccctgaggaggaagctgagtgcccgaaaactcgccagagcagagtcggccccccgtccctgggatggggaagagagttagtacagcaggggctgccctacgtctccttccctaaggatgctggccagcactgtccagtagctgaggccactactgacctgccagggataaagaggaagggtctgcctgggtggtggctcaggcctgtcatcccatcactttgagaggccaggagtttgagaccagactgggcaacatggtgagactctgcctctacaaaagaaaaattaaaaaattagctgg

SEQ ID NO: 108468 - DNA, 1722 bp, Homo sapiens
  Payload ID: 1316
  Gene Symbol: AMZ2
  Gene Name: archaelysin family metallopeptidase 2
  Uniprot ID: Q86W34
  ENST ID: ENST00000359783
  CDS Start-End: 656-1564
gggacgcggtgcgcatgcgcgtgagggctgccgcgggtgggtggtatcgaggcctgtcgggtcagggcggttcgcgggtgctgtcagagctgggccggggcccctaggcagggtagccgggtcgtagaggcgggggccggtcgcggtcggtggagcgggatgaggatgtaggaggggcggacgtggcggaagccgcggggtccgcggggtcggtgcctctagggagccagggaggcctttcccgaggctcctggggaagaagaggcgaagcgagagtccctggggaacccccactccactcccagctggagactgggttgtgtctgcatggaccagagcccacagtgcgagttgctataggcaaccagccagggtggccagctccttcccgtttgcccgtgatgttctggttttgggaccaaagcatcctaggcctccagcccactgcagtgaccgaattctgcgccccctgcccatcttctcccgcagcttccctagattaggcttgggaggcaagaggaggcctcctgacctttcacactgcctttttaatattaagatgaagtcacactccacaactttcttccagccaggcccagacatgtccgtccttgtaagttaaaagcttccatgggagccttccttcctaatcaagatgcaaataatacggcactccgaacagacactaaaaacagctctcatctcaaagaacccagtgcttgtatcacagtatgagaaattaaatgctggggaacaacgtttaatgaatgaagccttccagccagccagtgatctctttggacccattaccttgcattctccatcagattggatcacctcccaccctgaggctccccaagactttgaacagttcttcagtgatccttacagaaagacaccctctccaaacaaacgcagcatttatatacagtccattggggacatcctgaagttcttgaaaaagaagaaacctgaagatgccttctgtgttgtgggaataacaatgattgatctttacccaagagactcgtggaattttgtctttggacaggcctctttgacagatggtgtggggatattcagctttgccaggtatggcagtgatttttatagcatgcactataaaggcaaagtgaagaagctcaagaaaacatcttcaagtgactattcaattttcgacaactattatattccagaaataactagtgttttactacttcgatcctgtaagactttaacccatgagatcggacacatatttggactgcgacactgccagtggcttgcatgcctcatgcaaggctccaaccacttggaagaagctgaccggcgccctctaaacctttgccctatctgtttgcacaagttgcagtgtgctgttggcttcagcattgtagaaagatacaaagcactggtgaggtggattgatgatgaatcttctgacacacctggagcaactccagaacacagtcacgaggataatgggaatttaccgaaacccgtggaagcctttaaggaatggaaagagtggataataaaatgcctggctgttctccaaaaatgaggaccttcaaataggagtgattgaaataaataactacttgcatgttatgctttcatttgggtggaatacttcattggaataaactactgatcttgtgctgtgtcaaagtaacagactagaaccttctttcaagtacctgaattgaaatgaaactcatt

SEQ ID NO: 108469 - DNA, 2402 bp, Homo sapiens
  Payload ID: 1316
  Gene Symbol: AMZ2
  Gene Name: archaelysin family metallopeptidase 2
  Uniprot ID: Q86W34
  ENST ID: ENST00000359904
  CDS Start-End: 1133-2215
aaataaagaagggaaagtgctgagggtgacggccccggggagcgctgcggctctacgtcaacctgcggcggccgccgactcatttggggccacgctggttgcattcgtcacgccggcgatgcctctcaaacccgcggcctgccgaggacgttcccacacgggagaccccagcgacgcgggcgcatctgtggctctcgagaaccgggccgcggagccgccgcgagcgcaagcgaggaatcggcgactgcgggggtggacagctggggcttgtagtcccctcgctaccctctattctggaagaggcgggtcgcggccgctgaactccagctctgcgcctgcccaggcggccgcacgctcaggggcgtggcatgggtgggtcgtgagttgggcggggcccacagggcgtgcgcgacgcagcggcgcggcgcgtggcgtaaggggcgtggcgccagtgggcgtggcgtggcgcagtgcgaagggacgcggtgcgcatgcgcgtgagggctgccgcgggtgggtggtatcgaggcctgtcgggtcagggcggttcgcgggtgctgtcagagctgggccggggcccctaggcagggtagccgggtcgtagaggcgggggccggtcgcggtcggtggagcgggatgaggatgtaggaggggcggacgtggcggaagccgcggggtccgcggggtcggtgcctctagggagccagggaggcctttcccgaggctcctggggaagaagaggcgaagcgagagtccctggggaacccccactccactcccagctggagactgggttgtgtctgcatggaccagagcccacagtgcgagttgctataggcaaccagccagggtggccagctccttcccgtttgcccgtgatgttctggttttgggaccaaagcatcctaggcctccagcccactgcagtgaccgaattctgcgccccctgcccatcttctcccgcagcttccctagattaggcttgggaggcaagaggaggcctcctgacctttcacactgcctttttaatattaagatgaagtcacactccacaactttcttccagccaggcccagacatgtccgtccttgtaagttaaaagcttccatgggagccttccttcctaatcaagatgcaaataatacggcactccgaacagacactaaaaacagctctcatctcaaagaacccagtgcttgtatcacagtatgagaaattaaatgctggggaacaacgtttaatgaatgaagccttccagccagccagtgatctctttggacccattaccttgcattctccatcagattggatcacctcccaccctgaggctccccaagactttgaacagttcttcagtgatccttacagaaagacaccctctccaaacaaacgcagcatttatatacagtccattggctctctaggaaacaccagaattatcagtgaagaatatattaaatggctcacgggctactgtaaagcatatttctatggcttgagagtaaaactcctagaaccagttcctgtttctgtaacaagatgttcctttagagtcaatgagaacacacacaacctacaaattcatgcaggggacatcctgaagttcttgaaaaagaagaaacctgaagatgccttctgtgttgtgggaataacaatgattgatctttacccaagagactcgtggaattttgtctttggacaggcctctttgacagatggtgtggggatattcagctttgccaggtatggcagtgatttttatagcatgcactataaaggcaaagtgaagaagctcaagaaaacatcttcaagtgactattcaattttcgacaactattatattccagaaataactagtgttttactacttcgatcctgtaagactttaacccatgagatcggacacatatttggactgcgacactgccagtggcttgcatgcctcatgcaaggctccaaccacttggaagaagctgaccggcgccctctaaacctttgccctatctgtttgcacaagttgcagtgtgctgttggcttcagcattgtagaaagatacaaagcactggtgaggtggattgatgatgaatcttctgacacacctggagcaactccagaacacagtcacgaggataatgggaatttaccgaaacccgtggaagcctttaaggaatggaaagagtggataataaaatgcctggctgttctccaaaaatgaggaccttcaaataggagtgattgaaataaataactacttgcatgttatgctttcatttgggtggaatacttcattggaataaactactgatcttgtgctgtgtcaaagtaacagactagaaccttctttcaagtacctgaattgaaatgaaactcattttgaataataaaaactctagaaactcttt

SEQ ID NO: 108470 - DNA, 1378 bp, Homo sapiens
  Payload ID: 1316
  Gene Symbol: AMZ2
  Gene Name: archaelysin family metallopeptidase 2
  Uniprot ID: Q86W34
  ENST ID: ENST00000392720
  CDS Start-End: 111-1193
agtgcgaagggacgcggtgcgcatgcgcgtgagggctgccgcggccaggcccagacatgtccgtccttgtaagttaaaagcttccatgggagccttccttcctaatcaagatgcaaataatacggcactccgaacagacactaaaaacagctctcatctcaaagaacccagtgcttgtatcacagtatgagaaattaaatgctggggaacaacgtttaatgaatgaagccttccagccagccagtgatctctttggacccattaccttgcattctccatcagattggatcacctcccaccctgaggctccccaagactttgaacagttcttcagtgatccttacagaaagacaccctctccaaacaaacgcagcatttatatacagtccattggctctctaggaaacaccagaattatcagtgaagaatatattaaatggctcacgggctactgtaaagcatatttctatggcttgagagtaaaactcctagaaccagttcctgtttctgtaacaagatgttcctttagagtcaatgagaacacacacaacctacaaattcatgcaggggacatcctgaagttcttgaaaaagaagaaacctgaagatgccttctgtgttgtgggaataacaatgattgatctttacccaagagactcgtggaattttgtctttggacaggcctctttgacagatggtgtggggatattcagctttgccaggtatggcagtgatttttatagcatgcactataaaggcaaagtgaagaagctcaagaaaacatcttcaagtgactattcaattttcgacaactattatattccagaaataactagtgttttactacttcgatcctgtaagactttaacccatgagatcggacacatatttggactgcgacactgccagtggcttgcatgcctcatgcaaggctccaaccacttggaagaagctgaccggcgccctctaaacctttgccctatctgtttgcacaagttgcagtgtgctgttggcttcagcattgtagaaagatacaaagcactggtgaggtggattgatgatgaatcttctgacacacctggagcaactccagaacacagtcacgaggataatgggaatttaccgaaacccgtggaagcctttaaggaatggaaagagtggataataaaatgcctggctgttctccaaaaatgaggaccttcaaataggagtgattgaaataaataactacttgcatgttatgctttcatttgggtggaatacttcattggaataaactactgatcttgtgctgtgtcaaagtaacagactagaaccttctttcaagtacctgaattgaaatgaaactcattttgaataataaaaactctagaaactct

SEQ ID NO: 108471 - DNA, 897 bp, Homo sapiens
  Payload ID: 1316
  Gene Symbol: AMZ2
  Gene Name: archaelysin family metallopeptidase 2
  ENST ID: ENST00000584494
  CDS Start-End: 153-897
gctgccgcgggtgggtggtatcgaggcctgtcgggtcagggcggttcgcgggtgctgtcagagctgggccggggcccctaggcaggccaggcccagacatgtccgtccttgtaagttaaaagcttccatgggagccttccttcctaatcaagatgcaaataatacggcactccgaacagacactaaaaacagctctcatctcaaagaacccagtgcttgtatcacagtatgagaaattaaatgctggggaacaacgtttaatgaatgaagccttccagccagccagtgatctctttggacccattaccttgcattctccatcagattggatcacctcccaccctgaggctccccaagactttgaacagttcttcagtgatccttacagaaagacaccctctccaaacaaacgcagcatttatatacagtccattggctctctaggaaacaccagaattatcagtgaagaatatattaaatggctcacgggctactgtaaagcatatttctatggcttgagagtaaaactcctagaaccagttcctgtttctgtaacaagatgttcctttagagtcaatgagaacacacacaacctacaaattcatgcaggggacatcctgaagttcttgaaaaagaagaaacctgaagatgccttctgtgttgtgggaataacaatgattgatctttacccaagagactcgtggaattttgtctttggacaggcctctttgacagatggtgtggggatattcagctttgccaggtatggcagtgatttttatagcatgcactataaaggcaaagtgaagaagctcaagaaaacatcttcaagtgactattcaattttcgacaactattatattccagaaataactagtgttttactacttcgatcct

SEQ ID NO: 108472 - DNA, 895 bp, Homo sapiens
  Payload ID: 1316
  Gene Symbol: AMZ2
  Gene Name: archaelysin family metallopeptidase 2
  ENST ID: ENST00000577273
  CDS Start-End: 2-607
gatgcaaataatacggcactccgaacagacactaaaaacagctctcatctcaaagaacccagtgcttgtatcacagtatgagaaattaaatgctggggaacaacgtttaatgaatgaagccttccagccagccagtgatctctttggacccattaccttgcattctccatcagattggatcacctcccaccctgaggctccccaagactttgaacagttcttcagtgatccttacagaaagacaccctctccaaacaaacgcagcatttatatacagtccattggctctctaggaaacaccagaattatcagtgaagaatatattaaatggctcacgggctactgtaaagcatatttctatggcttgagagtaaaactcctagaaccagttcctgtttctgtaacaagatgttcctttagagtcaatgagaacacacacaacctacaaattcatgcaggggacatcctgaagttcttgaaaaagaagaaacctgaagatgccttctgtgttgtgggaataacaatgattgatctttacccaagagactcgtggaattttgtctttggacaggcctctttgacagatggcactggtgaggtggattgatgatgaatcttctgacacacctggagcaactccagaacacagtcacgaggataatgggaatttaccgaaacccgtggaagcctttaaggaatggaaagagtggataataaaatgcctggctgttctccaaaaatgaggaccttcaaataggagtgattgaaataaataactacttgcatgttatgctttcatttgggtggaatacttcattggaataaactactgatcttgtgctgtgtcaaagtaacagactagaaccttctttcaagtacctgaattgaaatgaaa

SEQ ID NO: 108473 - DNA, 713 bp, Homo sapiens
  Payload ID: 1316
  Gene Symbol: AMZ2
  Gene Name: archaelysin family metallopeptidase 2
  ENST ID: ENST00000580837
  CDS Start-End: 123-713
gcctgtcgggtcagggcggttcgcgggtgctgtcagagctgggccggggcccctagccaggcccagacatgtccgtccttgtaagttaaaagcttccatgggagccttccttcctaatcaagatgcaaataatacggcactccgaacagacactaaaaacagctctcatctcaaagaacccagtgcttgtatcacagtatgagaaattaaatgctggggaacaacgtttaatgaatgaagccttccagccagccagtgatctctttggacccattaccttgcattctccatcagattggatcacctcccaccctgaggctccccaagactttgaacagttcttcagtgatccttacagaaagacaccctctccaaacaaacgcagcatttatatacagtccattggctctctaggaaacaccagaattatcagtgaagaatatattaaatggctcacgggctactgtaaagcatatttctatggcttgagagtaaaactcctagaaccagttcctgtttctgtaacaagatgttcctttagagtcaatgagaacacacacaacctacaaattcatgcaggggacatcctgaagttcttgaaaaagaagaaacctgaagatgccttctgtgttgtgggaataacaatgattgatctttacccaagagactcgtggaattttgtctttggacaggcctctttgacagatggtgtg

SEQ ID NO: 108474 - DNA, 829 bp, Homo sapiens
  Payload ID: 1316
  Gene Symbol: AMZ2
  Gene Name: archaelysin family metallopeptidase 2
  ENST ID: ENST00000580548
  CDS Start-End: 244-829
caggggcgtggcatgggtgggtcgtgagttgggcggggcccacagggcgtgcgcgacgcagcggcgcggcgcgtggcgtaaggggcgtggcgccagtgggcgtggcgtggcgcagtgcgaagggacgcggtgcgcatgcgcgtgagggctgccgcggcctcgtggtggaacatcggacccattcaagaggaaggatgaaagctctatataggaacacgatgtgaatggaagaaacctgtcattatgcaaataatacggcactccgaacagacactaaaaacagctctcatctcaaagaacccagtgcttgtatcacagtatgagaaattaaatgctggggaacaacgtttaatgaatgaagccttccagccagccagtgatctctttggacccattaccttgcattctccatcagattggatcacctcccaccctgaggctccccaagactttgaacagttcttcagtgatccttacagaaagacaccctctccaaacaaacgcagcatttatatacagtccattggctctctaggaaacaccagaattatcagtgaagaatatattaaatggctcacgggctactgtaaagcatatttctatggcttgagagtaaaactcctagaaccagttcctgtttctgtaacaagatgttcctttagagtcaatgagaacacacacaacctacaaattcatgcaggggacatcctgaagttcttgaaaaagaagaaacctgaagatgccttctgtgttgtgggaataacaatgattgatctttacccaagagactcgtggaattttgtctttggacaggcctctttgacagatg

SEQ ID NO: 108475 - DNA, 1339 bp, Homo sapiens
  Payload ID: 1316
  Gene Symbol: AMZ2
  Gene Name: archaelysin family metallopeptidase 2
  Uniprot ID: Q86W34
  ENST ID: ENST00000580753
  CDS Start-End: 87-1169
cgtggcgcagtgcgaagggacgcggcccagacatgtccgtccttgtaagttaaaagcttccatgggagccttccttcctaatcaagatgcaaataatacggcactccgaacagacactaaaaacagctctcatctcaaagaacccagtgcttgtatcacagtatgagaaattaaatgctggggaacaacgtttaatgaatgaagccttccagccagccagtgatctctttggacccattaccttgcattctccatcagattggatcacctcccaccctgaggctccccaagactttgaacagttcttcagtgatccttacagaaagacaccctctccaaacaaacgcagcatttatatacagtccattggctctctaggaaacaccagaattatcagtgaagaatatattaaatggctcacgggctactgtaaagcatatttctatggcttgagagtaaaactcctagaaccagttcctgtttctgtaacaagatgttcctttagagtcaatgagaacacacacaacctacaaattcatgcaggggacatcctgaagttcttgaaaaagaagaaacctgaagatgccttctgtgttgtgggaataacaatgattgatctttacccaagagactcgtggaattttgtctttggacaggcctctttgacagatggtgtggggatattcagctttgccaggtatggcagtgatttttatagcatgcactataaaggcaaagtgaagaagctcaagaaaacatcttcaagtgactattcaattttcgacaactattatattccagaaataactagtgttttactacttcgatcctgtaagactttaacccatgagatcggacacatatttggactgcgacactgccagtggcttgcatgcctcatgcaaggctccaaccacttggaagaagctgaccggcgccctctaaacctttgccctatctgtttgcacaagttgcagtgtgctgttggcttcagcattgtagaaagatacaaagcactggtgaggtggattgatgatgaatcttctgacacacctggagcaactccagaacacagtcacgaggataatgggaatttaccgaaacccgtggaagcctttaaggaatggaaagagtggataataaaatgcctggctgttctccaaaaatgaggaccttcaaataggagtgattgaaataaataactacttgcatgttatgctttcatttgggtggaatacttcattggaataaactactgatcttgtgctgtgtcaaagtaacagactagaaccttctttcaagtacctgaattgaaatgaaactcattttgaataataaa

SEQ ID NO: 108476 - DNA, 672 bp, Homo sapiens
  Payload ID: 1316
  Gene Symbol: AMZ2
  Gene Name: archaelysin family metallopeptidase 2
  ENST ID: ENST00000584837
  CDS Start-End: 8-672
ggtgcgcatgcgcgtgagggctgccgcggccaggcccagacatgtccgtccttgtaagttaaaagcttccatgggagccttccttcctaatcaagattggatcacctcccaccctgaggctccccaagactttgaacagttcttcagtgatccttacagaaagacaccctctccaaacaaacgcagcatttatatacagtccattggctctctaggaaacaccagaattatcagtgaagaatatattaaatggctcacgggctactgtaaagcatatttctatggcttgagagtaaaactcctagaaccagttcctgtttctgtaacaagatgttcctttagagtcaatgagaacacacacaacctacaaattcatgcaggggacatcctgaagttcttgaaaaagaagaaacctgaagatgccttctgtgttgtgggaataacaatgattgatctttacccaagagactcgtggaattttgtctttggacaggcctctttgacagatggtgtggggatattcagctttgccaggtatggcagtgatttttatagcatgcactataaaggcaaagtgaagaagctcaagaaaacatcttcaagtgactattcaattttcgacaactattatattccagaaataactagtgttttactacttcgatcctgtaa

SEQ ID NO: 108477 - DNA, 783 bp, Homo sapiens
  Payload ID: 1316
  Gene Symbol: AMZ2
  Gene Name: archaelysin family metallopeptidase 2
  ENST ID: ENST00000584836
  CDS Start-End: 1-229
ggaacaacgtttaatgaatgaagccttccagccagccagtgatctctttggacccattaccttgcattctccatcagattggatcacctcccaccctgaggctccccaagactttgaacagttcttcagtgatccttacagaaagacaccctctccaaacaaacgcagcatttatatacagtccattggtaaatactggctctctaggaaacaccagaattatcagtgaagaatatattaaatggctcacgggctactgtaaagcatatttctatggcttgagagtaaaactcctagaaccagttcctgtttctgtaacaagatgttcctttagagtcaatgagaacacacacaacctacaaattcatgcaggggacatcctgaagttcttgaaaaagaagaaacctgaagatgccttctgtgttgtgggaataacaatgattgatctttacccaagagactcgtggaattttgtctttggacaggcctctttgacagatggtgtggggatattcagctttgccaggtatggcagtgatttttatagcatgcactataaaggcaaagtgaagaagctcaagaaaacatcttcaagtgactattcaattttcgacaactattatattccagaaataactagtgttttactacttcgatcctgtaagactttaacccatgagatcggacacatatttggactgcgacactgccagtggcttgcatgcctcatgcaaggctccaaccacttggaagaagctgaccggcgccctctaaacctttgcc

SEQ ID NO: 108478 - DNA, 722 bp, Homo sapiens
  Payload ID: 1316
  Gene Symbol: AMZ2
  Gene Name: archaelysin family metallopeptidase 2
  ENST ID: ENST00000579724
  CDS Start-End: 103-722
gggctgccgcgggtgggtggtatcgaggcctgtcggccaggcccagacatgtccgtccttgtaagttaaaagcttccatgggagccttccttcctaatcaagatgcaaataatacggcactccgaacagacactaaaaacagctctcatctcaaagaacccagtgcttgtatcacagtatgagaaattaaatgctggggaacaacgtttaatgaatgaagccttccagccagccagtgatctctttggacccattaccttgcattctccatcagattggatcacctcccaccctgaggctccccaagactttgaacagttcttcagtgatccttacagaaagacaccctctccaaacaaacgcagcatttatatacagtccattggctctctaggaaacaccagaattatcagtgaagaatatattaaatggctcacgggctactgtaaagcatatttctatggcttgagagtaaaactcctagaaccagttcctgtttctgtaacaagatgttcctttagagtcaatgagaacacacacaacctacaaattcatgcaggggacatcctgaagttcttgaaaaagaagaaacctgaagatgccttctgtgttgtgggaataacaatgattgatctttacccaagagactcgtggaattttgtctttggacaggcctctttgacagatggtgtggggatattcagctttgccaggtatggcag

SEQ ID NO: 108479 - DNA, 845 bp, Homo sapiens
  Payload ID: 1316
  Gene Symbol: AMZ2
  Gene Name: archaelysin family metallopeptidase 2
  ENST ID: ENST00000584350
  CDS Start-End: 1-72
cgcagcatttatatacagtccattggtaaatactggggacatcctgaagttcttgaaaaagaagaaacctgaagatgccttctgtgttgtgggaataacaatgattgatctttacccaagagactcgtggaattttgtctttggacaggcctctttgacagatggtgtggggatattcagctttgccaggtatggcagtgatttttatagcatgcactataaaggcaaagtgaagaagctcaagaaaacatcttcaagtgactattcaattttcgacaactattatattccagaaataactagtgttttactacttcgatcctgtaagactttaacccatgagatcggacacatatttggactgcgacactgccagtggcttgcatgcctcatgcaaggctccaaccacttggaagaagctgaccggcgccctctaaacctttgccctatctgtttgcacaagttgcagtgtgctgttggcttcagcattgtagaaagatacaaagcactggtgaggtggattgatgatgaatcttctgacacacctggagcaactccagaacacagtcacgaggataatgggaatttaccgaaacccgtggaagcctttaaggaatggaaagagtggataataaaatgcctggctgttctccaaaaatgaggaccttcaaataggagtgattgaaataaataactacttgcatgttatgctttcatttgggtggaatacttcattggaataaactactgatcttgtgctgtgtcaaagtaacagactagaaccttctttcaagtacctgaattgaaatgaaactcattttgaataataaaaactctagaaactc

SEQ ID NO: 108480 - DNA, 1492 bp, Homo sapiens
  Payload ID: 1316
  Gene Symbol: AMZ2
  Gene Name: archaelysin family metallopeptidase 2
  Uniprot ID: Q86W34
  ENST ID: ENST00000577866
  CDS Start-End: 289-1371
ccgaattctgcgccccctgcccatcttctcccgcagcttccctagattaggcttgggaggcaagaggaggcctcctgacctttcacactgcctttttaatattaagatgaagtcacactccacaactttcttccagccaggcccagacatgtccgtccttgtaagttaaaagcttccatgggagccttccttcctaatcaagcctcgtggtggaacatcggacccattcaagaggaaggatgaaagctctatataggaacacgatgtgaatggaagaaacctgtcattatgcaaataatacggcactccgaacagacactaaaaacagctctcatctcaaagaacccagtgcttgtatcacagtatgagaaattaaatgctggggaacaacgtttaatgaatgaagccttccagccagccagtgatctctttggacccattaccttgcattctccatcagattggatcacctcccaccctgaggctccccaagactttgaacagttcttcagtgatccttacagaaagacaccctctccaaacaaacgcagcatttatatacagtccattggctctctaggaaacaccagaattatcagtgaagaatatattaaatggctcacgggctactgtaaagcatatttctatggcttgagagtaaaactcctagaaccagttcctgtttctgtaacaagatgttcctttagagtcaatgagaacacacacaacctacaaattcatgcaggggacatcctgaagttcttgaaaaagaagaaacctgaagatgccttctgtgttgtgggaataacaatgattgatctttacccaagagactcgtggaattttgtctttggacaggcctctttgacagatggtgtggggatattcagctttgccaggtatggcagtgatttttatagcatgcactataaaggcaaagtgaagaagctcaagaaaacatcttcaagtgactattcaattttcgacaactattatattccagaaataactagtgttttactacttcgatcctgtaagactttaacccatgagatcggacacatatttggactgcgacactgccagtggcttgcatgcctcatgcaaggctccaaccacttggaagaagctgaccggcgccctctaaacctttgccctatctgtttgcacaagttgcagtgtgctgttggcttcagcattgtagaaagatacaaagcactggtgaggtggattgatgatgaatcttctgacacacctggagcaactccagaacacagtcacgaggataatgggaatttaccgaaacccgtggaagcctttaaggaatggaaagagtggataataaaatgcctggctgttctccaaaaatgaggaccttcaaataggagtgattgaaataaataactacttgcatgttatgctttcatttgggtggaatacttcattggaataaactactgatcttgtgctgtgtcaaagtaacagactagaa

SEQ ID NO: 108481 - DNA, 2257 bp, Homo sapiens
  Payload ID: 1316
  Gene Symbol: AMZ2
  Gene Name: archaelysin family metallopeptidase 2
  Uniprot ID: Q86W34
  ENST ID: ENST00000577985
  CDS Start-End: 989-2071
aaattgcagaaatgatagggcttacattagttttgtttttatttgatgttgaagatctttgagtcacattagaaacgatgagtatttttcatgtggcactgatgagttaattcatattattattttttgagacagagtctctattgcccaggctggactgcagtggcacgatcacggcccactgcagcctcgacctcctgggctcagatgatcctcccatcttagcctgccaagtagctgggactacaagtgcacatcaccacatccggctaatttttttgtagatatggggttttgccatgatgtcgaagctgatttcagactcctaggctcaagtaatccttctgccttggcctcccaaagtgctgggattataagcgtgagccactgtgccaggccaatattattccccaaaagaaggaagttgggtgtgaggtcctgctcctgtggtcaccgtgaggttttttttttttgttttggactcttgcccaggctggagtgcagtggcacagtcatggctcactgcagcctcaagctcctgggctcaagtgattctcctgtctcagcctccctggtagctaggaccacagatgtgcacaactatgcccagggaatttttaaattttttgtagagacagggtctcaccatgttgcctgagctgttctcaaactcctggcctcaagcaatcctcctatcccaaagtgctgaaattacaggcatgagccaccacacctggccaccactagtttttgtaatgggagcaggttccatatgagatggaggaatggatttcatgattgtctttttaatttcttagatctccaagaaattggacatgaggaaaccactctaagtgtgaccactctaaagcattagcaatcagtcatttcactctagggagaaatcagagctgaaatatagaggataggtaaagtccccaatgtagatatgtatttttatatttgattacttgcttttttttgttagatgcaaataatacggcactccgaacagacactaaaaacagctctcatctcaaagaacccagtgcttgtatcacagtatgagaaattaaatgctggggaacaacgtttaatgaatgaagccttccagccagccagtgatctctttggacccattaccttgcattctccatcagattggatcacctcccaccctgaggctccccaagactttgaacagttcttcagtgatccttacagaaagacaccctctccaaacaaacgcagcatttatatacagtccattggctctctaggaaacaccagaattatcagtgaagaatatattaaatggctcacgggctactgtaaagcatatttctatggcttgagagtaaaactcctagaaccagttcctgtttctgtaacaagatgttcctttagagtcaatgagaacacacacaacctacaaattcatgcaggggacatcctgaagttcttgaaaaagaagaaacctgaagatgccttctgtgttgtgggaataacaatgattgatctttacccaagagactcgtggaattttgtctttggacaggcctctttgacagatggtgtggggatattcagctttgccaggtatggcagtgatttttatagcatgcactataaaggcaaagtgaagaagctcaagaaaacatcttcaagtgactattcaattttcgacaactattatattccagaaataactagtgttttactacttcgatcctgtaagactttaacccatgagatcggacacatatttggactgcgacactgccagtggcttgcatgcctcatgcaaggctccaaccacttggaagaagctgaccggcgccctctaaacctttgccctatctgtttgcacaagttgcagtgtgctgttggcttcagcattgtagaaagatacaaagcactggtgaggtggattgatgatgaatcttctgacacacctggagcaactccagaacacagtcacgaggataatgggaatttaccgaaacccgtggaagcctttaaggaatggaaagagtggataataaaatgcctggctgttctccaaaaatgaggaccttcaaataggagtgattgaaataaataactacttgcatgttatgctttcatttgggtggaatacttcattggaataaactactgatcttgtgctgtgtcaaagtaacagactagaaccttctttcaagtacctgaattgaaatgaaactcattttgaataataaaaactctagaaactctt

SEQ ID NO: 108482 - DNA, 1498 bp, Homo sapiens
  Payload ID: 1316
  Gene Symbol: AMZ2
  Gene Name: archaelysin family metallopeptidase 2
  Uniprot ID: Q86W34
  ENST ID: ENST00000612294
  CDS Start-End: 221-1303
ggcgtaaggggcgtggcgccagtgggcgtggcgtggcgcagtgcgaagggacgcggtgcgcatgcgcgtgagggctgccgcgggtgggtggtatcgaggcctgtcgggtcagggcggttcgcgggtgctgtcagagctgggccggggcccctagccaggcccagacatgtccgtccttgtaagttaaaagcttccatgggagccttccttcctaatcaagatgcaaataatacggcactccgaacagacactaaaaacagctctcatctcaaagaacccagtgcttgtatcacagtatgagaaattaaatgctggggaacaacgtttaatgaatgaagccttccagccagccagtgatctctttggacccattaccttgcattctccatcagattggatcacctcccaccctgaggctccccaagactttgaacagttcttcagtgatccttacagaaagacaccctctccaaacaaacgcagcatttatatacagtccattggctctctaggaaacaccagaattatcagtgaagaatatattaaatggctcacgggctactgtaaagcatatttctatggcttgagagtaaaactcctagaaccagttcctgtttctgtaacaagatgttcctttagagtcaatgagaacacacacaacctacaaattcatgcaggggacatcctgaagttcttgaaaaagaagaaacctgaagatgccttctgtgttgtgggaataacaatgattgatctttacccaagagactcgtggaattttgtctttggacaggcctctttgacagatggtgtggggatattcagctttgccaggtatggcagtgatttttatagcatgcactataaaggcaaagtgaagaagctcaagaaaacatcttcaagtgactattcaattttcgacaactattatattccagaaataactagtgttttactacttcgatcctgtaagactttaacccatgagatcggacacatatttggactgcgacactgccagtggcttgcatgcctcatgcaaggctccaaccacttggaagaagctgaccggcgccctctaaacctttgccctatctgtttgcacaagttgcagtgtgctgttggcttcagcattgtagaaagatacaaagcactggtgaggtggattgatgatgaatcttctgacacacctggagcaactccagaacacagtcacgaggataatgggaatttaccgaaacccgtggaagcctttaaggaatggaaagagtggataataaaatgcctggctgttctccaaaaatgaggaccttcaaataggagtgattgaaataaataactacttgcatgttatgctttcatttgggtggaatacttcattggaataaactactgatcttgtgctgtgtcaaagtaacagactagaaccttctttcaagtacctgaattgaaatgaaactcattttgaataataaaaactctagaaactctttatcttctc
